United States Patent Application Publication US 2008/0114160 A1 - sequence listing, part 11

SEQ ID NO: 5193 - DNA, 9085 bp, Oryza sativa
agtgtgataatcggcaagatggctctacagtgtgtggccaagtatatgttcacaacttatagaagcccctgcagagacgtcaacgccctagatagaaaagtcttcgtcttcttccccaaaaatacaccttttttaattatcacagacaaccttccaaccacagttaagattaatatacgtaaccctatggcttataattgctgattagtgattcggattgaaatccatggaccaaaaataattaaactacgagtagctaccccacttatagtacgtcgtcaacctgtaaacttgcgtattcaaacacttcagctaaatcaactgatacctgcacacttcgatccattatacactgcgtatatttcgtggccagtgtaccgaattcgcaatcagagaaagagagaggttagaacttagaacaagactgtgtcagaggaaatatctctgaaattgcgcgcatgcatatgccgacgttagcattcatacaaattgcaatagcgataaaattgattaatcctagtttgactgaatatcatccagaattgaatcacattttcataaagatttttcgtgggccggaacgccggccgaatcctatatacttatatagttcatccccactaaatatagttaatgctatttctctcttctctcgttaagccacatcactctaattatttctagcttttaaataaaagatctatgatccaaattgtctcttctttcttctctctttaaaaacatacaatcttaattatttttaggctcaaaattatttcaaattgttttagttttgataattaaattacatcttatttgcacatattatgtaacttaatttttcgcagcaacgcgacggggtattcatttagttctattaagaatcaagagagcaaattaatatcatagtgatatacaggtctagatatatattgattgatctctctcccccagttagcaactaccggccgaatggcaggcagtacagcgacatttgcagtttaatttacatgcacgtacatttgcgccaatgtggtaaatacaatatgattaatctctcaacaacattcaaattgttacattgtaagcatggtcatttttcgattgggctggaaacctggaaggcagcaaaaattaaactccccatcttaacaaacttgaaccggatattagtaaaaaaaaaagttacagaaacgtttgtggtttaattaaatgaattgtggtcattcttcgtctgattggaccggatggtctacagcaaaatttaattacataggtagatagataagttgtaatcagattagtattaattcaactgtgatgtatgcacctagctcatgatcgagtcatgtcatattggacggatttctacggctcaaaggcatacgtaatttctgttactgatatgtggtactccctccggttgtaaaaattaaaattgacgccgtcgatcgacttttaacatgatattcaaacgtaactatttgatttttatgaccagtaaaataaatagtaattaccataaatagtaattacctttttttaacaagatgcatgatcaaaacgtaatgactaaagttaactgtgtcaaatatgtatgaacagaagaaacacttactaaatacagtagtatggaagcatattgagtagctagccagcagcacactgaacatacacacagcatacagatagctagagtacaacacaaaaaacagtctccggctagtacaattatacaacacaatactagctagctagctacccacatgtgtatatactatatagtacattagcaacttcatttttccttgaagcaggaaagccggtactactggtttacacttcttcggcagttgaaaaaaaaataacaaaactatagaatcacgagcactcattaccacaaattatttggcggccttccgtgattatttcttctgaataataacttaacttaactgaaccaacgaacgcttgtagaatttgagtacgtacgaattaagtatgtgccaacatgcatgcatgcgtgcacatgcagagttgcagtagatatcgatggagtcgatcgagatgcagaacggagaggagacatcgacgaattgaattgaagcaatttaggaatctatcaggctcagtcgaatccgaacctacggtccatatagccgccgacggcttggaacgtcggaccgaagagcccgtttcgtcctcctccgccgccgccgttgtctctcctctcgccggagttctcgttctgcgacgacgacgaccctggctgcgtcatgtagatgacgttgaggtacgtcggcgccgaccctgagccaccctcctgccgcggcggcgccggcgcaccccagccggaattagagccatagccataggaggcaggggcgctgccgccgccgcctccggctacgatggcgccgccgttaccataggaagagccgccgtagccgccgccgttgccgtaagtagagccgccgtacccgccggcgttgccgtaggaagggccgccgtacccgccgccgttgttgtaggggttgtagccgctgggggcgctgctgctgtagccctcgttgttgccgtaaccgccgtagttgctgtagctccggtctctctcgccgccgtcgtcgtcgtacttgtagctgctgctgctgctgctgctcttcttcttgttgctcttctttcccctgcgcctgttccggtcgccgtggtcgtcgtcgtcgtcgctgcccgtgccgctgcggttgtcgtcgtcgctggtgtacctcgggtactcctcggacgtcgtccacggcgagcggccgttgccgctgccggctgtccgtaccggtcgtctcctcctcctccggcgaacgacgagctgtcagagccagcgtagtactggctgctgctgctgctgcttttgccgctggatttcttccaccaggacatcgcctctcgacttcttgattgaacttaacttaaattaattatggtcccagctactgatcgagctagctagcatgtaattaacgatttactgattagcagcaagatatgatgcagtaaataaactcgaatgagaaattttttttgaataactcaagctgaattagcatgcatgcatactaacccgacagtagatgatcagatgataggccagataagcgcagatactcacaagagagatgcctctaaaaacttgatcttatagaagctcaaagacatcgatcagatcaaagtctcgtcaacttcaatataaaatagggcactttttaatttaatcatcacctaatgagacctaaacttcccaccaacagcagttacgcgtggatatatcagagataaaatgagacccaaggcggctgtgccctgattatgatccaaatctagggttccaaaattattagactacgagtccacttgcgaagtatggcatcacatctgacgtgtagacttgcatatgcaaaacacttgagctaaaccaaccaatccctacacgcttaattgcactgcgcactgcgtagatttttggtggtcagggcaacgaattttcgcaatcagaaaagcgaaacgaattaaagagttaactaatacaaatttagaagtagactttgtcacaggaaacatctatgaaagttcatatatatgaaataatgaaaacgttatgcatgcgacaaagagtttaacttagtctgactgaatactgtatatatccagaattgaatttgaatcacatcttttgataaagatatatatgtcgctatagcttgagagataatccccagttagcagtagcaattagcaattactagacggaaggcagtacagcgacacacacacacacacacatacatatatacataatatatatatatatatatatatatatatatgcagttttaatttacatgcacgttcactgttgtgtcaatctggtaaaagtgattaatctcagctagctggatccaagtaattaattgttacatatgcaaggtcatttttcaacagggtataaaaaacggtggcatttggctgttaattttggccggaaacctggaaggtagcagacactatccttaattaacaaacttgatctagctgcaagtagtaaaaaaaaatgcagatatgtactgtagtcaatgagttgtagtcaatatcttagtctgattaattaattggaatggcccatatatatgggacaattacgttcttccttttttttaaaaaaaaagaaatttcggtcatgattttaatttaccactggttttttaattttatgattttcctatcatttttaactaataatttcacacatgcccttgcattttatcatgacttttgcccctttttttaatatgaattcaatttttaaatgaaaatgtgaggacaagctagcataagcttgaaatgaattttaacaccattaagtcattttaatgaaatgacaggaacaagcttcagtcaaaaaatgagagcaaagttacaaagttggaaaagtgggtaaaatcataattggaagtctcaacagaggtaaccataaatgcctattaaatatacactgattgtctagaacgaaaacactatgtaagatgtaattagttttagcattaatatatagtttgtggttttttttatcacatgtatatagtttgtggttgatgtaatgtgatgataatcatactagcttaaattaggttgtataaaaaaatttcaagcgctgcttgcacttggcctcatcaatcatatctaacattggacgaaataatactataaccgttgtccttggtaaaactacaaatcactggacggcatattcaagcagagacaaaatttggcatatagcaaggtgtgctttaacagcataggatcggactaaaagtccatttatgatcagaacttatgaagaaaattaaaaattgcaggcttggctgcgctcggccctgcagtcccccattttatgatctggagtaacttttagtgtatatttaaattagaagaaattacacttgaatttaattacaaactgattaattacaatatgatgcaatcacacatacatacattaactgagcacaaacatacgtatatatatatacgcatgccgtacacacatacttatgcacacagtgtcacatatatatctcacacagtacatgaatatatacagagtacagtacatgaaacaaaccgacactgcagtcggaaaaaaagaaagaaaaaataaataaaaataaagccaattaaccacaaacacatacatacacgttgcggccgtatgcagatgcaaagaagaaatacttattagaagcgagcaattaataattacgtatacgcacgtaaatacggtcgtacgtatactagagctcgcagacggtacgtacgtacgtatactgatagtctgatgtacgtatatatgcatgtgataatagtacaagtttcgtgttaattacgcgcgtcaccgattaattagtataattaattaattagtcgctgctgtggaagccgaaccttctgtcgaagaaatggccgacggcctcgaacgccgggcggaagaacccgccgctgcgccgcctctcgccgctgccgccgccgccgccgtagccgtcgccgccgtcgtacggcccatgcggccccccgtacacgtggacctcgcgagtgttgatgtacagcggcgacctcgcgccgttctggggagtccagtacccggccggcacgccgccgccgccgccgtacggcacggatccaccaccggtgtaacctccgccgccgccaccgccgtagtacggagtaccgacgccggcgccgtagagggtgacgctgccggcgttgtagccgccgttgtaaccgtaaccaccaccaccaccgtagttagcgccggcgttggccttggtgctgccgccgtagccgccgccggatgctgcgtagccgacgacggcggcggtggcggcgtcgtcgttcctgccgctggtcttcttcaggcgcgacggcggcggcggctggcgcttcgccgacgtcttgtcgccggcggcggccgcttcatactgctgctgctgctgctgctgctgccgtcctcctgatccgtaggtgtcagtggaggaattggagtagctgctgccgctgaaggatctaccgctgctgttccacatacctatccagcggtcgatcgaacaaattaagctaataaaattgcacgtacatgtcaagaatattcagagattcgatcgttgcgttgttttatatatagtatatatatttggtggctgcagctaatacatgtaattagtatgtgatatattgcattcagctgacggtatacatgaacggatttgcaaacgaattaaagaaccaattatcatatactcctataacggatacttcagatatattcagaagtattcttgaattattgatcagctagagtttaatgaactgtgtctgacgaatttgattatgtcgatctggttagctagtggttgatggatgaactgtgcctgatatggtagttcttcaagcttgcatggatgaacataatccgctagaacagtaaaaagtgaaaaagaaacataaaacaaagtaaaaggaggatcatagataagatacctttaatttgtggaggagatgacacttaattggatccggtataaggcaccctctgcagttgccaaggggcgttctatatagagctagtacactcaagtcaaccacacttcgagtctccggttttgcaataaaaaaaagaagacacttgtcgtcttagctatagagaaaaagcttcaaattatctgcgtcatatttgaatgccacccacaatgattaccatattttgtgttaatgtaaccgggggcgaatttactgttggggctccaattgaacaggtaacaatgtgttagagcaagcaggaacaacagtttgcagtagaggagcaagtaagaaagaaactgaccaactggtttgctacgatgaagccggccaagcttcatagcttcagattttatccaatcaggtctggtagcatatagggtataggcgatagtaaaatatgaatatcaataatttaggctttaggtataaacttacaactaatttattctttattattaacactacaaatcattttactttcatttttggtgtttcagtactaatttgaaattttatgagcgttaaatttgtgttatggattgcgacctaagagccccaactcgattttcattctacattcgccactgaatataactaaagttaaaattaattaacacatattaattctgccaatgaatgattgatcttcttaattatatgatcatttaacagttaatattcgccactaacaatgatcaagtaatgatagattcatgatttgtgcgtgtgtgtactgacactgttcacccagctagctaattaattactctcaccagaaaaaaaaattaaccctcgtggtaattaatctctgcaccaagcgagaacctttgatcagaaattaatgaaaccaacaacggtcagatcaagctaggtctcatactgtacttagaaagtagaaaatgtgtcacgatctagtatacgcaaggctgacttctagggatatacgtgtgcttgcgagttgcaagcagccaagaggacgtatgaactgtatcatttcatgaaacagccaatccctaactagtcactgcattaattaattaaataattacagacagtagtctgcactagtgcagagagctcagatcaattgcgattatactccctcagtactcattaaaaaaatcgtttagaacaacgtttaagtcaaaccttaaaaatataaattatgaataactcttaagttgttgagtttgaaaatataaaaaatatataaatagatttgtcttgaaaaataatttcataaaaatataaatatatcattttttttaataaatatttttatataaataaaaagtcaaaattatattttggagaccgtatcactatccaaaacaatttcctttaccggagggatcgagtacagcgagagctgtggacttctcagacacgcatgcattaaaccgtgtgcacgtacgcaatttcggcagcctctctctctctctctctctgtagagtaagctaaacagtgacactgaaagagccatcaaaattaaatccatgccacatcagtctgatctggattactttagaggttagagctacattttcacaaccatatatttcatgatcgatcagatcgaccggtctagctaatgaacgcccatagctcacttaagtacctaacctggcttaatttgtagctttaattaattaacgtgcacttgcatgtactgtctgaatttaacaattaatgtggtaaatgatttcaattggcatgcaggcagctcgaatggtgtgtatgataataaaatgttgacaggaacagatactatagtgttaattaacccatgatcttgagcgtgaagttagtagcaaatcctggcttgtctctacaacctcttgcatctagctaacttggttcacacgtcaaaccaagtcgatagatccatgctcgattgacccttgacttgaaccaaattttattcagaaaagtagatgaaattacctgctagcgattgctacgtgccaaaatgacaattttagtatagtagcgacatttatattattatcgcaacctttctataaaattaaacgtaatctctccgttctttcattcgttaaaccctggtcaaagttggattatcgtcatgatacgttaagctaagtagatgaccataaccatttcattaaaacccaactaattgatattattgatctctccgatataagcaagtttaaaacgtttctaaactgtacgattacttgtttctttatttctagctagaaagttcgatggatcaactacctaatattgggatattcatggccactgtatattatattcagaggggattcaaacagatttagacctgtaattaggaaatgtttatatgagaattttacaccaacatgcagaaattcataagatatatgaatccaaataaggagacaagaagcgtacctaacaggatcttcatctctgtccctctaaaataaacagcatctcagaattcatgcttatcct

SEQ ID NO: 5194 - DNA, 2467 bp, Oryza sativa
agctggtgtcgttcttggcgcataacgacggaaatgatgaacagtcgaatggaagatggctcctaccgctatcacttggaaaacttgagattaaacatgttgattccctaaaaacgctgcagctctgctttccaggaaacctcacccgcctgaaaacactagtagtgttgggaaaccaaagtttaacatctctgcagctccattcctgcacagcactccaagagttgataattcaaagatgtgaatcacttaattctctggaaggtttgcaattgctcggcaatctcagggggctgctggcacacagatgcctcagcggccatggagaagatggaaggtgtatccttccgcaatcacttgagaaactttacatctgggagtactctcaagagaggctgcagctctgctttccaggaaacctcacccgccagaaaatactaggagtgttgggaagccaaagtttaacatctctgcagctccattcctgcacagcactccaagagttgatgattcgaagctgtgaatcgcttaattctctggaaggcttgcaatggctcggcaacctcagggtgctgcgggcacacagatgcctcagtggttatggagaatatggaaggtgtacccttccgcaatcacttgaggaactttacatccatgagtattctcaagaaactctgcagccctgcttttcagggaacctcactctcctgagaaaattacaagtaaaggggaactcaaatttagtgtctctgcagctccattcttgcacatcactccaagagttgataattgaaagctgtaagtcaattaattcgctggaaggcttgcaatcgcttggcaacctcaggttgttgcgggcattcagatgcctcagtggttatggagaatatggaaggtgtatccttccgcaatcacttgaggaacttttcatcagtgagtattctctagaaactctgcagccctgcttcctgacgaatctcacctgcttaaaacaattagaggtatcaggcaccacaagtttaaaatctctagaactgcaatcatgcactgcactcgaacatttgaagattcaaggttgtgcgtcgcttgctacattggaggggttgcaattcctccacgccctcaggcatatggaagtattcagatgccctggcttgcctccatatttggggagttcgtcagagcagggctatgagctatgcccacgactggaaaggctcgacatcgatgacccctctatccttaccacgtcgttctgcaagcacctcacctccctccaacgcctagagcttaactatcgcggaagtgaagtggcaagactaacggatgagcaagagagagcgcttcagctcctattgtccctgcaagagctccggtttaagtcttgctacgatctcgtagatcttcctgcggggctccacagccttccctccctcaagaggttggagatctggtggtgcaggagcatcgcgaggctgccagagatgggcctcccaccttcgttggaagaactggttatcgtagattgcagtgacgagctagctcatcagtgcagaactctagcaagcaagctgaatgtcaaaattaatggggaatatgtgaactgattactcggtggcttgttaggcgcacctttttccacctgcccaactggcgtgggctcgttcaggcgttcaagctgctgtaaattccattgccgcaatgacgaccttcagaaccgttacacaatacaaaggacatatgatggctagatcaactgtcgcagagctagctttggttcacctgaaaacataaggccaaacgcgtggttcttttaatcagaagtatcaaaaattggttttggtttttaacgaaaagatgttagaaatggttttaatgtgccagattctgtaccagaattctgtattttgctccgtaattctgtgctacgactgatgttgtatttaactgatagcaatcgaccggcaaaaccaatccgctccaatgcattgtcacatacaaattctataattctatctactgaaaaggatgattgctgttcattttcgtgattacagaaggaactgtgtatatcgtgctatttttgcattcacattgtgtcccaggttgtgctcggatcagccaatttcggtggttaattcactttgctgtgtcctctgtgcactcaagaattgttcgcacatgcaattcagttgagcatcgcactacgcaagttttttttttgttaacaaaggagtggttgacagcattgcaggttgctaaaacagtgtcaaaaatttgctaacaaaagaattctcttcagaaatagtatgaaaataaatgccacataagtaatctgagtaaaacagacataatcactagagaagactaacgacaaactcttctttttctatttctgtggtgaaaaactcagcatataatctcatgtatgcattggaggtgcataccatttcgatcatgtatgcat

SEQ ID NO: 5195 - DNA, 4987 bp, Oryza sativa
tcttgggccggccggcccgtaagctcggccgagccgccccttttctctcgggcggcgccctagcccgccgagggaagtctaatttccacccctctttcttttcttttcttttctttcccaataaggatttaataaatcctttttcctttagacgaaaaatccaagaatcttagaaattcaatatcctcccaaccgtagatccgtttgactccggtcaacttccaaaattccctcaaatctcggagatctatctaatagcacgcttagaggtcattaatagggctttattttcgccgtttgttgagttgtcccgtttcgcgtgtagtttccgagccctaagacccgcagtgcgaggatttcgaggatcaagcttcagctctcgagcaaggcaagccacctttgaacatcttgagcctatatttgaaatttaattatattgcttgcaaaatattatgcattgataggatcgcacttgatctgcttgtcccgtctgcaaggcagattggcagacctacctaattttgttgcatttgatcctccctttgttaattgcgataccatgtccccttgtaaccatctagttgcgtctcgatattcgtgcaccctgcgcgagtatcaacggatgccttcaaacttaaaatctgagtaacaacttgggtaaaacttgggttttgcaaaagacttggaaaacccgacacctgggtcggtgcttgcgaactaaatgaatttccaaaaccgcggaccggggaacgtaccgggtgtacggtttcccgctcttgcacttaaggactgtttccttggaatttcatccaaacataagacaagtacgaccacatgggtggaatgggagacatgtggattcaccggggtggtgtctgggaggacccctgggcttcctggcacagtatggtctgggacctaacctgttgttggtctgggacccctctcgtcggcatatggtaaacctgtgtcggctttggaaatatcttgtcatgaaagcttggaggtctcccgacgtggctgatccccacgggctgggtgatccgggttagtaatgtcgtgtgggtaaagtgtaccccctctgcagaggttaacaaactgttcgaacagccgtgcccacggtcatgggcggatgtgaggtgattcctagcgtagttttgtttgactactgcttgtgaaattgctgttgtgaaaaggggttcgacgtttgaaaatctgtagctgatgggatcagctaggcccgggtggccgtttgaaaagttgttggcccgggtgaccgttgaaaagctgttggccgggtgccaaccttgttttcatttctaaagactgatacatggcacatactccgaccggacgagacgcactgtctcatccgtgtcgtttgagaagcactcacttagttgtttcagaaaagagttcaaataaaatcaattgcaaaaacaccagtctctccttgaagcctgcattaaacacttatttcccctggcttgctgagtactcccgtactcacccttgctctatataaataattcccccctagttgctgaagaagatgaagcggatcctgctgatgaggagttctttcaggagcaagccggctacgatgagttttagggtttcgggctagttcccaagtcgcgcctgtattgattggtccaagtcctgcttccggttttcttttgtaatgcagttgtgagctcggggtctgtccgcagcccaacatgactgtactactactctataataaaaagacctctgttgctgtgatattctgtctccctgtgataccagcactgtttcctgggactggtatcgattaacaggttaatttggagcgtcacgggctagttccggtcgggactatttcggggcgtgacattcaccttcaccttcaatatcagttgagagttttgaatttgagttgaaaagtttctaaaatttaagttgaatgttttgaattttgagatgaaagttttcaaattttatcaaatattttgaattttgaggtgaaagcttttaaatttgagctaaaagttttcaaacctgagttaagttttcaaatcttgacttgatttttttaaatttgaattgaaagtttcaaatctttagttgaaagttttcaagtccgagttgaaagttttcaaatccgacttgaacgttttcaaatcgagttgaaagtttttaaatccgagttgaaagttttcaagtttgaattgaaagttttcaaatctgagttgaaagtttttaaatttttacttaaaagtttccaaatctgagttaaaagtttctaaatcttgaattgaattttttcaaatattgactcctactcttagacgtgtgtggtagttaacggcaaaaaaagaagaagaaaaaaacaagaaagaaacacggcagttgtgcctaccgaaaaaaagaaaataaaaaagaaaaaagaagcgcgcagactcggtcgtaggaggacccgccacgtggcacgctcgcgacttggagaagtcgcgcatacgcgcgaattaggattcctgtaaacttatatatttgtattgttgacgttttaataggcaaggctgaacgttaagataggaaaaatctcaaagttaacttaaaactaacattcgaaatccttttttttttttgcgggcaacaagccaacaagactataaaatcagagtgccatagagtagtggccatagtgtaaaattaaagaactggtgtgcttaattagattactggttagcctctatgggcaattaagaaaaaatatgttgttttttctaagttattcattgtgtgattataatttaattctatatatatatatatatatatatatatatgatttaactaggtcatgctaagtatgtttccttaaagaataaatatgttgtttttttataagttattcattgtgtgattataatttaattcaagatatatatgatttaactaggtcaacatgaagctgttctatatattttctgactcaaattaggaacatcactgttccagtgggtgaccatatatatttattacgagaaaaagaaactaacctcttaatttaggatccagtatttgttcatgtaattaatttagtccacagatagatgttaacacatggtagcgtataagatagcacatattgatcccaaattagctgtccctgcctttcggattatttgatgttgacgagatacgacttctacaaatttaagataggattaattaattaccatcaattgtttcctggatatatatagcgtgactacatgagatggttccatattaagtggtacatgggagtatacacatcttgttcatatagcagggtcaaagtaattataacaggggtctccaaaaaataaagcttcttataacaaattaatatatagttataactgtgtaattacaaactgtctaaaattaatttcacattgtaaattatatggcagaaacattttttttttcaatttgcaacccaacagtacgtgctagctgtcccaaaaaaacaaggttgcttttcttgagctagcttagcactggctgtctctggctcatcatcagtggttcagtactatacaggaccccatattaatgaaataaataggcaacaggcaccccggccagaaaacatatttggactttagagagtgtcaaagttaacacaccagcaaagtcaatcgaacatgccaccatttatgaaacagaaaccataataataatgcatgatcaaacacataataatatacacctaccaaggtcaggaaaccattaatatttttccctttagcgtgttgtcacttatgatcttttaggtgtgttgccaacctggactcgtttgtctccttttgcatacggtttccgatccatcttacgtaggagtagtagccaaaattaaacatgtgcgtaaaaaaaaacttcaacttttgtacagaggctgcgtttagatctaaagtttgtttggatccaaacttcagtccttttccatcacatcaatatgtcatacacacgtaacttttcagtcacatcatctccaatttcaaccaaaatacaaactttgcgctgaactaaacacaaccagacatggatgaatgcttaattcggctgcttgtttcttttaacatatagtccgaccatcatatacatactggttattcgtgttctctgttctctgttctgtagtactagttaaaagttcaatagtttatgtgtacagtcttaagttaatttagtgttggcctaaactgcacgcgtaccataataattccaatatttctctgttgcatccttccaggtatcgagatgatgacggggctagtgatgacttgatcgatcccaggtttacttttgaacatatagattttacaggattctcatagaatcagtacattttattcgttaaaaggacacctgaaaattactgtttttgtttaaagggcgcgttgttcctttgttagtgatgcacgcagcacacgtatataccacaaatgttggaggagcgtggagctgatctcatgtcagcagagagatgcttcgattttcctctctttttgtcgctaccaatatactctaatcgtatgatctacggctgataaaccatgaaaatcatgaactagcaaccaataatttataaataaatcttttatatccacttattccgtcctaaaatataagaagttttggtaacatcatagtactacaaatctgtacaagctctttgtccaaattcgtattattaggatgtgtccaatccaattaaaactttttatatttgggatggatgaagtatattattagtgacttaaaaagcaattgctagaaaataaattactaacatagaaaaatatacaaagtttacataagattacaatttaaatataaattttagttaagactaatgaaccaacaatgagacgaatctatgcgaaaagaaggatgaaaatggagggagtacatgtagtagtactcctccagtagacagaagtgagcggat

SEQ ID NO: 5196 - DNA, 3760 bp, Oryza sativa
cagtttaaatttgaaccaacgggagaattttcacagagagagaattacagagattttgctactgttcatatgattttatatagtcttccgctgcaaatagatgaaattgatgaaaattagtgtttctaaaattaaatttcgaaccaacgggagaatttaattttaggaacattaattatgtgctatgatgttgtaattttctgaccaacgttgttaattgcaatattatagttatggttatatgtgttatgtctaattctgcccaacggtgatgtaggcttaatgcataatattttaatgttaattttgttctcaccgcacatgattatttcaggtggctactccttgatgggttgcattaaagatattccgaccctaaaaggagataactacgcagaatggaaaagaaaactcgaccttgcttttatcttgggagaggtggactgggtattgactaccccatgtcctatagaacctgctgaccttgtcagaggtgaaaatgagtcagatgctgactggcaaaagagacagagggacaatgctcctctcgtcatgtcgtatgacattgaacaaaagaaatggtccttagccaacaagaaatgtttggctgtggtaaagaatacaattgagcctaccatattgggctcgatcccagagtgtgacgctgtctcagagtaccttgaaagaataaagagtcagtttactggctcttcaaagacttatgctacacagctgatcaagcagcttgtgacagaaaggtaccatggaggtggtgttagagaccacatacttagaatgagcaacatggcttccaaattgaagccaatggatttgggcataacagatgactttctggtccatctggttatggcctcattgccaaagcagtttgacaattttattgtcaactacaacataagtccagagaaatggaactttgagaagctcattgctaattgtgtgcaagaggaggagagaatcaaagaatcaaatggtggttcaataaactatgttaaagataagaaaaagaaccacaagtctcccacctcaaaaggtaaacagtctcagcatctgcctcaacaacaacagttcgctgttgagaaagatcaatgtctccactgcaagaagacaggacactacaagaaagattgtcctgactttttgaaaatgatcatggcaaagaaaggtgagaacattattacatttgtaaatgaatctcattatgttggttactctagatccacatggtggattgattctggagcaactattcatgcttgtaattgtttaaaggcattccgttcgacgaggactacgcaaagaagagaaagcaccattagagttgccaatggagttgaagaaaaagttgaagctgttggagatcttcctctagagctcgcgaatggcttcatacttttacttcgagatgtcttttatgttccttctttgcaaaggaacttaataagtgtatcaaagttggattttgatggatatgattgccgctttggaagtggcaaatgtgaactatggcataataatgcatgtattggtcttgctgtgttgcgagacgagctttatttgttatctctttctgagaatgtgaatgttgtgtcctcgttgacaaaagaaaacaagaaaagaaagcgaactcccgatgtctcatcgaaattatggcactgtcgtttgggccatatttcgagggggagaattgagagactagttaagaatgaaattcttcctccattggagttctcagacttagaacaatgcatagaatgcattaaaggaaaatttgtaaagagcatcaaaaagggtgcaaaacgaagcgcaggaattttagagatcattcatacagatatttgtggtccatttcctgtgaaaagtgtggatggctatgactcgttcataacattcacagatgattactcccgctatggttatatttatccaattaaagagcgatcagaagcactggataaatttaagatattcaaagctgaagttgaaaatcagcatgatataaagattaaagtagtaagatctgaccgtgggggggagtactatggtcgacatacgccttatgggcaagtccctggaccttttgcaaggttcttgctagagaatggaatagtagcccagtattcaacaccgggcgaacctcaacagaatggggtagcagaaaggcgcaaccgtacgcttatggatatggtgcgcagcatgatgagctactccacactaccactcggtttatggatggaggcgttaaaaaccaccattcatattctcaacagagttccaagcaaatcggtgcccaaaacaccgtatgagctatggacagggagagtaccctcgctaactcacctccgtgtgtgggggagtcctgcagaggccaaagtatttaacccaaatattgggaagttggaccccaaaacagtcagttgccattttattggctatcctgaaagatcaaaaggctatcgtttctactgtccaaacagttatacaaagtttgtagaaacgagacacgccgtcttcttggaagacgaaatgattagggggagctcggtagtttgagaaattgatcttgaggagaggcgggtgtctgtacctgctccgtcgactcaggaacctttcttctctctacctgctgatgttgtgcctgcaatgcctgtcattgaggtaccagcactgacggagctcgtggctcctcaccgggagaccgcgcaggcccccctttgccagttcggccgggggcttagggtgaaatctcaagctctcgctctccctctgtatctggaaagatcgtctgcccgcaagacacacgagacacggcgatgtatacaggttcgggccgctgcgaagcgtaataccctactcctgtgtttttgtggatttgtgtatgaatgagctacaaagtgtgagccaacttctcccccgttctaagctctaaatctggaaaagaataaaaaaaaacccccctctctatgggcaaggtcctccttttatacttcaaggggataccacatgcacccttccctttccaaactggacttttcttctctttatggacggagattggtatggttgctgtccgaatgacactccgatgggacagcccacacctacctccactcccggcggagacaggcgcaacgtgggatcgtggctgcccgttgctgacgcgaccagtgccagaccggtcattcttgtccaccacgcgtcagtttaacaacatgcatgtttgcccttccttgtgtaacaccttgcctgtaatggttaggatgaagcctggtatatatcgatcggggttaacgtgccatctctgggatgtaacacgctagctccagctggggacgagtgcttagaagctcacaccttgacgggatggggtaaggcgtgcgtcagaccgccagtcgccacctaacccgtgatctgaccggtctgtgactggtcacagaccggataaaggaacgcgccgtactgcgctgcatgcagcgtgacacgcttgaccagactgcaataaatgctgttaggtgagcacagctgtgctcacttatcccatatatgtggcgcagacttccttaagggggtcggggtgcctcggccctcggggccggggcaagcgcaacccgaccccccctcgggggaaatcaggaggagggcggacacctaaccctcgggcccgacgttcccgaaggtgccaggcccacgtgggcgattgtgtctgcctaaacctctagtcatgatactcccggtccca

SEQ ID NO: 5197 - DNA, 8730 bp, Oryza sativa
cccgggttcgccaagcggaggaagctgctcgggaggagcccgccgggctcgccaagccgaagaagctgcccaggaggagcccgcccgggctcgccaggctgaggcgacagctgctgctggcgcgtcacttgggcctactccctcgggcggccctcaggcgacatcctctgaggcggctcgcgacgaggccgcgggcgcatcgcctgggcctacctcaccgggcgacgcccaggaccaaacgggcccgggggacatccccgagcccagcgcatcctccggggggccaagccgcgtcgccttttctccaaggcggctcttctcctcatcttctgtcgccccgctgagcgccgagccccttctgcaggccctggccgccgcaaacaccgcagtgctggatgggttcaacacccaagtggaggccctgcgtgcagaacgagcggagctcgaggccgcatgggcgcgtgttgaggaggggcggcgctcggtggacgccatggtggaggtgggccgtaaggctcaccgccgtcatgtctcggagcttgaagcccggaaagcggcgctggcggagatcgcccgtgaggtggaggaggagcgggcggccgccctcatctctaccaccgcgatgatcgaggcgcaagacactctccgccttcagcacgcaagctgggaggcggagctgaagaaaaagctcgacgccgcccaaggggtccttgactccgccgctgcccgagagcggcgggtaacggagactgaagcggcgtttcggcggcgcgaggaggcccttgaggcccgtgccatggcgctggaagaacacgccggcgccgtggagaggggcttgacggaccgcgaggccgccgctggtctccgagaggcgacgctgccggcgcatgaggccgcctgcgccgaggaggagtgcgcgctccgcctccgcgaggacgcactcgctgagcgggagcgagctctcgaggaggctgaggccacgaccaaacggctggcggacagcctgtcccttcgcgaggcggcgcaggaggagcaggcgcgccgcaatctcgaatgcgtccgcgccgagagagccgcactggagcagcgggctgctgacctcgaggcgcgggaaaaggagctggacgcaagggcgcctatcggcggggcggccgcgggcgaaagcgacttagccgcccgcctcgcagctgccgaacacaccgtcgcggaaatgcagcgagcgctggactcctccaccggggaggccgaggcccttcgcttggcgggcgagattgggcccgacatgctttgggatgcggtctcccgcatgaagcgcgccggtcggcaagcaggcctctggaaaggccagacgacggtgccccccaccaatctggaaggcctcgctccgcacctcaacaggatggcctgggtcctcgaacgactccccgaggagctcgagaagaccatcaagtcatcctcgagggacctcgcccggggggcggttgaactcgtgctagcgagttaccaggcccgggaccccaatttctctccctggatggcgctggaggagttccctcccgggaccgaggacgacgcgcgcgcgcgcgtcggggatgctgctgaccacatcgtcaacggcttcgagggctcggcccctcggctcgcgttcgcccccagctccgacgaggagggcgacgccagcggcgaggacgacggtggcgacgaggccggcgacccgggcgcatttgaatgagcccccaggcccccgccaatcttaacttttttcttgttctttcttctaaggccttcatgcctcttttttgtacaatttaacttaatctgcaatgagaaatgatgaaaaaatttttgtgttagttttattttgctatatatgagatgaggatgatctgtgccgtggtctttttgcgtcttagcttgaaataagggcccgtgcccaagtcccagtcctcgaaaagcgcgggtcggggctagtgcctggggagatccgcatgtcgagactggccaggccgggaacgtggtgaccgagggttatgggtgacccgattgtgggtttttgccgattcccccccggagttcaccacgccccggggcacggctcggttctgggccccgtttggcgattttagctgaccgaaccgagcccccgagggcaaggttgagcacgagtgacattatttcaagtcaagattcttcaaaaggaaaaaacggcacagacacaacctttagaaaattgaaactgcttttattgaaatgctgaaataaaggaaaaagggatatatgtgcatgtgtggtagcccccggccaatcctgcacacccgaggggggtgcggggttggcccgagccaaaacctgacacccgaccccccccctttcaggggtagaagcgacgaaggtgttcgatgttccacgggtttggcagctccgtgccgtcgcccgtggccagccgtaccgagcccggccgggggacaccgatcactcgatacggaccctcccacattggtgagagcttgctcaatccagcacgcgtttggacgcggcgtaggacgaggtcgtcgacgcagagtgatcgggcccggacgtggcgctgatggtagcgccgcaggctctgctggtagcgcgcagctcggagggccgcgcgccgccttcgttcttccaagtagtcgaggtcatctctacgaagctgatcttgatcagcctcgcagtacatggtggcccgaggagacctcagggtgagctcagatgggagaaccgcttctgcgccgtagacgaggaagaaaggcgtttccccggtcgctcggcttggtgtggttcggttcgcccagagcaccgctggcaactcctcgatccatgaatcgccgtgcttcttgagaatgttgaaggtcttggttttgaggcctttaaggatttctgcattggcgcgctccacttggccattgcttctggggtgggcaggtgaggcgaagcagagcttgatgcccatgtcttcgcagtagtcgccgaagagttcactagtgaattgggtgccattatccgtaataatacggttaggcactccaaaacgggccgtgatgcccttaatgaatttaagagcagagtgcttatcgatcttgacaaccggataagcctcgggccacttagtgaacttgtcgatcgcaacatacagatactcaaacccgcccggggcccgtttgaacggtcccaggatatcaagcccccagacagcaaatggccatgacagtggtatgatctgcagggcctgggccggctgatggatttgcttggcgtgaaactgacacgctctgcatcgccggaccagatcgactgcgtcattgagagctgtcggccaataaaatccttgacgaaaggccttgccaaccagggtacgcgaggcggaatgggctccgcactcgccctcatggatgtcagcaagaagctcaacgccttgttcctgaggaatgcacttcaggaggattccgttagccgcgcgccgatagagggtcccttctaccaacacgtagcgtttggaaatgcgttgtacgcgttcactcccttcgcggtcctcaggtagagtcttatctgcgaggtatgtttggatctcagagatccaagcaatcaatctaaaggagcttggagcgctcccttcgggtcccgaggcctggactccgacgggcctcgggggccggtcaggcgcatccgtctcccctaaggggtcgggtcgcgccgacggctgagtaagcctttcttcaaaggcgcccggtggggtctgggctcgcgaggacgcgagccttgagagttcatcggcaatcatattatcccgtctgggcacatgccgaagctctatcccgtcaaaatggcgctccatacgccgtacttggcgcacgtaggcgtccatctgcggatcagagcaccggtactccttacagacttggttaacaaccagctgagagtcacctaacaccaggaggcggcggatccccagcccggccgccactctgagtccggcaaggagtccctcgtactctgccatattattggtcgctcgaaagtcgagacggaccaagtatctgaggacgtctccgttcggagaggtcaacgtgacccctgcaccggcgccctggagagacaaagaaccgtcgaactgcatcacccagtgggcggtgtgaggcagctgagaggggttcgtgctggcctcgggtattgagacagtctctggagccggggtccactctgccacaaaatcggcgagggcctggctcttgatagcgtggcgtggttcaaagtgcagatcgaactcagaaagctcgattgcccattttaccactcgtcctgtaccctctcgattatgcaagatttgaccgagggggtaagacgtaaccacagcgatccgatgcgcctggaaataatggcgcagtttcctcgaggccatcagaatagcgtaaagcatcttctgggcctgtgggtatcgggtcttggcgtcccggagggcctcactaacaaagtagacaggggcgttcttcgtccgagtggcccctcggggcgttcttcgtccgagtggcccctcggggcgttcttcgtccgagtggcccctcggggcgcactcgtcttctgtgccgatgacctcggggtcggaggacgacaggagcggccttcccacagtggcctcggggccgtcctgggggtcgggggctcctggcgtcatcggacaagcgggcaaagggccaactccggtcgtcaggggccttaggccaccgttcggctcgggggcctcttctccctgctctctcccgggtcgaatcggtacagggttagcctcggggtcagagggcgataggtgcggcctccccgcagtggcctcggggccttcctgagggtcgggggcgcccagcaccgtctgacgagcggggagagggccgactccggtcgtcaggggccttaggccaccgttcggctcgggggcctctcctccctgcttgctcccgggccaagtcagcacagggtgggggtgcgcggaatgaggattgtcttcatcgcgctccacagccaacgctgcactaactacttggggggtcgccgctaagtaaagtagcaggggctcatttggctccggggcgactagaaccgggggagagctgagatatgcctttaactgagtaagggcatgttcagcttcctccgtccaagtgaacggccccgagcgcttgaggagcttaaacaagggaagcgccttctctcccagccttgatatgaaacgacttagggcggccatgcaaccagtgacgcactgcacatccctaagtttgctgggggggcggatccgctctatagctcgtatcttctcggggttggcctcaatgcctcgggcagagaccaaaaacccgagaagcttgcccgcaggtacaccaaacacgcacttatcggggttcagttttatgcgggcggagcggaggttctcaaaagtttccgctagatctgagagtaaggtctcttggttgcgcgtttttacaaccaagtcatcgacatacgcctcaacattacgtcctatttggctacccaaagaaattcgagtagtacgctgaaaagtaggacctgcattctttaacccgaagggcattgatgtataacaataggttcctacgggggtaatgaacgcagttttttcctcatcctccctagccatgcgaatctgatggtaaccagagtatgcatctagaaaacacaaaaggtcgcaccccgcagtggagtcgacgatctgatctatgcgaggcagggggtaaggatccttaggacatgccttgttaaggtcggtgtagtcgatgcacatccgaagcttgccgttcgccttgggaacgaccaccgggttcgccagccactccggatggatgacctcacggatgaacccggcctccaaaagtctagccacctcctcgcggatgaaggcttgacgttccggggcttgccgccgcactttctgccggaccggccttgcgcccggccgcacggcgagacggtgctcaatcacctccctggggaccccgggcatatccgctggtctccatgcgaagacgtcagcgtttgcccgcaggaaggagacgagcgcgtcttcctatttgccatccagaagaccaccgatccgtgtggtcttggatgggccgtcgcccaaggcaacctccttgaccgggacctcgtcgcatgtggccatccgctgcctcggggcggtgggggcagaggggccaagcctctcgtcaccaccctcgggcttggacgcagcagcgaggcggtccgcgcgctgctccatgcaagcaagcgcgactttaaggtcgccacggacagagatggggccaccggggcccggcatcttcatctggaggtaggcgtagtggaccgccgccatgaacttcaccaacgcgggtctccctaggaccgcgttgtagggcagactgaggtccgccacatcgaagctcacccgctccgtgcggaagttggcgggtccaccgaaggtgaccggtaggtcgatgtgacctaatggccacgtgtgccccggcgtcacaccgatgatcggttgagacggctggagcaccatccccggggccttgatagcatcaaaggccgcgggggaaaggatgttgagagccgctcctccatctatgaggacacgtcccaacttcacgttgcagatggtgggggaaaccgccatcgcaacctgccctccccgggcaatgcacggtgggtggtcggtctggtcgaaagtgagagcaacctccgaccaccgcgcccgacgcatcgcctcatgggtaggggccatggccagaagctctcgcttcatagccttgaagctccggcgagagacgtgagcacatgctcctccatcgacggtggcaatggtggccccaggttcttggaaacctaggtcatcatcaccatcatcgatgtcaacagcgggggccttctgcttggcctcacttcgccgtttgccggaaggaaccgccggggacttgccctcacggcgttcctgcctcctgtcctcctcccatttcctcgttcgctcggccaggtttttgaccgcacgacagtccgcgagatcatggagggaggtgttgtggacagagcaccacctgccggcgaggcgctccctgctgggtgtaccagcctcgttctttttgtcgctcgcaggcctcccctttcgagtggcccgcggagcgccctcgacggcgaggacatgaccctcgtcgccggaacggtccggcctcttcttcctcctcctgtcacgccgccctgtctgagcggcggatccgggggcggccgaagctgccactccggaaccggaggagttccaggtccaggcctcctccttacgagccactcggtccgcgagctgaaaaagctctgcggtagtctgggactctttggaggcaatcttttcgagcatgcggttgtgccgcacaccccccctgaacgcgtagatcaccgcgtgtgcagggatgcatggtatagtattgcggacttggcaaaaccgctgaatgtacgagcgaagcgactcatcatcgcctcgctgtactgcatgcaagtccgcttcttcgcctgggcgcggatatgtgccttggaagttcatggtgaactgttggcacaaatcttcccaggagtggaccgacgcgggtggcaggttcattagccaaccccgcgcctgtccttttagggccatgggaaagaagttcgccatgaccctgtcgtcacccccagcggcctcgatcccggtcgtatagacctggagaaactcggtggggttgacgctcccatcgtacttctcggtgatggtgggccggaaccttgggggccaacggacattccgaagactcgccacaaaggctctacagccaacaccaccggccgggggcacggagggctgatcttcacgtccgtgtcgaggtgacactctggacgaggaggcgccctccgttgcacggggagtacgccggctattacgccggcgctcgatgttgaggctggcatgcctgctgcccatgctgatcctccccgagtcgacggtgtcgacgagggagtggcagccgaatgacgtgcagccgccgccgctcgccgcgccctccgccttgatgacacggagccggtggtagcggcgccggaggtcttggtggtggcggaccgtccaccagcacccaggcgctgctgtgccgtcatgaccaagttggccacgtcttccagccatcgttgggctggagactccgggtcatggacgacaggcgggtgtcgtaggagcgcgccagcagcctgaagcgcaccctgaggcgtgctgccgtcgccgtagacgaggaggcgacgctccccatctcgccgttctcctgcatcacctgcgactggtgatgccacggatttgtcgaccctctcaagcgcctccccctgcttagggctttggcgcggaggaggtgggggagtacgagctcgacggcgtggattcggctccccgtcgtcgccgctcacactcggagagaggtcgtgcgcttttccttgctcggccattaggctgaacaagaaaaacttggcgcacacggaagagtctgagagctcagaaaacacacgctgagccccctacctggcgcgccagatgacggagctcgtggctcctcaccgggagaccgcgcaggcccccctttgccagttcggccgggggcttagggtgaaatctcaagctctcgctctccctctgtatctggaaag

SEQ ID NO: 5198 - DNA, 3713 bp, Oryza sativa
taatcttgactaaatccaaacagataccaactcctcttaatcaacttacaaaacacctacacttttggtgtctctacaccaccaatcacacaaaaggaaattaatcatccacctactcgtatcctactgttagaatggaggccttacaccagagaatgggcattgccagattctgagacactgtcctttgagctccctgaatctgaaccagtaacaaaaatcaaataagacacaacccaaaaccttccgttcatcaagaagttggatgttcaaattataaagtgacagttcgatcgtaccactggatgatgaggacccactgctcgcggcctcagtatccttctcaatctccactgattggtaagttgctgttggcatttcatccccgatatctacatactcatccaactgctcggcctgtgtagtgatcttgtcaggatccttgctctcctgtaaacaacaaaacacattaaccattataagagctcatctcacacataagctaatagcaaccaagaacaaagcatgctgctcactattgccattgtcacatcaccgttgtccaccatcgtagcggtactgccattcaccagcatatcactatcattagccacggaagcatcaatgacatcggcattttcaccattaacaatggcagcccgtcgactcttgttgagcgccttcttgaagttgttgacgaatcgatcaagctcccactgtgtctcgacatccatctcatcaatatccagctcgatctcacccccaaccagctcaggattgccattcctcttccgcacaatctgcagcacattatgcatcttctcctctggcaagctctccaacccaaccctcaacaagttcttctcctccagcgtcatatccctcttgttcggctcccttgccttcggcttccgcattttcacattcgctgcccttggtttcacctgcaccggagctgtcgccggtggcaattccggtggcggcactggcatcggcggctcaaggagcttgagttcctgctcgaaccaagacatagatgccttgtacatcttctcaaaggacgccaggaggtcgccggcgaaggtgtggacctcgtgccccgcagggttgtatctcagcgcgttgctgaacgtgagccggacgtcggcggcgaagtcgtcgtgtgaggggtaccttccggcggcgaggttcgccctcaccgtgccgagatccatggggcacttgatgactgcgtggtagtcgtggagcccgaggcggtcgacctcgacgggggcgttgaaccagatgctccgcttgtccttccgcagcttcgccaggatctgctcgcaacgcttccgcatcgccgccctgagcttcgccggcggcgtggggaggtcccggcgaggcgagccatggcgcttcacctgaccctgctgccacgtgtcgatccgggcgatgagggcgcggacctggccaagctcgccggcgaggcggtcccgcagcgcgcgggcctcgcggtgagccattgcccccggccgcagcgccacgtagcttgacggcggcggcctcgtggccgagccgttggcgcgctgctggagagggtggttgggatcggaattgggggccacgggcgcgagcggggcacgggtctccccccactggtggtggtggtggtggtggttaaccccgccccggccggcgagcagggcggaggccatcaccgtcgccgtcgccggcgagggtttcgcgtgctgctgctgctgcgctggcgagagtgggtggatccgcacggggaaaggggagaagccgaggagatattttttttctctctctgtggcgggtggatgtgcccgaggcgagatcctgaccgttgatgtctattcggaggcagatcgaacggtggagatctgcgtagagttgcccgcgggcagtggggagtggacggctaggatgttggtaatggtgtgacgtggcaagatcttgctgcgtgatcgttatgacgtgattcgtgaacatataacggtagtgaaggtgcaactgggttattatttgagtgattagtactagtttaagtcttactacgtgattgtacatttgcacttagcttattactccatctgttctatattactcgttgctttgattttttttcgtagtcaactttttaaaatatgatagaaaaatatagcaacatttgaaacacaaaattagtttgattaaatctaatattgtatatattttgatgatatgtttaattggtgttgaaaatgctactattttttctctaaacttagttaaatataaagaaatttgattatgaaaaagaaataaaaaaacttataacataaaatggggtcgtatttttttacacacttagcttattacattgtgatacaactgtatgcatgtgccaatgctcccgtgtcttgctttcgaatctctctgtaaagcgtgcgcaccaaaagaaagcagcattatatggagggagccacgccatgtgcccctttgttctgcaagcatggtttgaactggtctcccaacctcctgatcaaaaggcctacatgtatgtagccatttttcttgcaacaattatatatacaaagtagagatcatagtaaaagtcatcgatatatctaacatatagatacataatataaaacgattaccattttattagctagcaagtacatagctgccatgagcagggaggcattagctactacttccttttctttctttctttcttttttttttttacgttggttagctcaaaattatatatgggaaaggacgtagtagtatgacacgtttcgttcttcgtttaaaaccacaacgagagcatcactgtatatatatgcggatcgaatatatttacgcgccgatctcggagcacgctgctgcttcggacgccggagcggcggcgaggtggagccgcttctcgccgtggacgatggcggcggaggcggcggagctcccgacgacgacgacgacgcaccgcttctccttggcctcggcgcggcgcaccaggaccaacgagctgcagctgctgccgaccatcacattgcgaggaggaggaggcggcgctggcgccacggcggcggcggccgcggcgacgccacggagcagcgcgtagctcgccgacagctcgcgcgccatgactatggccggcagcggcggcgcgtcgggctcctcctccgctatcgtgtccagcatcgccgggaacccgcggcggcggcggggcctgatgatcgacgacagcagcggcggcgcgacctcgacggagaaccgggcgacgagctgggccttcgccattgtcggcgtcagcgtcagcgtcaagcgtgcgctacgcacagcgatcggcagctcaagaatctgtggccatggaagcttcgtgctaagcttactggaaattaatcgtagtctgggtgctcgtatttatagacccgtacactgtcaatttggaattgcaatttaattttgagccatgcaatttgcaagtggatggttctctctggtgggaaactgacgagtagataaattttggaaagaaaatactagaaatgagacgattttggaggcagggataaatgagttgaaacttgaaagtgatcaggcgaccagagacactatcaacgtcactgtgataatattaatgtagtagtaatgcctagagaagtgttgctatactgtcccctgataaatgaagaattgtaaatgatgaatattcagcaggg

SEQ ID NO: 5199 - DNA, 9788 bp, Oryza sativa
tgtgctgtcctcaaacgttctcgtatcagcttaacttgttcttctgctgacttgagtatgtcaggaccgaataccaaggcttcgcccacctcattccagcacaagggagtgcggcaccttcttccgaacattgcctcattcggcgacatctgaatgctggcctgataactgttgttgtatgagaactcggcatacggcaaacaacgatcccaagtgccttcgaaatccaaggcacatgctcgcagcatgtcttctaggatctggtttactctttctgtctgaccatcggtctgcgggtggtaggccgtactaaaattcagatcagttccgagtgcttcatgcaattgcttccagaaccttgaggtgaactgagtgcctcgatccgacactattttcttgggacagccaaatctacatacgacatgagtcatgtagagttctgctagtttctttccatcataggtggtcttcactggcacgaaatgtgctgacttcgtgagtcggtccacgattacccaaatggagtcgtatccgctgggggttcttggcaaaccggtgatgaaatccattccgatctcttcccatttccactcgggaatcggtaggggttgtagcagtccagctggcctttggtgttctgccttgactctttggcaaatgtcacacaaggctacgtattctgcgacatctcgcttcattccagcccaccaaaagtatgccttgatatcttggtacatcttcgtacttcctggatgaatggagtaagcggactcatgagcttcctttaggatgagatttcttaactccttcttggccggtacacagatgcgtggaccgcaccaaattgtgccttgatcgtctatggagaaattggtgtctttcttctcctgtattctttttattaattcttttatcccttcgtcgtctttctgagcctcccggatttgcgactctagggtaggctgtactgtcaagctggcagggacacctgactgcaccacggtcagccttaacttctccaattctctgcacaggtgatcttggtcaggccgtatttgagctatattgcaataggccttgcgacttagcgcatcagcgaccacgttggctttaccaggatgatagtggattccaagatcgtaatccttgattagttccaaccatcttctctgtctcatatttaactcggtctgagtgaagatatacttaagacttttgtgatcggtgtatacttcgcatctgttccctattaagtagtgcctccagatcttaagagcatgaatcacggctgccaactcgagatcatgggtggggtaattgacttcatgaggcctgagctgcctggatgcataggccacaacctttcgttcttgcattaggacacatcctaagccctgtcttgatgcatcacagaagatctcgaagtcttttcggatatctggcaaggtgagaactggggcagtggtcaatcttttcttcatttcttgaaagctgtcttcacaggctgtggaccattgaaatttcttttccttctttaacagctcggtcataggtctggctagcttagagaatccttcaatgaatcttcgataatatccagctaagccgaggaagctgcgaatctccgacacattcttgggcgggttccacgcaagtacagcttcaactttgctgggatctacttcgacaccgttggaggagatcacgtgaccaagaaaagctactcggtccaaccagaattcgcatttcgagaatttagcgaatagttgatgatctctgagcttttccattatcagcctcaggtgttcagcatgttcttcctcattcttagagtatatcaggatgtcatcgatgaataccactacaaactggtccaggtattccataaagattttgttcattaagttcatgaagaatgctggagcattggtgagtccgaaggacattactgtgaactcatatagaccataacgcgtcgagaaagcggtcttcggaatatcttcagatctgattttcagttggtggtaacctgacctcaagtcaatttttgagaagactcttgctcctttaagttgatcgaataagtcgtcaatccgaggcaacgggtacttgttctttatagttacttcattcagggctctatagtcaattaccattctctcagagccatcctttttcttaaccagaagcactggggctccccaaggggatgagctaggtcgcacataacctttactttccagttcttcgatttgtcttttaacttctgctaactcattagcggccattcggtagggtctttttgcaattggagctgtgcctggtgccagttctatggcgaactcaatctctcggtctggtggcattcttgttaattcttccggaaatacgtcgggatattcacagactatgggcaccgactccaaggaggtgacttgcaaacaggttaggatagaccgacttgcggtaggggtgttaggggtaaagcggacttgctttcctccaggtccttgcaaggtgatggacttttcggcacaatctatctgtcctttgtgcttagccaaccaatccatccctaggatgatgtccaagctttgcgagtctaggactatcggtttggctaggaagttaacttcctcaattctaaggttaacttccgggcatatttgagttgcccttatattccttccaggggaatgtactatcattggtacacgcaaattttgggttttccaaccatttcttttcacaaaagcttgcgatatgaaagaatgggaagctcccgaatcaaacaggactattgcgggtacggagttgacagagaacatacccatcacaacgtctggagcatcctgagcggtttcagcttgaatgtgattcacacgtcctcgaccaaagtggttggaagcacgagaaccttgtccacttgcttgagagctaggacgagactgagctgccgctggagtaggagttctggcagtgctgccattagcatgtcctgggctggtgttggtaggattctgaggacactgtctagcatagtgacccatctggttgcaccggaaacactgaactgctgacggtccctgtggtgacttgaaggaggtaacactgtttggcgcagtgttgccactaggggcacgctgctgtggcggaggtgccggacggttcatctgaggacgaggggcgtagcttgactggcggttagcctgagtgaccgactgatggtattgcatgggctgaccgtagcgagggcgaggtgcgcctcgggaagaatttccctgatggttagacttgcgtttcttgtattcttcggtggcctcttttctggcatcctcaagtagaagtgctttgttgatcatatgttgaaaagtggggaagtcatgagcaagcaactggagtctcattccaactgcgattcctttcaagaatttcctgatctttttcttatcggtgtctacttcctcaggggcgtaccgagccaacttgttgaactgacttaggtactcattgacactgctgtggccttgcttgagtctgttaaattcttctttcttcatgtcaatagtgctttcaggcacatgagctacacggaaagccgtagcgaactcatcccaagcaatgttagtgggttcaggatgtgcattgcagtaattctcccaccaatctgcggcaggtcctcttagctggtgagaggcgtagagcgtcttctcaacaggagtacactgcactaagttgagttttctatccacatctttcaaccaatcgtcagcctcgacgggctcgatggtctgagagaactctggtggacgtgacctcagaaagtctgtcagcttggatctattgttgcccacgtgagggtggccatttccatgcgcattatgctgaaagctggctatggctgtggttagaccttgcaagatctgtgtctgaactgccattatgtgttgcatgttgttttccacatgaggtggggaagggaggcgttcttctccagaattgtgactggcagtgcggtgagagcggtgagactgctccaactctgcttcacgggaaactgtgcgatgcgagcggctgctgcggcgaggttgctcaacctctgcgttgcgggaaacagtacggtgcgaacggttgctgtggtgagaatgctcattagctggttcgtgatttgcttctgcttcaactctaccatcttcaaaaccaaagcggactggtgcacgagctgtacgacgggggcggctagccatctaaactcccagaaaagggcggggtaagagtcagataagcacttaggagggcaaggagcaaagcaaatagcaactcagatagcacacactaggcataaactggattttttcaaatcgtaaaaacacctgatacaacgggtgtggacaagtcacagagctacgccgagcttgactgtgcgcacacctcctaggagaaccagactaccaaacaacacccacatcaaacacacacacgcactacctcgccacgactccaaaagagttggcggcggaacaaaagggcctaacacacggacggctgctgaagactgcctcctctactcctcgtcggcctggctgcctcctgtggtcggctcctcagtcgaagaaacgtcgatcggctggcgcgaagggaccggcgggacctgtcgagggccggcagcagcacgggccgctggcggtgggggagctgggtggcggaaacggaacacggtggaagaaccaacaacacgcttccgcgcagtgcggataaagcgtgggccacggcgggaggaagcgactggagtgtgtccgggggtgtaggaagggctaactgggtgtgggtagggggagtacactggtgagtacggcgcacgcgagctgggggagcgcgggccactgggagtgcgagcagagccgcgggagctgtgggaggacaggtggctggcgtggcagagacggcctgagtcccaagagatagtgtcaactgaggtgacaccctcctcggccagacgggcctccaaggcggcgtagcggcgggcaagggagcggtaagcctcaaggagtaggtcgtgctgagtggcctgagcctccgaaagctcgaccatgcgagtcagcactggctgagactcgctgtacggacaagggtatctggcgtctgcgtggccagaaggaagacgtggaagctgccggaaggcggagcctccgagacggtggccgtagtcgtgggccaggcggcgaagcgcagtccaggagaggtcctggtacgcgatctggagagtgggcctggccacagtgaagtggtgggggcgaaggccaactccgtgtatacctccacgagggtaaaggtacacagagagctcacagtgagggggaacacggtccacggagtaccccgtgtactcgggacacgagaagccaaggaaacgggcgaggtcacgaagctgggcgacgtggtgaccctcaccaaaaccgtgggaactgaaactggcgttcactgccatctacaattttgaaagaggaagaaaggatcagtaaccattttagaaacaaactattgaaaagaaagaagaagagagaaaccttagcttttcgcaagtagttttgaatctagtatccttagggtcgtcctaagcgtcgggtttcgccctagggccaagcctgtgctctgataccatctcttgtcacgccccgagctagtcccgaccggaactaacccgtgacgctccaaactaacctgttaatcgataccagtcccaggaaacagtgctggtatcacagggagacagaatatcacagcaacagaagtctctttattatagagtagaagtacagtcatgttgggctgcggacagatcccgagctcacaactgcattacaaaaggaaagcggaagccaggacttggaccaaacaatcacaggcgcgacttgggaactaggccgaaaccctaaaactcatcgtagccggcttgctcctggaagaactcctcatcagcaggatctgcttcatcttcttcagcaactggggggggatatttatatagagcaagggtgagtacgggggtactcagcaagccatgggaattaagtgtttaatgcaagcttcaaggaaaggctgtttgtttttgcgattggttttatttgaactcttttctaaaagcaactaagtgagtgcttctcaaacgacacggatgaggcagtgcgtctcgtccggtcggagtatgtgcaatgtatcagtctttagattttgaaacaaggttggcacccggccaaaagctttttaaacggccacccgggccaacacctttcaaacggccacccgggccaacaacttttaaacggccacccgggcctagctgatcccatcagctgcaggttttccaaacatagaacccagtttctcaacagcaatttcacaagcagtagtcaaacaaaactacgctaggaatcacctcacatccgcccatgaccgtgggcacggctgttcgaacagtttgttaacctctgcagagggggtacactttacccacatgacattactaacccggatcatccagcccgtggggatcagccacgtcgggagacctccaagctttcatgacaaggcatttcgaaagccgacacaggtttaccatatgccgacgagaggggtcccagaccaacaacaggttaggtcccagaccatactgtgccaggaagcccaggggtcctccccgacaccaccccggcgaatccacatgtctctcggcatcaaggctcccctgataagctagttactcagccaggggtgtcccattccacccatgtggtcgtacttgacttatgtttggatgaaattccaaggaatcggtccttaagtgcgagagcgggaaaccgtacacccggtacgttccccggtccgcggttttggaaattcatttagttcacaagcaccgacccaagtgtcgggttttccaagtcttttgtaaaactccagttttacccaagttgttactcaaattttaagtttgaaggcgaccgtcgatattcgcacagagtgcacgattatcgaggcgcatctgggtggttacaaggggacatggtgtagcaattttcaacggaaggatcaattgcaacaagttaggtaggtccgccaatctgccttgcagacgggacaacagattaagtgtgatcctatcaatgcataatattttgcaagcaatataattaaatttcaaatataggctcaagatgttcaaaggtggcttgccttgctcgagatctggagcttgatcctcgaaatcctcgcactgcgggtcttcgggctccgaaactacacgcgaaacggaacaactcaacaaacggcgaaaataaagccctattaatgacctctaagcgtgccattggatagatctcgagatttgggaaattttggaagttgaacggagtcaagcggagttatggttggaaagatattgaatttctaagattattggatttttggtctaaaggaaaaaggatttaattaaatccttttttggaaaaaggaaaaagaaatgatgaagggagggaatctagactttcctcggacggctagggcgcggcccaagggaaatggagcggaccggccaagctaaatgggccggccggcccaaggcggcccaagcgcgcgcgcgcgcgcgggagggaggagagagagggccggtggaccgggctcaccacgcgcggtcccgggtgggacccgcttgtcggcggctcggctcaccgtgagcggggtgcacgcggcgtgctagggtttggggaggggaggcgcggcgcatgcgcgcggctcgcggtgagggcggaggcggcgggcccacgtgcagcctcacggcttaccgcggaccacgcgcacggggagaaacggagggagcggctggccgggtcggcttatctggtcgcggccgaggtggcgccgacgtggcgcctacgtggcagccacgcgggtcggcggaaggtagacgaaggcccagccgaaacggacggcgggcggcggcggcgatcggcggagcgagccacggcgatacaagcgacagcgagtacaccgggtggttgcacgggacgcggggaggcgagccaacggctcggattcaccggagggagcttgacggcggcgaatcgcggcggcgacaaccggcggcgggaggagagggaaacggcgacgaggtcacgaggggccgattcccggcggtgggagcatctacgcggccacgggaactcgatgctagcgtcggatttggagggaacacgccgagggaggctggcgacgtgcgggtgctacggaactcgggcggcgacggcggcgagcacatggcgagcaacggcatcggtcggggcggcgccggccaactacgggaggtctactcgagctaaaaccgaagtctaagggggggagacggagcgaggagggagaacgaagcgaaacatcaccgcggaaaggagaggcgctgtgacgagaggccgacggcgcgggagtgatctctccggcctcgggccggggaagaggaagaagaggcgcggccggagtcctcttcggcgtccttgctcgtgccggctcctccgacacgcgcggcgacgatcggcgacggcgaaaacagagacggcagtggaggaggcgaaaatggggagggaaggagaaggggaggccgggggtttaaggaggcggcaatgtcggtttggggaaccgacttgcgcggtcaagagcgcgagctggcgctcggctagcggccaaattggcgacagggaggatgacgccggcggagaggtaaaggggaaaaaggaggggagaaagggggcttgcccctttgccggttcgggaaaaaggaggaggggagcggggcgacgcggcagagggagggggcgctgcctccgtcccttggcggcttgcgcgcggagtggcggggccgggtgatgacgacggcgatgacggggggaacgtcttggagcggagcggcgacaccggcgacaggcgtgcgcagaggctgacggcggcggcgaccgggcggtcggccacgcgcgcgcggctcgcaacgggaaggcgcggcggatggtgcggcgcggctcggcacgcgcgctggctgcggggccgagcggctgcaggctgcaggcggcagggcagcgggaccgggcggcatccacgcgggcgcgcgcgagcaacggcccgcggggagcggcagcgagggatggggagacggagagcgaggggggggcgctcggggcggcgcgcgagcagcgtgcgggcgaggctgagcggggggggggggagagcgcgccgggggagagagagagagagagagagagagagagagagagctctcgggagagtgggccggggagggagagggagatgggccgagcgagtttcggcccatcgaccttgggggaggtaaactagactttgcggagggattttgatttagaaggaattggattcggagatgaactcgacgatagatcggggattgagatcatgagatggcacgggcactagacaacaagcaaggaaacaaatttcgcaattagggtttttaagagataattttcccgctaggcgccacgacggaacgggcgctacagaccaacccccctaacaagaatctcgtccccgagattcagcacctaagggagcagctccggaaactcggcgcggagaagatcttctcgttcccaggttgcttcatcttcagaatgattgctccattggactttgtagaacttgattgtcttccttcgagtctgacgttctgcttcttcaagaaccttgatcggtctttccttgtaggtcag

SEQ ID NO: 5200 - DNA, 4190 bp, Oryza sativa
ttctgagggcactgtctagcatagtgacccatctggttgcaccggaaacactgaactgctgacggtccctgcggtgacttgaaagaggtaacactgtttggcgcagtattgccactaggggcacgctgctgtggctggggtgccggacggttcatctgaggacgaggggcgtagcctggctggcggttagcttgagtgaccgactgatggtattgcatgggttgaccgtagcgagggcgaggtgcgcctcgggaagaatttccctgatggttagacttgcgtttcttgtattcttcggtagcctcttttctggcatcctcaagtagaagtgccttgttgatcatatgttgaaaagtagggaagtcatgagcaagcaactggagtctcattccaactgcgattcccttcaagaacttcctgatcttcttcttgtctgtgtccacttcctcaggggcataccgagccaacttgttgaactgacttaggtactcattgacattgctgttgccttgcttaagtctgttgaattcctctttcttcatgtcaatggtgctttcaggtacatgagctgcacggaaagctgtagcaaactcatcccaagcaatgttagtgggttcagggtgtgcattgcagtaattctcccaccaatctgcagcaggtcctcttagctggtgagaggcgtagagcgtcttctcaacaggggtacactgcactaagttgaattttctatcaacatctttcagccaatcgtcagcctcgacgggctcgacggtctgagagaactctggcggacgagacctcagaaaatctgtcagcttggatctattgttgctcatgtgagggtggccatttccatgcgcattatgctgaaaaccggctacggctgcggctaatccttgcaagatttgtgtctgaactgccattaagtgctgcatgttgttttccacatgaggtggggaagggaggcgttcttctccagaattgtgactggcagtgtggtgagagcggtgagactgttccatctctgcatcacaggaagccgtgcgatgcgagcggttgctgcggcggggttgctcaacttctgcgttgcgggaagcagtacggtgcgaacggttgctgtggggagactgctcatgatttacttctggctcggctctaccatcttcaaaaccaaagcgggctggcgcacgagctgcacggcgggggcggctagccatctaaactcccagaagagggcggggtaagaatcagataagcacttaggagggcaaggagcaaagtaaatagcaactcagatagcacacactaggcataaactggatttttcaaatcataaaaacacctgatacaacgggtgtggacaagtcacagagctacaccgagcttgactgtgcgcacaccacctaggagaaccagactaccaaacaacacccacaacaaacacacgcacgcactacctcgccacgactccaaaagagttggcggcggaacaaaagggcctagcacacggacggctgctgaagactgcctcctctactcctcgtcggcctggctgcctcctgtagtcggctcctcagtcgaagaaacgtcgatcggctgacgcgaagggaccggcggaacctgtcgagggccggcagcagcacgggccgctggcggtaggggagctgggtagtggaaatggaacacggtggaagaaccaacaacacgcttccgcgcggtgcggataaagcgtgggccacggcgggaggaagcaactggggtgtgtccgggggtgtaggaagggctaactgggtgtgggtagggggagtacactggtgagtacggcgcacgcgagctgggggagcgcgggccactgggagtgcgggcagagccgcgggagctgtgggaggacaggtggctggcgtgacaggggcggcctgagtcccaagagatagtgtcaactgaggtgacacccttctcggccagacgggcctccaaggcggcgtaacggcgggcaagggagcggtaagcctcaaggagtaggtcgtgctgagtggcctgagcctccgaaagctcaaccatgcgagtcagcactggctgagactcgctgtacggacaagggtacctggcgtctgagtggccagaaggaaggcgtggaagctgccggaaggcggagcccccgagacggtggctgtagtcgtgggccaggcgacgaagcgcagtccaggagaggtcctggtacgcgatctggagagtgggcctggccaaagtgaagtggtgtgggcaaggccagctccgtgtatacctccacgggggtagaggtacacagagagctcacagtgagggggaacacggcccacggagtaccccgtgtactcgggacacgagaagccaaggaaacgggcgaggtcacgaagctgagcgacgtggtgaccctcaccaaaaccatgggaactgaagctggcgttcactgccatctacaattttgaaagagggagaaagatcagtaaccattttagaaacaaactattgaaaataaggaaaccaaaagaagccttagcttttcgcaagtagttttgaacttagtatccttagggtcgtcctaaacatcgggtttcgccctagggccaagcctgtgctctgataccatctcttgtcacaccccgaactagtcccgactggaactagcccgtgacgctccaaattaacctgttaatcgataccagtcccaggaaacagtgctggtatcacaggaagacagaatatcacagcaacagaggtctctttattatagagtagtagtacagtcatgttgggctgcggacagaccccgagctcacaactgcattacaaaaggaaagcggaagcccggacttggaccaatcatcacaggcgcgacttgggaactaggccgaaaccctaaaactcatcgtagccggcttgctcctggaagaactcctcatcagcaggatccgcttcatcttcgtcagcaactggggggggattatttatatagagcaagggtgagtacgtgggtactcagcaagccaggggaaataagtgtttaatgcaggcttcaaggagaggctgttgtttttgcaattgattttatttgaactcccttttttttttctaaaaacgactaaatgagtgcttctcaaacgacacggatgagacagtgcgtctcgtccggtcggagtatgtgcaatgtatcagtctttagatttgaaacaagattggcacccggccaacagcttttcaagggccaacaacttttcaaacggccacccgggccaacaacttttcaaacggccacccaggcctagctgatcccgtcagctgctgatttttcaaacatcgaacccattttctcaacagcaatttcacaagcggtagtcaaacaaaactacgctaggaatcacctcacatccgcccatgaccgtgggcacggctgttcgaacagtttattaacctctgcagagggggtacactttacccacacgacattactaacccggatcacccagcccgtggggatcaaccacgtcgggagacctccaagctttcatgacaaggcatttccaaagccgacacaggtttaccatatgccgacgagaggggtcccagaccaacaacaggttaggtcctagaccatactgtgccaggaagcctaggggtcctccctgacaccaccccggcaaatccacaagtctctcggcatcaaggctcccctgataagctagttactcagccaggggtgtcccattccacccatgtggtcgtacttgccttatgtttggatgaaattccaaggaatcggtccttaagtgcgagagtgggaaaccgtacacccggtatgttccccggtccgcggttttggaaattcatttagttcgcaagcaccgacccaggtgtcgggttttccaagtattttgtaaaacccaagttttacccaagttgttattcagatattaagtttgaaggcgtccgtcgatactcgcacagggtgcacgaatatcgagacgcaactagatggttacaagggttcatgatataacaattaacgaaggaagggtcaaatgcaacaaattaggtaggtccgccaatctgccttgcagacgagacaacagattaagtgcgatcctaacaatgcataatatttttcaagcaacataattaaatttcaaatacaggctcaagatgttcaaagg

SEQ ID NO: 5201 - DNA, 847 bp, Oryza sativa
cttcatttcaggatagatctgcagaaagatactagtgtttctctttctgcaaaccatctgcagaagttgcggttatcttttcaactgagtacaccactcgggaagacatttaaacctcaccaggttgctctagaatttaaccctttttttcccagtggaacactatggttctttccctgacttcattgagcaaatcaattttcaggtgttcctcaagttaaagcatgatgaaagcaaggttgagcatttatttgttgtaccaggctctgcaaggcagtttaaaattgttctagttgagtaccccatcccccagttagttacactcatctttttcagcttgttctatgttttcgagtgctacgtcatcatcagtttcctgtccatgcattacattatccagagactagttatatacagagcagtttctcaatgtggaaaggaatagctaggctatgtagcttggtttgctttagaacacatggccaccagcaccatttgaatttgatgtcagccatatttatatgaacactgttggtgaaagttgagatttgaagaaaaagactaccatgtgcatagcatatacattgaaataaggcaaaatttgctataggacacccgaaaatcgtgtaattggctgtgagacaccgcaaaatcttggctttgcccacggacactacgaaatttgtgaaattggctgtgagacaccgaaggcaatattttataatttttgaggcaaaagaggtcagataattttttaaaagaccaatctacccctgcgcccagctgtccatctccctccccaacccgatttcccagtcctgaaccctaaccctaggcgacggcggtg

SEQ ID NO: 5202 - DNA, 1876 bp, Oryza sativa
catcatcgccggcctttgccttcgccttcgctgccgccttctcctcctcctttctcctgaactgcctgcaatacacaatgcaaagatttttttttcccaagtcaaaaccagatcaatgtaagctaattgaatattacgcatacgcatttagactttcaacgatattttagtgagattagatgatatcgctagttttcatcttttcaagcgtatgtttaaaagacgcatttatgggtgtgtgagtgtgacattgtgatcactcacatgcagagaggggtgttgcagtggccgtcggggaggtcgcagagggcggcgtggaggcggagcagctgccacatgcgctggcagcgcgggcagctggtgcggtggcaccgggagaagtggcggatcagcagctgcagtccccggcacgccgtcgcgtacgccgggcacggcgccgccgccggcgcacgccccaccggcccgacctccgtgcacccctccgtgcagatgtggctcaggcagtccatcgcctcgctcagctccacgtagaccccttgctccgccctcttcctcctccacttcctccgccgctgcaccattcaatcacaccggagaaaaaaaaaatcaaccaccatgaattctagtagtagtaaaaaaaatactaaaacaaaaatcatgcgattttatcagtctatttcagagattattggtcaattaagggcctgttcactttaatgcaaaagaaaaaaacattaccaaaattttggcatagttgtcaaaattttggtaattggcaggatttcttatatagttatcaaaatttgacagcaaactaaatgtagccacaattttgacaactttaccaaaatttggtaagattgaaaatgacatcaaagtaaacaggtcctaattaggttcttgtcaaaatcaaaatcattcgaccataacaaaaacgtttaggatcgggaaacttcgagacggtaagccgttcgaagtccattcaacgtggttggacagaccaaccggaccgacctagcctcccccagatacaagaaatttctcattcaatccaccaaccaaccacaaaacgcaaagcacgtctcgacataaaatgtgtgcacgagtgcgacacggtggcccccggctattccagggacttaaggctcgaaagatcccagtaaaacacgctcaaaatcatgttcccctagtgcacgacccactgtgcaaatcctcccatgcatttcggtgtcaatggaaccgtgtgtcacagagccatttacaaaagcgcccaacatggataccccacaccacatcgagtgcacaattcaaagtttgaattttttttgtgtgaaattcctgtaaaattctaccatgttgatgaacagcgataatgatgtataccaggtcggcgtcgtggaggcgctggaggatgtcgagctcgagccaggggtcgttctcctggaggaatcgccacgcctcggtcttctccacggccttgaactccttggcgagcagcctggtgcagcgcaggtgcaactgcagcgcgtcgcacagcgccgccagctgcatcgtgtccaccaccgactccgccgtgagccgcgacccgatcgccccctcgcaccgccgcttcagccacggcacccggtacgcgtgcgccagcaccagcatctgcgccgcgctcttctcgtcaatctcctcctcatcaccactgcacaattagttaacaaaatttacacagtattagcacgtctaatatgcaaatgtttttttctcaaatatttctactacacgttttgtggtccaagttacagaaaatcacatacactttgacacttggcacttgagtacatatattttggatgtgtagtttcacaaaactacattatcgatgtat

SEQ ID NO: 5203 - DNA, 16142 bp, Oryza sativa
ggaacattaataattggactgcaccccgatgaagttgatgatgatgatggtttggaggattctgatcagctgaaaacgttggatgacaaagtactattattccataacctgaggttcctaactagcttggcaatatatggttgtcgaaatcttgcgactatttcaattgaaagtttaaggcaactcgtttgtttgaagagtttggaattatacggctgcccaaaacttttctcttcagatgttccaccagagcttacatgtgaatatatgtcaggagcaaatcacagcgccctcccatctctcgaatgtctctatattgaggattgtggaataacggggaagtggctgtctctgatgttgcaacatgtgcaggccctacaggaactgagtttagaggactgccagcagataacaaggctatcgataggagaggaagaaaacagtcaaccaaatcttatgtcagctatggaggatccgtcattaggatatccagatcgagacgaacttctgcgccttccgttaaatctcatctcttctctgaaaaaggtatctattacatattgctatgatttaacattctacggcagcaaggtagatttcgctggatttacctcccttgaggagttagtgatttcacgatgccccaagctggtgtcgttcttggcgcataacgacggaaatgatgaacagtcgaatggaagatggctcctaccgctatcacttggaaaacttgagattaactatgttgattccctaaaaacgctgcagctctgctttccggggaacctcacccgcctgaaaaaactagtagtgttgggaaaccaaagtttaacatctctgcagctccattcctgcacagcactccaagagttgataattcgaagctgtgagtcgcttaattctctggaaggcttgcaattgctcggcaatctcaggttgctgtgtgcacacagatgcctcagcggccatgaagaagatggaatgtgtatccttccgcaatcacttgaggaaatttacatctgcgagtactctcaagagaggctgcagctctgctttccaggaagcctcacccgcctgaaaaaactagtagtgttgggaaaccaaagtttaacatctctgcagctccattcctgcacagcactccaagagttgataattcaaagctgtgagtcgcttaattctctggaaggcttgcaatggctcggcaacctcaggttgctgcaggcacacagatgcctcagtggttatggagaaaatggaaggtgtatccttccacaatcacttgaggaactttacatcagagagtattctcaagaaacgctgcagccctgctttccagggaacctcaccagcttgaaaaaactagaagtacagggaagccaaaagttaatatctctgcagctgtattcctgcacagcactccaagagttgatgattgaaagttgtgtgtcgcttaattctctggaaggcctgcaatggctcgtcaacctcaggttgctgcgggcacacagatgcctcagtggttatggagaaaatggaaggtgtatccttccacaatcacttgagggactttacatcagagagtattctcaagaaattctacagccctgcttccagacgaatctcacttgcttaaaaagattagaggtatcaggcactggaagtttcaaatctctggagttgcaatcatgcactgcactcgaacatttgaagattgaaggttgttcatcacttgccacattagagggcttgcgattcctccacaccctcaggcatttgaaagtacacagatgtcccagattgcctccatattttgagagtttgtcaggacagggctatgagctatgcccacgactggaaaggctcgagatcaattatccctcaatccttaccacgtcgttttgcaagaacctcacctctctacaatacctagagctttgcaatcacggattggaaatggaaagactaacggacgaggaagagagagcgcttcaactcctcacttccctgcaagagctccgatttaactgttgctacaatctcgtagatcttcccacagggctccacaaccttccctccctcaagaggttggagatctggaattgcgggagcatcgcgaggccgctggaaaagggtctcccaccttcgttggaagaactggctatcgtagattgcagtaatgagctagctcagcagtgcagattgctagcaagcaagcggaaggtcaaaattaatcagagatatgtgaattgattactcggtggctttttccacctgcccaactggcatgggctcgttcaggcgttcaagctgctgtaaattccattgccgcaatgacgaccttcagaaccgttacacaatacaaaggacatatgatggctagatcaactgtcacatacaaattctataattctatctactgaaaaggatgattgctgttcattttcgtgattacagaaggaactgtgtatatcgtgctatttttgcattcacattgtgttccaggttgtgctcggatcagccaatttcggtggttaattcactttgctgtgtcctctgtgcagtgtgcactcaagaattgttcgcacatgcaattcagttgagcatcgcactacgcaagtttttttttttttgttaacaaaggagtggttgacagcattgcaggttgctaaaacagtgtcaaaaatttgctaacaaaagaattctcttcagaaatagtatgaaaataaatgccacataagtaatctgagtaaaacagacagaatcactagagaagactaacgacaaactcttctttttctatttctgtggtgaaaaactcagcatataatctcatgtatgcattggaggtgcataccatttcgatcatgtatgcatttagctgaacattatcaagaagcaaatttattgcacgggcaaccataagctaaactaattctcaagcaatttaataatcacaaaacagtctgcaataccaagatatataaaacttttgccagcatggagcaacaacactgaaacactacagtcaagacagctcccagaaaagattatatgttgctacttcaattgccacagttacaatcacccataatgacacatcaaattacataagagtattaagagtatatgacagttgtaacaaaacaactgcattgagaactagaagaacagacagccacatgaaccatattcacttcttcagatcagaaagcctggtgaactaccagtctaccaattgctaccgtagtctccatttttcacttatatgtacataggacacctgcgctatcagaatagccacaaagccagttcactcgctacaaattaatcttgactaaatccaaacagataccaactcctcttaatcaacttacaaaacacctacacttttgttgtctctacaccaccaatcacacaaaaggaaattaatcatccacctactcgtatcctactgttagaatggaggccttacaccagagaatgggcattgccagattctgagacactgtcctttgagctccctgaatctgaaccagtaacaaaaatcaaataagacacaacccaaaaccttccgttcatcaagaagttggatgttcaaattataaagtgacagttcgatcgtaccactggatgatgaggacccactgctcgcggcctcagtatccttctcaatctccactgattggtaagttgctgttggcatttcatccccgacatctacacaggggcggacccagggctggtgccgggtatgcaccggcatacccagaaaattcggaaaagatttagtaggcagtatgcatcagtgggctgaaactaagcaaaagcccaagaagtaaaagtctagctgttgcacagcccaccagaagatgatgttcccctttggctagcactcatgcggtagggtttggagcaggcgttggcggcgctgcgacagcgtggcgcgctgtggcactgtatcattgatcggcagcctcatggcaagcacgacgcatggacggtttgagcgtcgtggcgctgcggccggacagcgagcaccggtggcagaggctgccggtcactgggctaggcgctgactaaatcacctggtccagttccactcattatctgtccatgtccaagtatactcaaacttcttcagttctttgtctctctgatttttttttcttaacagatggagacatagattgattgaaaattgaaaactataatgagctaacaagtgaaatcaatgagagtacaaacttcaaaaattgaatacatgtttttgtgatttgtacgctgagatcaagttgaatcaatcagattagaatacgaagaagaatatgggtattctttttctttctttagcaaagcaccattagattctgcttcatcaggccatgccctatgcttcacatttctaatggtgatgggaaaccttagaacagggagggaaagtaactgaacaaagtgagttgtgttattttgttcttcaattcaccctcaggatacaccaatactttcctaaaattaagactatatttgtgtcatcatgtgcatatagtgtttgatttgcctctcttgatagctagcatgggcaaacccaggacaaaaattctgggtccgccactgcatctacatactcatccaactgctcggcctgtgtagtgatcttgtcaggatccttgctctcctgtaaacaacaaaacacatctattatacaattaaaggaatagaaaaaggagcctccacgttcgctctcatggcctagaaattctcacattaatcgaagaaaaagaaaaacagagtccatatatagaaatacaatttagaaatagttgaaattcgaaattaaaaaataaggaatattagaagatgagactagagtccatatagaaatacactttagaaatagttgaaattcggaattaaaaaataaggaatattagaagaggagtatagagtccatatagaaatacaattaggaaataatagaaattcggaattaaaaataaggaatattagaagtagagtatagagtccatatagaaatacaattaagaaaaaaaatagaaattcggaattaaaaaataagaaatattagaagtagagtatagagtccatataggaatttaaaactaactaaaattcggaaaaaaaaaagaagccaccacgttcgctctcatgacctagaaattctcacattaatcggagaaaaagaaaaggcagagtctatatagaaatacaattcagaaatagctgaaattcagaattaaaaaaataaggaatattaaaagaggagactagagtctatatagaaatacaatttagaaatagctaaaattcggaattaaaaaataaggaatattagaagaggagactagagtccatatagaaatatgattcagaaatagctgaaattcggaattaaaaaataaggaatattagaacaggagactagagtccatatagaaatacaattaggaaataacaaaaattcggaattaaaaataaggaatattagaagtagagtatagagtccatatagaaatacaattaagaaataaccgaaattcggaattaaaaataagaaatattagaagtagagtatagagtccatatagaaatacaattaagaaaaaaaatagaaatttgaaattaaaaaataaggaatactataagtagagtatagagttcatattggaatttaaaaccaactaaaattcggaataaaaagtagcctccacgttcgctctcatggtctagaaattctcacattaatcagaaaaaaagaaaaagcagagtccatatagaaatacaatttagaaatagctgaaattcagaattaaaaaataaggaatattagaagaggagactagagtagttattatacattagtagttttgaaaagttattgcaaaatttaaaattatgttgtcattgtaatatattttaataatataatgagaaaatatatatgatattatataagagaaaatataatgatgctagccgcgtaatctacgcggaccaccatgctagttaaccattataagagctcatttcacacataagctaatagcaaccaagaacaaagcatgctgctcactattgccatcgtcacatcaccgttgtccaccatcgtagcggtactgccattcaccagcatatcactatcattagccacggaagcatcaatgacatcggcattttcaccattaacaatggcagcccgtcgactcttgttgagcgccttcttgaatttgttgacgaatcgatcaagctcccactgtgtctcgacatccatctcatcaatatccagctcgatctcacccccaaccagctcaggattgccattcctcttccgcacaatctgcaacacattatgcatcttctcctctggcaagctctccaacccaaccctcaacaagttcttctcctccagggtcatctccctcttgttcggctcccttgccttcgttttccgcattttcacattccctgcccttggtttcacctgcgccggagctttcgccggtggcaattccggggcggcactggcatcggcggctcaaggatcttgagttcctgctcgaaccaagacaccgacgctttgtacatcttctcaaaggacgcgaggaggtcgccggcgaaggtgtggacctcgtgtccagcagggttgtaccgcagcgcgttgctgaacgtgagccggatgtcggcggcgaagtcgtcgtgcgaggggtaccttccggcggcgaggttcgccctcaccgtgccgagatccatggggcacttgatgacggcgtggtagtcttggagtccgaggcggtcgacctccacgggggcgttgaaccagatgctccgcttgtccttccgcagcttcgccaggatctggtcgcaccgcttccgcatcgccgccctgagcttcgccggcggcggggggaggccccggcgaggcgagccatgggcgcttcggcggcttctgctgttgctgaccccacgagccaatgcgggagatgaggcgcggaccaggccgaggcccaactcgcctgcgactccgcgaggcccatgagagttcgtttgggctatcagtccattacggacaagaagcccgagggcgcggcccacatccttccgtcttccccgcctttccttccctgcctcgtcgaccgcgttatcccgtctcaagtctcaactcccaacctgcgatgcgccgtagaaatttgatactcgtgtcactcgtcgtcttcctttgcttcactaatcactccaatgacgcgacacgcatctctctcaaaaagaaaaggattggtatgtaactgtctacaagtgatgaattcatcactcacgcagttcactgcacatcgtcccagtacgcgcactatcttggcagcaaaaagttgtaccagaatgatcttgcgttcttggcaggacatgatcgatcaaaataatctcaagcactttggctacacacaatgaacgaaattttgcagctcggcagctcaccaaggatgggcgcaactcaaccacgactgaaatcggtgctgacacttttagcagcatctttgtgattcagccgtggtttctccggcgcgtctccttctgttcagagaaaaccgaatagttcgggttcggattcagttcgaagcaagcatggcttaaaatcagttcatgcacacacagctgcccccttggcatttgtgtgcactgacacgatgccgtctgtcctacgcgggttggtagtatgatgaaagggtttggaaaccgatctaaaaaaccgttcggatcatcgggtttttgactagccatgaaagtgaaattgtccgaaaaggataaaagagcgaacgacgtcgtcggtccagcacaaagctcagcgctcaatcacgtcagagaaaccgatcacttcgggtccgggttcggttctggagagctaactaaggacttacggagtggtatgttcaactgttcagagtatttaacttcacggccaatacgttgtcgtccaccagagtgcatgtgagcgtcacgacgcatcggataatttgaccattcgtaggttgctgttggcgagcacggcgaaacccgagacgcgggttcggtttcggttaatccgtttcgcggtcgcgcgcggccacgggcacacggccatggcgccatgccgctgtctccccctcgctggctgcgacgcttgactatttttattcttcatctccatttgattgatttaatctctcgttgcagcagcaggcaacgtgcaatcggttcggttttgctactgttcgggttcccctggccctctcccccctataaatacacgcctccaaagtccaatccaatccgccatgaacactcggtgctcgagccatttccaattccaagcttacatcgaatcaccatccacgacaaagaagacgcatacgctggtgatggagctcatggcctccctcatcaacatcttggcgctgatctccgaggcatgccgcagcgcggagaagctgccggcggcgctgatcactggcggcgtcgtggaggccgcggcggcgatcttcgtcgccttcttcaagccgcccggtggcgtatttcagcaccacggcaaggcaccattctacctgtattacggcattataggaggcgtggccatcttcggcttcgcggaggcgtgggccgggttctgggtctccggcgacctgaacggccggcgcgccgtcggaaagacgatactgtgggtgtcgattttgcctcttgtcttggtagctgcgctcggagggttcgtcttcatgagatagttgcaaacctatgttaatttcctctgtttgtacgagtgggtgtaatctcctgtacctctgtgtgtagtagttgtagcgtgtatgcactagtttttgctttgtaatttttagcctggtgtatttatgatatttcagttattatgtgatgtaacagtatgattgttaacttttacaaggttttatgtaattatacataaggttattttttgtgtgatactccctccgttttttaatagtgacgccgttgactttttctcacatgtttaaccattcgtcttattcaaaaaatttatgtaattataatttattttgttatgagttattttatcactcatagtacttcaagtatgatttatatcatatacatttgcataaaatttttgaataagacgaatcatcaaacatgtgagaaaaagccaatggcgtcatatattaaaaaacggaggtagtatgtgattatgcgcgttttccttgcatttctttagctacggatgttgtacaggtgtacctcttttatgagtattcctccaatcttctgcttatatccttctcgaaatcatggcagtaatcaaccaatcataatcttaaaagaatcatggtagacgcagagcaaccagttagtacatatttgaaagaacaggcccttgcattgcagggccgtatcctgtaggctgcggtgtttcaaagcaggaaaaagtacaccgaaggtccctcaacttgttatcgagttacaaaatcgtccctcaaccgcaaaaccataccggacgtccctcaactaacaaaactgttcactttaacggtggttttgaccccggttttatttgaggtggcggctgagtcagcgtgggacccacgtgggccccacatgtcagaatgccaggtcgtctctctctcctcttctctcccttcctcgtctctccctctcacttctctcctctctgcagggcggctggcgggtggggaggaggtccggcagccagcggcggcgcgtgcgacctcggggtcggaccgtcggagaggcccgggaggcggctgcggcggcggcggcgacgcttgagaagggagaggcggccggtggcgccggcgcgggaagaagctgtcttcggcgtcgtgcccgctctgccctccaccgcctgcttcgcccgccgctgccccgcgctcacacactcccgccggcgacgccgctgacggcgcgggcgcgagaactgcggccatggatgacgacggcggcgacatcctcgctccccccgttccgctccccgtcggcgccatcttcctctcccgcagcgcgcctgcccgccgctcgtctgctccgtcggccggccgctccccgcgcagtcggcggtggcgaaggtgaccgtgccggcgtcgaggtcgtagccgacgtggatgttctgctgcgccaggttcccaaggatggacaccggctgctgcttcgtcgtcgccacgattgccaggcacagcgtcccctcctacaccgtcacggacgcgttctccggcttcagcgccaccgccgcgcggccgccgccaccgccgaactccagcgtcaagtccggactcgcttgttcggtttgcttcctgctggatgtacacatgaggtcattcaagatcagtaactcatactctattctagcaagctggctgttggtgagaattctgaattctcattgcatcgcctaacgaagatagaagatcggagtgttatacatcaatcaatttcttagctgggaatgttactcctgcattgctctacaatttatgggtcatgtaatttgatctctcacagaatctatagcgaggtaagaaagcgaaaccggcgccacaaaatatcttgaaattctgcttgttcatacactgttcttctgattaaagaacaacttagcttgagattgttctgttcacttgcaatttgcaggagtaacaaagcttatttttgcattgcccgagtccacaatgatgcgggagctcgccgccgatgccaccgtcttgttgccgaccctgacgaagtcgaggaccacggtgtagtacgtgtccacgtccccggcgacgagcggcgtgctcgctgcgccgagctcggtgacgttggcgagggtgccgaagttgaacgccgacgatgagttgacggagtgcgggacgaggctgtaggagaatctccggccgagcgacgcctcgccgccgagctgcgtcacgagggagaccgcgtcgccgctgagcccgaccagcccgtcggccgggaacgagccggccgtcgtggtggagcagccgaacttgacgctgcacacgccgcctcgtggtcgtgggcctcgtgggtggcggccggcgggggagcccgcgagccgctcctacccctgccgccctccaccactgcccgcccgcaggtcctccccccactgctgccgcgtcgcccgtcgccgccaccaccgcagccgcgtcgccatcgaatcggggagaagtcagaaagacatgaggaaaggagagaagaggggaggagagagatgacctggcatcctgatatgtggggcccacgtgggtcccacgctgactcaaccgtcacgtcacacaaaaccaggatcaaaaccaccggagaatctaaagtgaacggttttattagctgagggacgtccggtatctggttttgtggttaagggacgattttgtaactcgatgataagttgagggaccttcggtgtactttttcctttcaaagcataatgaagaaatcaaacttgtcaggtctcagatggctcgcaagcagttctccggaaaaggaggagagaagaagatatggacatacggggttaatactaatgcattagcataagctgttcagttccgggttcggttgtgacatgtactgatttctttgttaatagttaatcagcggaaatcatgtctttttcttattggtgggtccccgactgtggatctttttgcgcgcctctcttggtttggattgcaaagaagcctaccgacccggtttcgggttcgggttcgggttcgttgctcagcgcttgtgttgctttgctcaggcatactgcatacatatgctttcagaatgtctctatcaatccgggttgaaaaaagtggtcttgttgagatgaaattgcttatcggcaccattcgggttcggttcaagtcgtcggtttcctgtactactgctagtcagaaaaccgagctacgtggccgatcgggttcgggtttccgagagcaaacaacgtagcgtgtgctcgtcattttgcaatcgctccacttgctgcgagctcggcgaacggttaatctggacgccatccctacgaaaacccgagacgcggtctggcgggggtcggtgcttcggttcggttcatggtatagatggcctttcggcccgcccggcacggcccggcccaggaacggcccaccagccatcgggccggcacggcccgatcggcacttcgtgccgggccgtgccgacccatgggctgcacctcccgcccaggcacggcccaccagccgtcgggccgtgccgggccggcccgaaggcgcgggtggcccatcgtgcctttttatataagtctatattccatccctcctctttgggccgtgaaatatatatagcgaaaataagtctatttgccgtccctcttctttgggctgtggcatatatatagtgaaaataagtctattttctgtccctcctctttgggttgacatatatatatatatagctaaaataagactattttacgtctctattctttcgaccatggcatataatatgtctatttttactccctattgtttatgtgtcgggcctagcctgaggcccatcgtgccgtgccggcccggcacggccgggccggcccggtagtcgggccgggccagcacgggcccaacccctaacgggccgtgccgtgcttgggccgggccaaaacgccgtgccgtgggccgggccatcgagcgtcgggccttttggccatctatagttcatggtgtgtgggctgtgttccctatgggaccattcgggtgatttaattagcacgaaaaacggagtagttaattagcacgttgattaattaagtattatttaattttctttttaaaaatggatcaatataaattttttaaagaactttcatacagaaatttttttaaataaacatactgtttgtcagtttaaaaaacgtacacgcggaaaacgagaaaggagtgttaagaatttgctcttgcaaacacagccatggatggacacgatggatcatggatcgctgcgacttgcccgcgaatgaatctccgtcgagggctcgaggcagtcctgggtttggctttgtgcgtcgggtttcgccggtgtattaaacaggcacaagcataaaactccaagtcaccgagcagctccgatttttttatttttagtttttattaaaatatttacaaaactaattttgtgttttaaaaatttacaaaactagtcacccatcgcccgtggcagatggcagttgcctcatgcctaacgggcggcaaagaagggcgtgccattttgcagatggccccccttgctgcccttaggttataaataccaaagaggccgcttccaaaatgccaagccgtcctcgccgcccttttgcaggcggcccccgcacagtagaaaatcgccctctataagggtggcaagggggccgcctgcaaaaatgtccctacggacggcaggagggtagcctgcaaaatggcaggccttcctttgccggccgttagacatgaggcaacgatcgtctgccacgtcattaaaatcgatctttaggagggatttatggaccagtaagtccaacgtgtgcaaagtattccacccgaaaaatccgtcgggaaaccgatagagtatatgcgtggccgttcgggtttatcattttgtatttcttccgcttgcgcgcgttggcactgcactgctcactacgctctcggcgagtgattactctggtcgcgcgacaacccgtaacgcgatctcgcggtcgcgggttcggtttcggttgagctgtggtgtggatcgctgcaacttttgcttgaaaaatgaaaaacatgttcgtccgcgattttctgtccgtcgcctctcactgatcgagagatgcaacacagtctgagcgatcgggttcggtttttgtgctctgctttcaccatgaagtcatcaccaggctcactgcgtctgcctcctcgcaccattcagcattcaccgagttgaaaaaaccacaaactaaggcgttccccctgatgatacagcacgcgagctacgcacgcacagacatacggtacagacatgccggcgcccgcatcgacgtcgagaagctgctcactcatcccgtgccggcgtcttgcaagtcgcggcggcggcgctctgcctgggcttacggcccaaattcggcctgcaggcccgattttgagttgtcaagtcagagcccaccgacttggaggcagtcggcccaagcatttgaaagcccagaaacatctgctccgagtgctcaccttccgtgtagcttcctagtagttcctacactaccaaactaccgcattatttatatccctcacaaaaaaaaaataaaaaggactacccgcattttatattgctcatctgccctcctcgaatacctcccatattattcccatctctgccttttgcttaccactgaccactgtcttctcgcgaggctcgccactggtccattgtcgcccaagctccaaaggcttctcttccgccggatctgatggaggaggtggaggtcggtttgctggagggagggatcgggtggctggtgcagaccatcctggagaacctggacaccgataagctgggtgagtggattcgtcaggttgggctcaccgatgacaccgagaagctcaggtcagagatcgagagggtggggtggtgacggctgccgtgaaggggagggcgatcgggaacaggtcgcttgcccgatcgctcagccgtctcagggagctgctctacgacgccgacgacgcgatcgacgagctcgactactacaggctccaacagcaggttcaaggaggtaaagcttgtgtatgcaagatgtatccatttttgtgtccaaggaggtgcattcattcccctttttctgttgtttcagatgcatggcaaggtggcactggaagtttagatgaacctgaagcagagcaagcagagagaccgagtatcaacgctgctattgcgattagcagtggtagcaaaaagcggtccaaggcatgggggcactttgatatcactgaagaagaaaatggaaagcctgtgaaggcaaggtgtattcactgtcacacggtggtcaagtgcggttctgaaaaagggacatcagttttgcataatcacctcaagagtggcagctgtaacaagaagcgtgaggcaactgatcagcagccaaacccgtcatcaaggtacggtatatgatttatgtaacgtactttcccccgcagcaagccagcaactgtgaaaccgttctgtttttttttaaaaaatatttttattttgcagtactgctgatactgcagcaaatagcactcttgttgaactcggcggttcaggttcagacatcagaaaaaagatgaggattaatggtgagtcaacacacaacgatgcaccttatgcacacccttggaaaaaggctgaatgttccacaaggatacagcaaataactcgtgagttacaagatgcacggggggctgtgagtgaaattcttaagctacatggaccgtgctctgttggaaattcaaaccatcgtacgagtacaaccacaactctctgcagaagaacgtcaagtcttaatccacacaaaatatatggaagagacgcagagaagaacaccatcatgaagattattacagatgacagttatgacggagtaactgtagtccctattgtgggcatcggaggagttgggaagacagctctcgctcaacttgtatacaacgaaccaacggtgaaacgtgactttgagcggatatgggtttgggtgtctgataactatgatgaattgaggatcacaatggagattctagattttgtctctcaagaaagacacgaagaatctccctgtagaaaagaaatacggaaaggagtaagtagctttgcaaagcttcaggagattttgaatgggtatatggacatccagtcgaaaaagtttttgcttgttttagatgacgtatgggacagcatggatgattacagatggaatattttgttggatccattgaaatcaaatcatccaaaaggtaatatgatccttgtgacaactagacttttgtctctcgcacagaggataggcacagtcaaaccaatcgagttaggtgctttgtcaaaagaggatttttggttgtattttaaaacatgtacatttggtg

SEQ ID NO: 5204 - DNA, 4273 bp, Oryza sativa
cgtgcatatgtgccgtgcgtatatttatacgtgtagctttgcacttgcacgcccgcggtgatgcgtgcgtaaaggctgacgccataccggaaaggcatttccatgttagacatcagccgtccatctgctttgagattcgtgctaaatttggtacgcgcctaaccctgtattgtttttttttagcaactgtataataataacttgtgtctttttagtaagaaaaggagagtgggtgaattacatgtaatagctctaaattcttcagaagggagtgctgcagactgcagccagccaactagccaagcagggtttatttggagagattaagattcttaaaaacctgatatctaatttctgagaatctgaaaaaagctttaaaaaaaccctagttcgtagttgctaagtttattttctagattctacaactatagtttattaaaatctaaacaaaaagctaaactactttgtggagcttctgatttaaaaggaattgcactacaataagctcttcaaataggccctaggaatgttagtaaaaagccggattaaccacttacttgcccccttactagtcatcacggtatcctgcaagccaacacgccgcactttgatagttcgacgcccgccagcaaagcccggtctctcagtcccaatcaaggaacacgttaaaaatgaagaccacctccagtagtccagcgtctggatagcatatactccaagttccacggtaatctcgcaccgaatttccacgcgaaacgataaaaatggcagattattttttgggggtttccaatgtcaaacaacacgtggctgatttaatccatctttggaaagggaatcgtatcgccaaacatgaaagcgtaaggggaagaaaaaacttacattttattattccagccagtttcagaggaagtggcaaccgagtttctagtgcccagcagctactgtatatccaatgtgggtaaatctcaaaacatatactccctgccagatgaaccgaaaaaaagcgccggcacacgcttctggaccacggtctcatcatgtacaaattacacatcatgtaataaacacatgtacactaagtctcgacaagaaattaccatgtgaaaaacgcaacaggaaaaagacccgcaaccatccacatctcatcccaaacctaccttctcccaattgggagggtaaaaggtcgtgtcctgtgaatcaaaaccaaatttacctcatgccctcatgtgccctgtgctgatcgaacagcatcattcattactggttcaccgatcaggcaatcaagaccatcttggaggcaaactccacttacccaatttgagcacgctgaacatatgctgtatattctagcctaacaagtccttgaatagaatagggttgttccctgtcggcgtcacaccaacttgccgggccgctgcgtccttctgcaaggcatcttgaaggctagggcccttctttgcagcgaccacatttaccccgagtgatggttctgtggatccactggtcactccagtttgtacatcatccgaaaagattgacataagatctggtgttttcgaagtgctcgaagctggggtttcagaaaccacaggagaggctgatgctggtccgagaagaccttctaactgtgtgaaaggatcagctaatggaggacttgatgaaactggctctcccagatccagaagatcaggtggtggggcagaagggattacttgctctttggctggctgcggtgttgcattagcagtagctactttctcagttgaggaactctcctttgctgtctttcgcccagcctgggtcttcctatcagctttaccaaagagtgaagcagccaaccgttgcttttccgctgaaacttcagtggcctgctgtctcttggaaccatatgtggattcccgagcctgtgaacttgttgaccctcccacctcagaactaacgcctccattggttgcttgttgactagatgttgaacttgaaggcgtagatgaggaggaataggctggtctcccccatttcttctgaactccatcaagacgaagtttgagaccaaattcaccagaaagagaatcgcctgatggctgggatcttgacatttggtgatcttccttatagtagcttggttctggaactggaaccaggtcagtagttggggaaatactggcctgtgaagctgctggaggtagctcataggcctcgaatctaagagcatgggcagatgtctcttgttgatcctgggccttgtagttgccaacacttaccactcctgagcgttcactctcaggaatgtagggtgcagcaccattttcaatggcttgctgcacataaccatttagaaacgagaggtttctgtcgatctgcaacataaatttagtatccgtgaaaaggttgcccttttactcttacgcttggttcaatttataacttttgctttaaagttgtgtgcttatgtagaaatagtgcaacatattaaaaatatatgtaagtgccagattgtttctgtgctgtcaccaggattttatgcatatgaggaagcagataaaatcaagttttcatgcattaggctcggttccaagaaagggatagcagtacctcaatatcttcgcagcttgcatcggctggcattacattctcaacagcctgtttgtccaaacctagcaaagcctgtagctcatatgcacgctgctgcaagtctgttgaatgcgaagctgacaattcatctatcaacgattggcactgcaaaggatcggagatgatttataaagatttacctacaaacaatagagtacacgaattctacaggaagagagttttgccacttcatggtaagcaatagtgttgatgttttctattctggacctcccaatcatgtggacagtattaatatcaaatatgtctctgtgctttccagtcatatggaacatgattgctttacatcatccagtggtgaatgatgttttaaaaatcagaagtaaaggtttgcttctttacaacattatatcaaataacgaaattattcacagaaaaaggctgtcacagaattatgaaacacagagataatatagggtagatggcaagttaaccatagtcttgagttttccgagatgactgttccaagtttgtattaggatatttgctcataaactttttttatagctagtggtgctcaaactgaacagcacgagatgactgttccaagtttgtattagcatatttgctcataaacttaaataactagcattatagatgtaaattccaacaaaggaaaatgcaccaaattcggcttgggtatgaaatgcatgtgataactgataaacatataatcctagggaggagcataatttacagttagtgcaagtatagctttcatgtaactttagtctcatgaaaaataattccctctttcggtgcacaactgcacatgtgaagctatatgtaataaacaatggtttggcttgaaagctaatgacaatttgacatgaaaaatgataagtgagacaatccaaacagtgaagattttcatttacctcgggtagcatatcgatcttccttccaagagcgatttcaaacgcaaagatcttcaaaattgcggagattgcataagccttgaataggaacaccgaataacaaacagcaggacatgtcaataaatcaattagatgtacaaaaaagattttctcaaggataaggaagtagaacattaatcagagaaaacaaaagatctatacagttgatcaaggtgggtccagattataacagtatataatatataattggatatatatattataggctactataattgattggactaatggatcaaactacccacaaaatggattactgggttacccaacaacaatgtaccctgagacatttcaaattacaagttctgattttcatggcaattgatcatagtaattgcgcaagaaaatgtcgagtaatgatcaacttggatctatattataatatttcaacacagagcatgcacagtagcaatgggccacatgtaataacagtggaacaaaagctaaactacaagagcataccctgacagtgtcatcagttgggtgggcctctgccacatcatacagcttcccaataatatatgaagctgaatatttcccatctgctgttccatattctcccaaaacccagcatattatctgaaagtagaatgaatcaacataatctaccacagaaaacatggtacggagtatgatataagaagaaaacaggaaattaaaatcacctgcagaaacgaagaagg

SEQ ID NO: 5205 - DNA, 10408 bp, Oryza sativa
aatataaaggattttaagtttttcttacaatattgtccagtctccttattcaaaaaatgttagaattgttatttttttttgacttactttattatccaaagtattttaagcataacttttcattttttatatttgcacaaattttttaaataaggcgagtagtcaaacattgtaagcaaaaacttaaaatctcttatattatgagacagagggagtataatatagtagtgtaattacacggtaacaactatgcccaaatacattcacagaattagatattttttttggacggagagagtacaatataactttcgtataattttgaaactgtcaaatttactttaagattcatacaaatagaggaggaaaaaacacacgtactctatttgttcagattcatgatacatcctagattgtcatttttttaaggatggagggagtaagtacggggatttggtcccgactttcgcttcgcatgaataacatgttatcgtagtatttgaaagtttacattcgttaaatatttggaacaaaactggtagccgagcactctcgacggtcgctacgtactgaatcacccatccggccacatagaatcagtgcgtggcgcacgcacgatggcgagcggtgtgggcttccatcatcatcatcaactgagaaaaggtggcagtacagtacactgggctctgggatggcgagtcatgttccataaattactgctactgtatctggattatgcccgattgacgtccatccatcgatcataaagtcataaacccagcagagcatgcagcagcacaaactgcacaaggcagcggttgtgccgctagctataggcaacgagggtgtttagatccagttttagcatgccacctcgaatattatatatggtgtttcatgaggtatttaaacactaaaaaaaataattatagaattagtcagtaaactacgtgacaaatttattaagcttaattaatctgttattatcatatattaactgtagcaccatattatctaattatggggcaattagacttaaaagattagtcacaatctatatatttttagcctatatttaatacttcttataagtgttcaaacgtttgatatgatagggtaaaaaattttagggtgaaatgtaaatagcacctatagctatagctatagctcgtcgattggtatccatagaccatagaggtagtatctctctctgtacattttgtcgcagagagatcagagatcccttgcagattgcagctgctcgtcatccttcagcacatcgcccctcgcctcctcctcacgccgatcatcaataccctcactagcaggacaaagtagcggtcgcgcccgtatttttccaggctaatgcattcgtgtttcacttgcagttccaaatttactctacgccatgacaagcctttctctatctaccaggctgtgaacattagtttttcctgcagaaaattttggcagaatttaacttgtttcaagtgtcaaatcaactcaaatgtactcctgctcagatgattttacagtgctgtccccctggaccgaagccgtggtttttgccagctacagtaccaatcctgcagctgcaaggctgcaagagtagggcaatgaaggaaaaggttgaggtcgccttgcaccgaaatgggccgcgtagctgcgagaaaacggcacgggaaagcaaaagcttctgcgttttctgtggtttctggggatcgaaatggggaaagaaatggcgcggcagcaaactgtagcctggcagctcctgtagcctttcggcaccggtgaagcttctccactaccggaacggcactgttccgggatgctgggccagcagtggtagaatagaaagatacacatacactgatacgcatgtgcaacgctcgtttctatatttgtgtacatggattctccagttccatctctgtagattgatcggccctgtttgttggcaaaggctgtgtttagatccaaagtttggatccaaacttcaatccttttccatcacatcaatctgtcatacacacacaacttttcagtcacatcatctccaatttcaacaaaaatccaaactttacgctgaactaaacacagccaaaatgtttttctaacatgtgtggacttttgatgaggaggcacaggagaatggcactagcagtagtaacagacggatgatcactgttacagtgctgcccatgtcaaactggaatcctggatgagggcacaatgtgcaactggaatcccaagcaggtagggatccaaattattttattaatggactggctgtgattagcattcgtaatggtacgtggttctgcaatgcagtcacagtttttaccgaatacattgtagcaggggtagtgtgtttcaggtcttccagacgaggttcagttgagttcagtgcagcttgtttgcgacgtaaaggaggtggctgatgtttgttggggggtagttctgcaggagcttgagattggaagtgaaatcaccagccaataggcgttttcggacaagaatcagcattgcacagcagattctgagcaaggtctcctgcactcggcagataaagtttcaggcgacgaactggaaaaaccaagccttgcaggataaaccagggtgttttgtttgctacctgaggaccatcaggatcacttaatagtgtgtcccatatgtgaatagtgtcagcaaagttgaactcctgggttaacagtagcgtaatccaccggaatgcgtagaactgaggattaatctgcagaaacagaaaccatgcttgtgttaattttgctgcaggcacaaataaggatagcagtggcagtagtgtggatttcctgctacaatgtttcctagcatgatgacaaaactactgtatgaattattaggtccatgccagatcgaaatagatgcaatgtagtttgaacactacataaagcaaatctgtcagaggaccacactaaacacatcagaaattgacagtactcagtacaaagaacatacttacttctgttgttatttccaaataacgctgaagctctccatcatacttcgcaacaagttgcgacagttttgagagagtaccttgaatgccaacagcactgttgtctagtttctggcagaagttgtctctaaacccactaagtaactccatgaagcagaagaaagaatcagcttctgcaaagttctgtagggattccggatagcaaaataaaatcatggttagatagtcccacagaaactattgctataacgaacagcaactgactacagtctgctctaaatcatacagggcattaagcatatatatggtaaaacaattgcttactccatacagcatttttatcatctggatcattccgaaacacaaagaagagaggtgccaaaatttcattcatcccttgtacataacgtattccggcattcagctttgcaaagataatcagtatatttttcagagattcctggtaaggatgacctatgatcagtcaggtttctgagcagaactctgtttagacttagatagtggagttcacctgattggactttgcaaaagatgagtctccacagaaaaaatgcatgtcagggtgagtgcgcttcacatcacggtcaatttgctcgataatctctgaatactgcacgaaagatatatgtcaaagctgatataaattagtagtaacatcagaatgatgcaagctggtgaaaaatacaaacatagggtgcgcgtactagaacaaaaatctgatcctcctaatactaaaatgcaaacctattcttttaaccagcacgtatttgactaattatgtagtccccaaaataacaaactgaaacaaagaagagcacaatagtttagagattagcatcatgtcaagtggtttacaatattctagttatgcttggtcttttctatgatcaaatcacaaaagctccaaaatagttccaaaagaatgtaagcacatctgctactggcaccaatctagttctaatataagatctaagaagatgcaactagtcacaatgtgacaataatttgtagatgaacaaacaaacaacaacaacaacatatgtaaaaagatccatatccaaaggcaacagtgggcacctcaaagaactgattccatgcagttgtcttcccaaggctcaatgggtgctcttcttgtgtaacctctgatctatgaagtaacccattatatatactccctgcattctcactcccttggccttctaattcccgttgccgtgcaatttccatctacctaacagaattagaattcaggatctctattttgtagtgaggtctaacaagcaaaaagggatctcaggtactatactacaccgcacgtgtatcttaaaattacaatcaaaatagagaaagtcacaaatctgaatctgaaggggcatacagggttgctaaggaattcttctttaaaggctgcgtactgtgatctcttctttgccaactcctgctcccacagggcacgatcactcggcaaatagcccagcaacagctgcaaaactaacatagattttatcacacataaagcataactttttgaaggctggcatgctgatcacatcaaattaactaacagaaaaaaaacagcagccctgagtagatgaacaataggaccataaggccgattttaatcggacattacgtcataaaggataggggtaaaggattagactaaataatggacatgtgtaatcaacgatcagaaacataagacagtagaataattgaacaatgtctagactctagaacgcaacagaaagtaatctactgtcattacgctcatgaacctaacctccaaacctgtacggctgtacctacggaacgatccgagattaatgaaaagacgagcaaatcgagagcaccttccacacagtaggacggacggcggcgccgtcagggaccccctgagcagccagcatcctcagctcatcgagatctatcaccttcttggacagctgcgccaattccccaacccacaacgacccatcaaagctgaaaaacagtaagccaaatacgaatacacagagcctagtaacgcgatatcttcaggaaatctcaccgccgcgaggagacgggactgccgcgagatctcgaactccggcggagggggcgcccccggcggggatcgcggtgaggtcgccatggatttggaattttggatgacgtcagaatatctgaatttcttgggccctggaagatacgcatcgcgatccgttctggtccgtagatcttgtgggacccggtgtaatacgctcatggacggctcagatcgtaagcttacttttcatgcttaagtagggcccacttcacggtctcattaaagcggccaccagtttcatgtgggcttcctaataattgagaatgtgtactgggccgaaatttcggcccagctatgaatcccagtttagtcgtagctctgtcacaggcctaactgaagtgcaagcccaacaattatgtacagcatcagaaccaaactctgaacttttttcttttttatttcataattattactgtttttttccctcgaatacgcttatacacataagagctacgtatcattgcgttaagaagaagagaagtacaagtagacgggcattacaaacaccagatcataattaatttacagatagatctttgacgtacgatcagaggcaaagataagaagaggaccaaggtattgaacaaatgacaacatatgctctctcttcatatcaatcgcacactcaaaaaaaaaaatcaccaacttgtactgtgttgggaactactaaatcattttgacacctaacaaagcttgcgaatgatgctttcattggattgtgacgatagtgacaacaagattatagataccatctcgtgtttggcacataattaatctctgtcaatatcaagtattagtagtcggtgcaggaagctgaggcgaagtagataggaatgctctgcaagaaaatgataacgttagaggtgatcaactagacgagtaagtcagaaggtcaggcgtaagtgtacacgcatatataccaagtggagtattttacggtgcagatgacaaagtgacgtatatatgttcctagaacaaaatcgagtgcacaagtctgaaactctgaatttgactaggccaggaacaaattggtctttctcaacccgtcttaaaaaaaattggtctttctctggatgaactgtgctgttagttgcaatatcaagcgttgagatctttgttatgggtcagcttttcagagcattttccatgtgtgtatataatagtcttataatgggaaaattagctggtctgagacaaaaatcacacaaaaagggctgaccacggagtagttgttctggtcttgcagcttgcaggttaaggcccctagtcacccatgtgtttatcccagcatcataagtcccctccatgattctttttgtctgccttaattgcagaagtccttttcattacttgcaaattataatcggtaaatttacatttaatatagataagttttgatgctctggcatttgaacagaagatggaactagtgaatctgtgatgcggatattcagtgtgcgataattttgcagcagctcaactctgaagccgacagcgccggcagcaatagtgtcatgcatgaacacacatatgctgaagtgttaaacaggtcaatgattaatctggtcccaccccatcaatgtcattagcagtcatcacctcctgaactaagattactgcaatggtgacattggattgctgcaaggggcaaattaacctccttctcagtggcccagaaatggcgtgtctgaaaggtcaaactataccagaagaaaactagtgtacttaggaaatttgtttggtaaacgaagtgatcagatatctcaagcgatctaataaccatctatcttaaccgataagttgaatctttttttaggccatgatgtttggtataagcaattcttagggctcgagaaaaggtaagctcaacagaaagctaggtataactagcataggttctttcctccagattaatgcatagctaggtataactagcataggttctttcctccagattaatgcatggacctcttcttcatgtcatgcacagactacttaatttatccatggaattaaacatagttcgtagctaaccaaaatatgctctatagaataatcttggaactaacctttggcactccgaagaagcaaaaagtgctcaaaagtgcacatttaagaacagtgcatgtcaattcaactgcactatttatattctgtagaattctttagaattgctacacttgatgcaacagatcaagcatggtttaatccatccaaaaagagataagtctcacaaaaaccatgcaccctactcgccacgtccgccgttcatgcatgtggccgagacatcccataacccacaaccaacttgctactaattactcgattagtaactaatcgcggggccgtacaagggggactaaactaatcaggcgccacgtcggatgtgcttaccacgtcgcctcccccggatagagcccaaggtggtcgcctcgccgcggaggcgggggcgatgctgagctgtcactggctgttgcttcctttgggccgtggtgggcccatgcggatgaggacggggtggggcccacgggggcgccacgtcgacgttgtggggggaggcttatgtggcgcttgctcgttccaagagccggtttagctactcgacctctaggaggcgacgcgaccacgcacgcccacggcgcccgcgtttgccagccagatttttgcggtttgatcccttggttacttgtgaactctgtagaggggctcgtgcatttttgccttatgttagcgttttgtgtcggccacttgtgtaactagtggtactataaattaacttagctaccatccatgatctttgtgttttgattgtaaaagactttttggtgaatgtaagaaagagttttgaataattctatactttatactaattctgtcccaaatataaatatttttagctataaatctatataattgtgtgttcagatttatagctaaaacttgctataattgctcaatatacatacttttttttcctcatatgattacgttccataaataagtttgtgcagttgacgatggtcagcccgtcttaaaccaacctcacgtagtcacgtcctcaccacgcacagtgtagagaaggataaagggcttttgtgaaaataaaattctacccgggggcttccatcaaaaaagaacagccgttcaaaggaccgcagtttttggatttctatataaaccttcaaaaacccgcggcaattgccctcagatgcatagtactcgcacgccgcgacgcctctgctgaacatttcgctctcttccaagatattttttcctcccacgattccttcctcccatccctgtggggattcatcggctcatccgtactagcacaagatgtgcgagggtgtgcgggccgccggcgacgccgccgccgccgccgacgtcgacgtcatcacctcctccggccgccggaggatccccgcgcattccactgttcttgtaagcttctcctctttcatcagcaaattcatgaatccttttagctggagatagtttctgtggtcaaattctggttggcgtcgggcgtgttctgacgaggaaatctccgtttaattctttgtttgtttggtttgatcaccaggcgtcggcgtcgccggtgctggagagcatcctgcagcgccgcctgaagaaggagagggacgccgccgccggcggcggcaaggtccgcagggccgtcgtcctgatccgcggcgtcaccgacgacgccgcggccgccttcgtccgcctcctctacgccggcagcaggtaccgtgccctcgtccattccattcggccattcccctctaggatgggatttctgctggtagtctttgcttttcgagcatccgtttcttgcaaaagatgggcgattagttgaagaattaatggtcttcgaagactaattactcgtattaactcacgagggggaaagaaaaacatgtcacacgtgtaggccacgctgacaagaaactcgatctcttcttctatggtttagttgaaaattatatatttttagtttatttttttattagagggtacgttttttctgttgatcatggtagcagtaattggctactaataattgctacctaaactatgaaaacggtagatacgacgaaatgatgttgaaagtttttaagcgatgataaacagtgggtgaaaatatgcttaatcactattctgtatctgtagcagaacgagcaaaaccttcggagcgaatgctgtaggaaaaaaactgaaaaaaaaaatctggtgtccaaagtccttgctagataggcagtccaatcaaggcaggcccggctaaaccacggatattttcttcatctatcacacagcttacagatccaatgaaccattccaagaatctcgctaagtgattagacagatcgctttggcagcctccgtgataaaatcccctccaagttggccaatttgccgattttttgtgcctcatcaaactgtgcgagtcttgacaaggcaggtcaggtaaggtgacacaacacaaccccacacaaatgacacaaacagagcatcgaaacatcgccatctccagctccgagagccgtaaacaaatctcgtggagcagaatccatgccttgcctcggcgcgtcgacttggacggcacagacagagaaaaaaaaagagagaaaaagtagtagtaaagcgaagcaacgataagtactagaccactagagcagtaggagaagtcgagaagaggatgattttggctttctttttccgccgcttggtttggagtttggtgtggtagcgcctgcctagttggaaccctccccttgcaggcgagcaccaagcaggcagccgatctcgtcggcgccacaagaaaaatcgttgctgtcgctggtgcggcttgcagggccgggaccgctcgccgcctcagccatcatctcgtgttggtttttgttgaaaaaaaaaaagaactctctttttgtgtgtggagatgcagaggtagggacctgcccaaactgtcccagtgtcccgatccgtttgaaacgaatgaagactttcgtgcctttctcaacattagtaatagagtaaatttcacaaaagtagaagttttatggttcaagttgcagaaaatcacacacattttgacacttgacacttgacacttaagtacatatatttcggtagtttagtttcataaaaccacactatcgatgaatggattcacccgtgagatgatatggttgttccacccgtgagatgacgtggttgttccatctaagatgaggacgtgacatcatattaatttcgtgcgatggctggtaatagaatgccatgtcctcgtcttaggtgta

SEQ ID NO: 5206 - DNA, 23956 bp, Oryza sativa
cgtcaggaatggatagttccaaaaacccatcgatttaccacatgttccattattgtaaataattctacatgctaatgctaaaatttaatttctactcccttcgtatcatttgaagtgcagccataattttccacactcaactttaatcattcttcttatttaattttttttaaaaaaattaaaaacataagttatgaataaagtattattcatgttttattatctcataaaaaaataattatcatattttttttcaaataagacgaaatattaaaattgagcatgaaaactcataattgtacttaaaatgggacggaggagtagctaagtagctagctaaattaagctagaagaagtcgatgccgcatcgcttctgctggaactccggcagcagctggccgtcgggcccgaccacgacgtcgcaggtggcgtgcaccgggtgccagtgcgacccccagaacgccacgcgcacccgtatcctcgaccggaccttcaccgtgaacgccacgccgccgccgccgccgcccgccgcggcggcggcagcgtccctcgccatcatgtccgtggcggcgccggccggcacggcgacgccctcgaacccgaccgccgacgtgcccctcggcggctcgtacagcggcccgccggtgaggtccttcccgtcgacgaccacctcgccgtcgccgcggtactgcaccgacatgtacacccggccgaagaagaaggcgaggtcgtggttcgggttgtggatcgtcagctggccggagagcgccaccgggccgccgccggactggacgccggcggcggtgaacgcggcgacgtggaaccgcggccggtgggggcggacgacgaggtagacgacgaagaggagcacgccggcgacgaggaggagggagaggaaccacgagcagagaagcttggtgcagcgcgtcaggtgcggccgctccctcggcagcgggcgccggatgcggccgccggcgatgaagcccgcggtggccgtcggcggctgcgacgacatggcggcgtattatatatacgtgtgcggcggccggcgagcttcgacgacgatgggatggagctcgttggtgcagcaaagcatgggcggcaaagcatcgccggagaagatggaattcgggagaggttaaggaggtgtgtacgcgtgtacatacgtagaggttgcatggcaagttggtttttgggtttcttttgttgcgcgtacatgggcgattctttgaggagatagcaaggaacaaaaggggtagcagtggccggttttcttcgtgttttggttctctaatctcctacttattttatttgaaaactagcatggtggcccacgcatattgcgcggctagcatcattatattttctgtcatataatagcatatatgttttctcaatgtattattcaaatatattaaaatgactacataattttaaattttgtactacctttacaaaactactaatgtataatattcatattgtattttatatatgtgttagttattaattatttttaatatcaaattttagttatttgtaaattatattcctatatggactctaggctcttctttcaatattatttatttttaattctgaacttttattatttataattgtatttctatgtggactttaaactcatcttttaatattctttaatttttaatttcgaatttcaggtacttctaaattgtaatcttatattaactttagactcttcttcccatatttttttaatttcaaattttagttatttgtaaattgtatttttatacgaactctaaactctacttttaattttattatgtttattccgaattttagttagttttaaattcctatatggactctatactctacttctaatattccatattttttaattcctaatttctattattttcttaattgtatttttatatggactctatactctacttctaatattccttatttttaattccgaatttctattatttcctaattgtatttctatatagactctatactgtacttctaatatttcttatttttaattacgaaattatattatttctatatggactctatgctctacttctattccttttttaattctgaatttcagttatttcctaattgtatttctgtatggactctagtctcctcttctaatattccttatttttttaattccgaatttcaactatttctaaattatatttctatatggactctagtctccacttctaatattccttattttttaattccgaatttcaactatttctaaattatatttctatatggactctgccttttctttttcttcgattaatgtgagaatttctaggccatgagagcgaacgtggaggcttccttttctatttctttaataatataatagatttcatattagtaaaatatttgtgtttgattacatggaagctagtggcacggctaatcagggtttgcaattttgaaacaggggcttttgccggtggggctaaagaaccgaaatcaccgaaatttcggtatttttaggccgatttttttttgaaaatttgatgtactttggatgaatttgaataaacttttaccaaattcacaaaaaaaagagaaaaaaactgaaaatttcaggagatatatgtgcttgctggtgggggcgaaattaccgaaatttccaaaaattcgtcccgaaattgcaatcattgcagctaatagtgttttcaaagatcaactagtttacaaacatcgatggtaattcgtagtgcagatggccgcccaacctgcccgagagttgcctccatcatttgggatctaagtgcgctcgcctaacatacgtggagagaaatagagcccgacagtaaaatatatcactcaatttctattaaatactggaggtgtgcaataaggagtgttaagatttcgggcaactaaatttttcaaaaatttaaagcgggtttctcacccttggatgatatatatttcaatggctctcatcaatcctctattatttatttaaaaatgactcttctttcatagataaaagtttaaacaacattttttctaacataaacatgaaataaatttgcaattaatattacaaaattaccggaaaaaatgttcaaacttggataagcataaatcaaaaccatttacaaaaaaaaaatgtagttcaaatgaacttaaattacacgtagcactataattttaggcttagcaatgtacaattttgggtgaaaattttcagacagttcaaatctagcaaatacatgtttctatttcaattaaggccagtaaattaatactactatacaggtagatgtaaaagttctgttgttactgcagatgttgatagtatggcgcaaggctggaaagtgatgaagaagcgagacttaagtttgagaagttgaccgagtagatatgccaccgtatgtacacaccatgtggagctagcttaatgacttggtatgcttcttcccccctggctagggtcactccatgaatatccacttcacaaagtaaacttttctgaccaaatggccagcgagcatatttcggcctcaagtttcttctgcagccgacatgacttcttgcttgtcgatactgctataatgcagaatcataattagcccaattcgttttttgatttctccatttcaatcagtaacacttaacacccaaaatcatacagttgctggatagcggtacattacatcacagtacttatcaaacatgtaacaccgaaggcattacgcaacattttatttccttgaatgaagcaaatagtttactttgattgtacatcataatacaaacaaaggcataacaaaacatatttcacaataattctacatataccaaggaatatcaaacagctaacacttcagacaaatgcagttcagcggttgtatatatatttgcagcctaattcacaaaggcacagtgcttcctgatctccccctgggcgccggtgagcacctgcatgttccccatcttcaccatggacgccgcgaagtcggcgaagaactccgccgggtagccggcgacgccggcctggcggaggatgtagcccctggtgaaagggtcgagcatgagcgtctcgtcggaggtgaagagcgccctgcccctggcgatgtgcctgtagtagctggtgtcgaacgtcctgaagctccccgggtccatctccaccagcgtcgtcttgtcgccgggctggcacttgctcttcagcctcggcacgtagtacttgtccagcgtcgggtcggccatcatcatgccgctgaagttgtacagccggctggcgaaggatgaacaatgggaggttccaagagtgtgcccacctgtgaacaatgtgtcacttctcaaattgcatatgcacatttgtgatgagttcttggtaattaaacaagtttggattgcaattttgccatggttttgaatctctggctatagctgtttgagaagagtcttagccactatagctccattaagttcgctatagctgtttgagaaggtcaatcgctaaatatcttaacccgctatttaaaaccatgaattttgcaagtgcacaaatgagtatggtgctgaacaggaaacgatgttttgaccactcgaataaagagctatgctgtgtttgaggataaagtggtcttggtctcctggcttggttctgtactgtgccatgtgattagaactaagaaccacatagttttgtacttcccattttgttgacttggtatgcgcatatgataccttcctttattaacaagttgtatagtaattaaataagtgatcacctttattggagaatgctactgggatatatcgggatcagcagagtgtttaaaaggagcacaggcaacagaaccgagagttgcaactttcagtaagtacagtataaatcatctagggagctagtctatgaagattaaacattgaagttagtgaagaatagtatatacctagcagaaccacctgatcctttgcgtcaaggccctttgggatgaagaattgatacaagttccgcgtggcatcgaagaaggggggagggaggttgttcacagcatcatccttcactgatcttgtcccatccctccgcccagttggaacttcccagtgaggccctttggtctgttgcacaagggaagaatagggacttttctcaactatagttctagttactgtaagcagcaagaaatccaatagccacgtagaatatggtgaaaatcaaactgtgtggttttccactattgtcggcctaaaacagccaattctcaccacttagccaaactatactaacttttctaactaaagaatgaactaagattaatgaacatggaagctagttcttaccaagaagacaacatctctggctaccagagcaaggatatcagcacaggacacaactccagggcaggcttgctccagcttagctttgacacggtctattgtgccaaaacctcgcagactgaggtttggtattgattccttctcagatggtgatcctggtgtgctatccagaagtatagagccatcgcaaccctgcaaaacacatagaggcacatagcttagtaggataaactcaattcaaaatcaaaacagctcagagcatggtaagcagtatgcatacattcacaaaacaatcatggaaatgcatgcgaagtagagggcctgcgagacttggaactcgggatatgatcttggtcatctcatcacgaacaatgacctctgcttttggacatgtgtattggtaaaagccaatgtttagccctggtggattggataatactaaggagaactgtaggacaagagaaaggacaaatccgaagaggagtctgtaaggcatgttgtgcatgactactgtggaaccactgcctatgatgaaagagttgccttctatgattgttgaggcaaattataacttgcagcctgctttatagctcagttgcttaggttgtactatagtaaacaagtgacataaaccatttcccacagcttcattttatttttcctaatgcaacaagcagatggtctaagacttggagatcgagattttacaagccctatgagttgtgtgcatgtacttcaattgaagaatacgcaagtcttggatcaggcatctagatagtattacctggtaatattgcataattagttggtggtggtcatccttcgtggcttgtgcacttgtgagtaatacaggctcttgtattgatgaataggtcacgacatgttgctaaaaggtaatactctctagctgttctaattttttattttaaatattatatgggttgaatttattctggtaaagaagttcagaaggattcaaagatatgagataatatatcagtttatccgttgtcgtttgttccagaggaaattgtgtatgttcatgcaaagtggaaaagaaagaaaaacaatccatttcctgttttgttagtatttaagggaaccagggaatataatatggttgcctcgctatgacattatcactgctagtttctcttgggattgcatctgaacactaaaggaactgcccataataatttcttaactggcaccagtcagttaaagtaaataatatcaaagcaacaacccattgtttgatgaaatcaatcttcttcctttgaaattaagttgagaaaaaaaaaggttgcatgacagttgtgctcgtgtcaatgaagcaaatcaagggagaaaagttagaagagaatcaacatgatcactgctagctaattattgaatgccaaacgggtgcagaagcatctcaggcaatgtgcagatacttcattttgaagcaaaatttaggtttgatcaagcatataaacactctaagaaagatgagaacatgatgtgcaagttatggaaaaagattctctatgtttgaataaaaaatgcaagagtttgtgtaagtaaaccttcagtgaatccctatcatactgagaaaatcggtccattggtcagatattagttgcagcctttaagttaataaataactgctgggctcaagataaccttccgctgagctctccagagaataataataaaaaaaaggtgaaaacaagtcaggagtagtgaacagaaccaatggtggacaccatagtgcgtgggggtacagatgcacccctaaaacttgaaaaaacaccaaatatataggattacatgtacgtatacaatgtgcacttagataagaatcccaaagtgttaaaaattttgtatgtaatacatgtcaaactttatttttctttatttttttagattccattggtctttatagggcatattttaatttgaaaacaaaaattcaagattaaacattggccattgatttctcagaattatattcttaatagctataaagccaatattttgtgaacgcactttgaaatatgaatctatgggcacaaatttcacattaaatatatattaattatattaatttgattaattgctggtcaaaatatacataatttgacattttgaaatttaaagatgccctataaaaaatcaatgcaggttttttttttctgtctgttgtaatggaatcatggaattttctctatcaatattccatactatctactagtgcatcattacatcttcacccctattgtcaaaatcctgcaccacaggagataacaatggtttaagtgttcactaccacatggcttgggcaatgtattcaattactcttggagtaactgaaaagtgatgtcttttggttgttcaagaattcaagtctaagacattcacagcaggtaaagaaatttttagttgacctagctcaaaatgtgtgcttcactcaaacagcaagggagtgcaggacagttttgaccatgaagttgttcaacaatggtggacattgacaagttcgaccttttccataggaattaaacagtactccaatttttacctcatgacttgttcatgcacataagaaaaaaaatgccaacccctttagtcatgttcagcagcaactcacagtctagttaatacttaataaatgttttctacgatattcttataggacatcaaaattgcttttaaaagagaagggttaatatcccataattattctgtctaatcaacgttatgtgacttgcaaaaacacatctacagtcctaaacaattatgggactaattaagatttaaagcacagtaacaattcagaaaattatttatcaaggaaagtaacccacagaagtcagatgaacaaaaaacttacactgaacgaacatgatggcaggtgaatttgtgataggtcaataggtcatgagctattcactgtttaactgaacaggcagaaattggttaactctggagtctgaactctgaagtgtgttgcggcttgtcaaagtggcccagaatttgaggttcatctgatgcatctatcagtggctaaaaactgtgatacaaatttcttgcagtggaaaagtttctgtcatattcagatgacactgaaaccaacttcctttccatctgttgtttcatctattacttctctcgtcctctgtgcatcctcccatagactacattctgcatacatgtttgcaagaacagcatagtttacagaactcccaggatctatactaaaaaggttcttggctgcagtttctccaagaagcatgtttccatgcaatttacaggctccaagcattgcacccagcattgatgagttgggttttaagtttgtcttctggacaagtttccatgcatcttctaactggcctccacgagcaagaaggtcaatagcagagctgtaatgctcagctcttggatcaataccatacctgctcatcatggaagtaaagtactccatccctttgtttgtcaaaccacaatgaccacatgcagatagaagagaaaggaatgtcacatcgtttggcctaacaccatcttccaccatcctattaaaaagagtcacagcatcttctccagaaccgtttcttccacaggcagtaataagtgacgtccaagaaatcacattccgatagggcatttcatcaaaagcacgcttggcatctgaaaattctcctgcctttgcatacatatcaaccagagcattgtccaatgcaatatcacccataggctgcttcttgcacatatatgcatgaatttgtgtcccaaatcttgcagaagcaacgcttgcacaaaggcaaagcactgagcttaatagaacaccatcaatccataaacccttccgatgaattttacagaagagctccattgcatcttcactgtagtttctatccatggtgtacccactgatcagtgcggttgatgacacgagatctggttcagagatggaatcatatatcactcttgcgctgctcatactccgacattttgcgtaagagttgataagtgatccgatgacaaccttttcatcccagtaacccaatttgatgatgcaactgtgaattagctcaacattgacagcaacaccgactattccacatgcttttagagcacttccaagcgtgtaatggtcaggaatcatcgctgtcaattattttgatgtaaaaaaaagaaagcactttcaattttagtgccaataccatcagcaaaaactaccttgcaatttcatgctaggacataataggcagcatgattacaggaaaaatgctcaagattgttaaagcaaaaggagggacggcataccttctttcagcattgaagagaataatccaagcgcatcaccgtcatgcccgcgttccacaaaccccctgatcagggcattccaggacaccacatccttcttccccatctccgcgaacagctgccgcgcatcctccacggacccgcacctcaggtgcatgtccatgagggcgctctgcacgaacatgtcgcccgcaaacctccccttggcagcgcacgcgtgcacctgctccccgctcctggcgcacccggcccccgcgcacgcgctggccgcgctcccgtacgtgaactggttcggccgcgcgcccgacgcgcgcatgagcgcgaacagctccagcgcctcccgcgggcgcccgttcctggcgtagccggagaccatggccgtccaggacacgacgctcctgtgcggcattccatcgaacaccttgcgggcggcggcgacgtcgccgaaccgcgcgtagaagatgacgagcttggtgctcaggtgcaggtccggaggagaggcggacgcggcggcgaccctgccgtggacggacttgccttgccggaatgcgcaggagctgatgcagcactggagcagggaggagtataatggggcggtgggtttcgcccccattaggagcgccattcgcgcgcgcttttctccctcctcggagcaattttgatctcccgagactcaacaattcatgaattcatgaatttatggcagggtttggcaatccaataatatgagcacgaaacacaccaggagcaaaaatctgaatatatttagattcagttctactaaccggcagtagaaatgagcagctgcaaatatatttttcatgcaaaagggctagaaaactgaactatacaaagttggcttcaatccataaatccaataaaggccttctgaagaatcaaattcagtcataccaccatcagttatccatctagcacatgaaaatcaaagtgtgaaaaaaaaggtgattggataaattaaacgtaccgttatgattcaatagcatagaagaaagattaaatggagaagaagaaaaaatggagatgaagaaaaaattatgtgcttttgcagattggaaagcagacaaaagggaatgaccaaattttttaggctgaagagaagaagcagaaagagataggacagaggggacgacaccaaaaacagttgaactgcagccgcgcagggacgctggtcgctggagccggcgaaggagctccttggcggcggccatggcgccgacggacgtgggtggcagcggcggctggagtaggacgcgatggttgggattggggaatggccgaatgggccctcaaccatttttgggcccaaaccaattttttttcaattttgctatatctcactcgaaagattttttcttatctctcactcgattttctcacttaaatttacagtgcattttcttgtaagttacagtgtaatttatgaaacttacattgtaacttttgtaagttacactgtaatttttgaatcttcgcatgtaaattttaaattttgtattggatttggtctttttcttttttattggatttggtctttttctcgaggatatggtaatttagtgtccattatggtgtttcttaattactttttactttttattatatctatcggattttaattcaaagattaaaaatctgtgtgatacgatcatcaaaatctgtgtgatacgatcatcaaaatctttcgaaagatgtataggtactcccattttttttaggcaccaaaccgcaccagcccaattgtgaaatcaaccaacaccattagaattccaagcatcagaagccgtaaagactgaaatgcgcatgaaatcaacaaacataccaggatagataaccaaaccaacatcgacaccccaattccaagcatcagaaaccgtcaagcgcaaacagattgatcaacaggcacgcgcaacagtggccggttacgaccatgtgagcaatgcacaaacagaatctcatctcggatcaaacatctcagaaacattaacagaagtagaatgataatatcatcgattggtaccgatgcacagtgaagcaaattgtactagtatggataatagtatcaacacaacttagggactctaaaccagaacacaacacaaccatgacacgatgatatgacagacgagcggcataggtataatgaagtccaatgctgcaccacagcacacgctcagagaccaccacggaggcgcaggacaaggtgcagggtggactccttctggatgttatagtcggcaagggtgcggccatcctcgagctgcttgccggcgaagatgaggcgctgctggtctggagggatgccctccttatcctggatcttggccttcacgttgtcgatggtgtcagaggactcaacctccagagtgatggtcttgccagtgagggtcttcacgaagatctgcatacctccacgaaggcgcaggacaaggtgcagggtggactccttctggatgttgtaatctgcaagggtgcgaccatcctcaagctgcttgccagcgaagatgaggcgctgctggtctggtggaataccctccttgtcctggatcttggccttcacattgtcgatcgtgtcagacgactcaacctccagggtgatggtcttgccggtgagggtcttcacgaagatctgcatacctccacgaaggcggaggaccaagtgcaaggtggactccttctggatgttatagtcagcaagggtgcggccgtcctcaagctgcttgccagcgaagatgagccgctgctggtctggtggaataccctccttgtcctggatcttggccttcacattgtcgatcgtgtcagaggactcaacctccaaggtgatcgtcttgccagtaagggtcttcacaaagatctgcataccgccccggaggcgcaggacaaggtgcagggtggattccttttggatgttgtagtctgcaagggtgcggccatcctcgagctgcttcccagcaaagatgagacgctgctggtctggtgggattccctccttgtcctggatcttggccttcacattatcgatcgtgtcggaggactcgacctccagggtaatggtcttgccggtgagggtcttcacgaatatttgcatgcctccacgaaggcggaggacaaggtgcaaggtggactccttctggatgttataatccgcgagagtacgcccatcctcaagctgcttgccagcgaagataaggcgttgctggtccggagggatgccctccttgtcctgaatcttagccttcacattgtcaatcgtatcggagaactcaacctccaaggtgatggtcttgccagtgagggtcttaacgaatatctgcatctggaagaggcaagaaaggattggaattaacataggtaaaaaaaagcagctggagaataagttggcaccagatcctacgatatcggtactgtcagctcaaaatagatgaacatatcaatcacatcatactacactacaattggacagcatcattaatcataagagcgctgctcacagctcacaccacatcaacaagcaacaaccaaaaatatcttcagataataacaaaactgacataagtaactacaggacaacagatctatgtaagaacacagaataaagccacctagttctagcatctgacagatttgatttgcacgagtaaagcaaataaaacgggtaaaaaaacacagtacaacatcagcactacagttcaactaggcaaagagccagatacaatacagattaaattgaccttagaacccaagctctacagttcaagtaggtgtacacgatacagatgtaattctctaacccagctccacacaattccaatccaaatccaggggaaaaaaactaagaacacaattccaatccaaatccagaggaaataaactatgtgtcgcctaactcaacctaaagattttaacctaacgagctattcatctattggaacaatatcagaacaatcccatccgaactaagcacaaataagtaaaactaaatctgatcacaaaactcaaactatgtggcaggatcaaaacataactgtgaactactcttattatccatcattagggtaatatatcgaaacaatccccatctgacacatcattagggtaatatatcgaaacaatccccatctgacacatcattagggtaatatatcgaaacaatccccatctgacagaacaatctcaaaaccaatccatctattagatcgatataaataacacagatccctacctcgattctcacgaaaccctaaatcaatgagagattaagaggattaccctaaaatcgcacgaaaccgtaactcgattaagaggtggatcaccctaaaatcgcacgaaaccctgagagattgagactaactcgcacgggatcctcctacgctttccaccacgagcatcaaaatcgcgagattagacgggcaccacgagagattcgaggattaggacgaggtgattgattagttaccttgacgaggcgattagagaacgcaaagcttcgctccccctccccttcggtcgattcgactcgctatgcgattaatggagagaaaacctctctatataaagcgtgggcaaggcggtgcgaggcagcatccggtgcggtcaccgccacgcgtacggcccaatggcagcaccacacgtgtccatgtagttggaggcgcgacacgtgtccggtcccggtacgaccatccagacggtgcccggaaccaactccgcgtcaggtcatgccgcctctctttgacgaagtcggcatgcctgatcaagaccgtacgtttccgatccaacgatcaggaaacatcgtacttgatctgctataagctgcgtgtgggccttaataatcctctggggaaatatttgtgggctgaaatgaacgggatattgggcctagacaaaccagggcccatgaattttacggcccaatagattgttgagacctaattggctaagcccaactcgcgcactctgaccaaccgatcggaagttgcgtccacgccgccctgctcctccgtcgccgccggctcggcggctgacccccgcgccgccgcaccagctgcgcgcgcgcgcgcgcgcgcccccaccaccgcggcctctccctcccacgcgcagagggcacgggcagaggccgccgcggcgccgtactcgccggcgcttcgtcggcctcggcctcgggtcgaggccggtggcggggcctcgtcagatcgccccccttcctgtgcagtaagtatttcccacggacccaatatggattcgttgttctaatcgatagctgctatcagagatgggttcttctgcgtgatttacctgttcttcacatcctctgtcgatatggggttgggtggggttcgtttcttgcgctaatgcaagatttgaacttgcaggcgtgctctgctgtgtgtgcgtgtgtgtggcaatggcgttgatgcggcggagagtcgggggctacatttgctcggagctgtgtggctcggttatgaatcagaggctgtactcttcgagggtggactggaagcagcttcggcctatgatcctcaagaggataaagaaccgggcaaaggagtatccaatcaagcgcatgattccagtagcggaggaggtagtcaaggctagagagattgtcaccaaaggtgtctcgacgctgcttcaagttgttcccatacattcatgcaagtaagggcgagaaatgtggaatttttatgtatttgtctgtttgtcttaacacttggggaagatagtatggctaaacaagtgttttatttgtagtagatcaacttcaatttaggcatgcactaaaaatgttccagaacatccagaaatggggcaacattacaagattaccagtcttctatagattaccgttgttattgtgtaccttgattgcatatagccatgattgcttttcttgccatgccaagttaagagcagctctctctgatgtgcatgtttgatatcattttcttgattcctgtcctaaaatattattgaatctttctaacaccttgtgtttctattctcactgaaggttttgtcccgaagttcatattggagctgtagggcatgagatgcaatcctgtcatggtttcaagcgtatgatcaagaaccagccgcataaatggggtccaggatgcttgaatgacatccttatccctgttgaatccttccacctggaaaacacgttccaggatgagataaaacatgaccagaggtttgatttccctcgtgtcccagcggtactcgagctctgccatcaggcaggtgcagatatacctgatgaagtttggcataggagtggcacgtcatctgcaatagtcagagaaaatgatgaaaaacctgctgcttttttgccagaagagcttagattcataggtcagaggacaatagaagcatgggaaaggcttagattaggtgtgacaaaactcctattggtttacccatccaaagtgtgtgagcgttgctctgaagtgcatgttgggctgtcagggcacaaggccagaatgtgtggggtattcaagttcgagggctggcgtggtaaacacaagtggaagaaagccgatgtggatgacctagttcctccaaagattgtttggcaccagcgacctcatgatccaccggttctggtcgacgctgggagagactattatggtcatgcacctgcggtcattgagctttgtatgcaagtgggcgcaagagcacccccaaaataccattgcatgatgaaggcgcaaggcctagcaccgccaattaaatgaggccaggggatctaaggagttgattgccaaattagatcagcaccatgatgttatacaggaattgtacagatcagacatcaaaagaccaatgcagagaaactccaaggttgcaaatgttgtgattttgcccaagacattagttctttgaagactgcatgttatcagaattcaggaggtcagaactaacacaattatttatacccattgatctgagtgagagccctcagatgataacaagggaaaattgtttctgtggacaacttcgtgcatggtaatttatcgactatcagcattgttaagtattcagagcgattactttgctgccctttcatttgttcatcctccatcatttgccaagaatacgggtggaagggctttatgagcctgctgtttggtcttcttctcctctgcttgactactgtaacatcattggtttctgctgttttgtgtaaactttctcacattacctagacatccttataggcagttctgttataagttagccatgtagagacgccttgttgcaagctgcaacatatggtgtggaacatcacagaggaatgtaatatcacttgctgtattgtaagccctagtcaaaatccctccttgaagctgtaatctgtgtacagatttttacctggggctccttttgctgtgccaataattacagccacgttggctgattttttttttctggagataaatgaatggatggtgaagtttttgttctttgtatttgaagttgaacattacctcgagtacttgaccccatatgttgctgatgttttttcagttcaagtaatcttgtctctctatgaatgcatcattctggaaattaaagattacttggttggtatttgatgcgtctaacctgttattaaattttctctgcaaaacgtgtcactcaattgtacttcttccgtttcaagttataagggaactgttcactttgatgcaaaaaaaaccttaccaaaatttggatgccaaaattttggcaacttaccaaaattttggcaggattttttatatagttaccaaaatttagcagcaaactaaatgtagccatttttttttgtaactttaccaaaatttggtaaggttgaaaatgacatcaaattgaataggcccaagatgtttttgattttggtcaaagtcaaagtattttaagtttaaccaaatttatagaaaaaaatagtaatatttataacaacagcatagtaattgaataaattttcataatatatttttcttggattaaaaatattattatattttttctataaaattagtctaatttaaaatagtttgactcgtaacctgaaatgtatggagtaccatgtaaacactttttaccgtatgtggccgtaacctggaaggaaacattagcagaatttgcaaccgacatgatttccttggctaccaatcttccttctgcgcgtgcaattttggtacttccgtcagttccgtgtcgccgacgtacccggatagaaaccgtgagagccaagtttggcagcggcgtacgaggaggattctactcgcgacctgggtagtggggaccgtagatgcgccgtcggacggccgagatcacgccacgtctaacaacttatccgacgtggactccacgtacgacttggactcctcggcttgaacctttcgcgtcccctcataaatacacgcgaggaggcgccccctgattcgtgcaatgcaaaaaacgaacgcgaagaacacgaatcctccggcgatctcgagcgcaacgatccccagagccaagaaacccgccgctgccgccgtgtcgccgtcgtcgaagttggcgagcagcaacaaggtcaccaaggtgtcgccgccgccgccgcagttgtccgcgctgtgggccgccgcctcgtcgtccgacgaggaggaggaggccgtcgccgtcgccgtcgccgtcgtcccagcgccgccgccgccgcagccggcgagcaagaagggaaagtacgtcaagggccgcgcggcgtccaagaacaagtaccttgtcccccgccgcggcgaggaggatcaggcggcggagggcggcgggaacagcggcagcaagttgatgtccggggcgccggaggagttcggcctgccggcggggacgttcgacgcgttcgcggacgcggagggggaggacgccgccgcggccgcggcgccggcggcgactacgtgcacgtccgcgtgcagcagcgcaatgggcggaagacgctgaccaccgtgcaggggatcggcggcgagtacaactacgccaaggtgctccgcgacctcaagcgggagctctgctgcaacggcaacgtggtggaggacaaggagctcggcaagatcatccagctgcagggcgaccaccgcaacagcgtctccgacttcctcgccaaggccggcatggtccgcaaggacaacatcaaggtccacggattctaagtccagagagatcgtatatcacttgggttttagtataggttcttaattatcagttttgattagtataggttctggttcagtttagcagtgtgtcgtgtctgccgtaatggcttgcagtcgtcaggttgatcatgttaagcctcatacttcttttccgtattggtgtcaatggatgattttaagtatatcttgtttgcttactgttctctgaatacgtacttatccttgtgatgctctgcactttgcaacttgtgacacagatgatttttactggtgacaaaaaaaaattaaatactgaaaatatcgctctgaacaaatttgttggtgatacaaacaagtcaataatttcagagatcagcgtagtcgaagtcgtcgtcaaaatcttcgtcgtactctatctcacttacgtggctatgataatgtggtattgagctccacgggctgtcgtcgagcacgctccggaatcggctccgtaggaacgtgacggcctcccatgccgccatctgcttcgcctcctgcaccgacgacccgacctgcgtgaaacgcaagcaatcgcggttgagaacgttgacactcacggttacggcatggtagtcggcggcgccatcatcatcggcctccgtggtcgtcgtcgacgtcgtacgacggcggcggcggctagcgctgtaatagtaggttggctctttggttgctcccatgccgttgatgacctcccatagcagcagcgtggctccgaactccgtcaccggcggtggcaccatgctggcttcgacgcccaggtagcgctagctgcagcatgatgcactcccatggcgacgacggcttatggggtttttgctggtatctacggaagcagctggtccgcatgtcgtacgattgcaccgaccgcaatgcccaggaggagctgatcaccggaccatcaccggcggcgacggtgaccaccatgttcctctcgtcgtcgacgtaccaaatctgattctcggtgatcttgccgccggcgccggacgacgtgacatcgaacgcttggcaagaagcgtcgccgatgaagagcgcgtggccacgcagcctggggattctcgtcagccgcgtcttctttcgccaggatccccacgtctcgagtcgtgctcctcgaccacgtacaccttgaatctagatgtgtggtagcgcgccgcggcgcggccgccaccggtgtcggggacgcgggctctgccgaagtctctggaaactactagaaccttccccatcgtgtggcaggcaaccaggtagaactcggtgcggccaaacgccggcgcctgcttgtcgacatgcgtccaccgccactggtcgctgggcaagtgcgagtagtgctcgatgtccgcgtcgtcgaaggcgaagatctcctccgcttcggtgacggcgtacagcttcccttccaagaacacgatgtcttggatgtagaacaccctgctaatgtccgaccaagcattatcatcatcatcgggatgatgtttcttcttcttcctccccgggaggtggcagacgaagatcttgcctagccgcgccacgaacctcgatcgggtcggcgcgggcgatcgcagctaccgtgatgccgccgccgccgtcgccgtcggcggcggcgggggatgcggacatgacgaccttggtgatggtctctgggttggtccacatcggcagcttcacggtcgccatggtgaaagggttgaggaggaagggctggtagggaggaggcgacgacgtgggcaccatcgccagccagttgtcgaacgagccccggcagacgacgtcggtggcgccgccgtggaggctgcagacgcggtggatggcggcgtcgtggaggctgacgcagtggccaggggccacgagccacgggacggcggggcgcgggtagtgcgaacgctcggcggctcgccatgctcggcacacggcggcgaagcggaggcggtctcccagggcggggagcctctgcaggacgtcgcggagcaggtcgtcggggaggtcacaccacaactgtcacgccccgagctagtcccgaccggaactaacccgtgacgctccaaactaacctgttaatcgataccagtcccaggaaacagtgctggtatcacagggagacagaatatcacagcaacagaagtctctttattatagagtagaagtacagtcatgttgggctgcggacagatcccgagctcacaactgcattacaaaaggaaagcggaagccaggacttggaccaaacaatcacaggcgcgacttgggaactaggccgaaaccctaaaactcatcgtagctggcttgctcctggaagaactcctcatcagcaggatccgcttcatcttcttcagcaactgaggggggatatttatatagagcaagggtgagtacgggagtactcagcaagccatggagaaataagtgtttaatgctggcttcaaggaaaggctgttgttttgcaattgattttatttgaactcttttctgaaacaactaagtgagtgcttctcaaacgacacggttgagacagtgcgtttcgtccggtcggagtatgtgcaatgtatcaatctttaaaatagatcaagattggcacccggccaacagctttcaaacggccacccgggccaacaactttcaaacggtcacccgggcctagctgatcccatcagctgcagattttccaaacatcgatctcctttccacaacagcaatttcacaaacagtagtcaaataaaactacactaggaatcacctcacatccgcccataaccgtgggtacggctgttcgaacagttagttaacctctgcagagggggtacactttacccacacgacattactaacccggatcacccagcccgtggggatcagccacgtcgggagacctccaagctttcatgacaaggcatttccaaagccgacacaggtttaccatatgccgacgagaggggtcccagaccaacaacaggttaggtcccagaccatactgtgccaggaagcccaggggtcctccccaacaccaccccggcgaatccacatgtctctcggcatcaaggctcccctgataagctagttactcagccaggggtgtcccattccacccatgtggtcgtacttgtcttatgttcggatgaaattccaagggaacggtccttaagtgcaagagcgggaaaccgtacacccggtacgttccccggtccgcggttttggaaattcatttagttcgcaagcaccgaccccaggtgtcgggttttccaagccttttgtaaaacccaagttttacccaagatgtttatcatattttaagtttgaaggcgaccgtcgatactcgcacagagtgcacgaataccgaagcgtgactgggtggctataagggaacatggtataacaattaacaaaggaaggatcagatgcaacaaattaggtaggtctgccaatctgccttgcagacgggacaagcagatcaagtgcgatcctatcaatgcataatatttttcaagcaacataattaaattcaaatataggctcaagatgttcaaaggtggcttgccttgctcgagatcttgagcttgatcctcgaaatcctcgcactgcgggtcttcgggctccaaaactacgcgcaaaacgggacaactcaacaaacggcgaaaataaagccctattaatgacctctaagcgtgccattagatagatctcgagatttgaggaattttggaagttgaacggagtcaaacggatttacggttgggaagatattgaatttctaagattattggatttttggtctaaaggaaaaggatttaattaaatcctttttgaaaaagaaaagaaaagaaaagaaaagagggagggaaattagacttccctcgggcggctagggcgcggcccgagagaaaaggggcggcttggccgagctaaatgggccggccggcccaaggcggcccaaggcacgcgcgcgcgggaggggaggagagagagggccggtggaccgggtccatcccgcgtggtcccgggtgggacccgcttgtcaacgactcggctcaccgtgcggagggagcacgcggcgtggcgctaggatgggggaaagacgcggtgcacgcgtgcggttcgcggaggacgcggatgcggcgggcccacgcgcagcctcacggctcgcggtggaccatgcgcacgggggaaaacggagggagcggctgccggtcgcggccgaggtggcgccgacgtggcgcctacgtggcagccatgcgggccggcgggaggtagacgacgacgccggccggaacggacggcggacgacagcggcgagcggcggagcgaaccacggcgatacaggcaaaagcgagcacaccgggtggttgcacgagacgaggggagacgagccaacggctcggattcgccggagggagcttgacggcggcgaattgcggcggcggcaaccggcggcgagggaaggggaaacggcgacgaggtcacgaggggccgattcctggcggcgagagcatctacggggctacgggaatccgtcccttgcgccggattgggcggagctgcgccgagcgaggccggcgacgagcggcgcttccgagctcgggcggcgacggcggtgagcacacggcgagcggcggcaacggtcggggcggcgccggctagctacggggaggctactcgtgctactacccgagtctaaggggaggagatggagcgaggagggagaacggggagatgcactaccatgcgggacgaggcgcagtgacgagaggccaacggcgcgggagtaatctctccggcctcgggccggggaagaggaaggagagggcgcgcccgaagtccccttctgcgtccacgaacgcaccggctctcccggtgcttggcgatgaacggcggaggcgggacagagcacggaaggcggcggcaaaggcgcggtggcggcaagcgaaacggggggggggaatcgatgggagggcgccttggtttataggacgacgatgtcggtttggaaaccgaccttgggcggtcaaggcgcgagctggagctcagcgctcgcggccaaaacggtgacagaggcggatgacgccggcggggaggggaaaaggaaaagagggagagaaaagagggcttgcctc

SEQ ID NO: 5207 - DNA, 23898 bp, Oryza sativa
actgtgccccgtcatctcgcaaaaacaatgaaatcaagtgaagcggccggctagctatgatatctacgtgcaggtgcatatgcatcacatatatgcaacaatataatcggattgggaactctaaaagcaagcgttatacttggagagcaagaacgtagagcatgctgctatcatgctactccgtgatcccctctttatatactatataagacctggccttttggtttgttttaagtcgcactttttaaagttgatcaacttaatttatagaatgaatgtagcaacgacatttcttaaaaaaaacaaataggctgtaaaaaattcaatggtggtgatgaaactaattttatgttgtagatttcgatttttttttataaaccttatgtacttaaagaagtttaactcagaataaactcaaaatatcttatacttcctccatttcacaatgtaagtctaacattttccacatttatattagtggtaatgaatctagataaatatatatgtctagattcattaacatcaactagctgggtggcccgcgcaattgcgcggctagtacccaaacaaaatcatatatttttttagtatgattttacttaaaatttattaaatagctatctcattgtcttaagattttgaaagatcaaaccttatcatcctcgtgtttctaattatatagtttttaaaagtcacaccagttgctaccccttatgtcatctacttctttatttgcttgctcgatctaccaatatttctattcattcttcttggaacctttaaaaattggattttatagtttttagagtttattgtcacattgggtttcatttttataatttctagatgttccgtcaaacgttaccattatactcctgtgtgacatgtccactgtctcttctctttattgtcattgagattttaaaaattgaacataattatcgtttgggttcattttttactttctagtagtcccgccaaaccgtcagcggctttgctattgtactcctctacggcttgcccgttgccttccttctttattgtcattgagattttaaaatcgaacatgataataattgttttttttttactttttagaagttctgaaccttaaaaaattgaacttgtagttttattttttataatttttagaagtcccatcaaacgatgccactatgctcctgtacagtccgtccgccacctactctttattgtcattgtgattctaaaaatcgaatataactatcgttggaattcattttttattttctagaagtcccgtcaaccgtcgacagctctgcaactatactcttatgcaccccgcccgctgcttctcctttttattgtcattgagattttaaaaatcaaatatgattatcaatgggttttttttactttctagaagtcccggcaaccgccttacttgtttacttcacggtctgcctgatatcccttcttttaatcattattaggattcaatttggtgttttattaacaatttttatatgtcgtaccaaccgccaccactctactcctttataggcctgttaattaatttatctcgtcatgtgttttagatggtcttttcttaacaaccgacaccttgtaagcttcgatgcctcgtgagcatggactcgtttcaatgatattttttccgtattgaaaatccaatttgaaatttatttcatattttattataaatataattaatctcattttgaattttagatggtctgtgtaaaacttataacctataagccttatattttaggcttaactacattaattaacactaaattatgctccgaggtgaatacagctccgagctgaatacgtttaaaataaatttacacgattatgattataatttgttgtcagttgccaatgtggccggacgcttctgggtgggttgcatgcattgctggtctggaatgctggttgcagctttgctttgtttgctttacctattgggggcgatggtaatcaactttgcttgtcacttgttctgccgcagcagcccaagtatatctacttcatatatctgcgttttatatgtgcggtaacaatgcatatatacttgcgttttggaatcataacaaattctgtaccgtattgtatcccgcttgaatttttgataccgtatagtaatccaattggatttttctaaacggacaggactttttaatctatatcaaagctctataattctttattttttctatagcaaatctaaaccgttgtaatctaaatctattataatccaacggtgtataattttctctttttctccgattaatgtgagaatttctagcccccacagtgaacgtggtgccttcttttcgagctgtcttaataatataatagaagatatgaatgtgggaaatgctagaatgactaatattgtgaaatagagggagtaatatggaacgaaggggattgtgtgatgttgccttaagacaagttggaccactaccttgagttatgtgagaaaaatcacacctctctacgcgtggtattaactaagtacgcgtaatcaaaaaataatataaatttcttagggatatatatctatcgtgagaaagtactatttgtgtccctactaaagatatcatcatcgcaaatgggtgataatataatcctcatttgtaatgggtatccactagagtataagtttggatgtccatgaaaatgaccttgactcgagactttaagctattttcacagcttatgcgagaaaaatcaagctcttctccgtgtggcatcaactacatacgcgcaatcgaaaaatcaatggaattaaatttctgggtgatgtgtctatcgtgagacgagttataattaatattggtgtgtagtgtggtcttgaaatttgagtgcatcatttgatccagtagagtttaagtatgtgtgaatatgacttagcttcaagacaagttgggctattttctcagcttgtgtgagaaaaatcacacctttctccatatagcactaaccatatggatgcacaatcgaaaaaaaaaatattgatactattcggtcaacgtatatggtgagaagaagtatcataggtgttgagttaagtttaagtatgtacatcacttcatccattagagtttaaataataaatatataagaatatgcgttggctcatatgacataagtaatacttctagaataaaatacgtcatgtaataatatttaattttaagtgtgatttctcaattacatggaattcaactagtttaaataaaatataacagggaaacttttaagtttctgctaacaaatgagttactgaatttctaccttgcgagtttgcgaggacaatgtatagaagaattatatggatagcgccacacaagaaaactcatctaatttccttagtgtacgtactagcacctgtttatatataacgtacgaatccgggactagagagtcccaggactgccgtaagatagggagcggcagtcccggttggtccatttttctttttttttttcccttccaaattgagtgagatgtatatacctaaatcaaacaccagatccccaaatcgtgtgctatgcatatacctaaatcaaaccccaaatcaacgtaacatcccaaatcattcacatcacaaatacaaatcctaagttacttacacacaaatcaactacatcacaaatcttaaaaaaaattacacacaaatcaaatgcatcatagatcgattatacatatcagatccatgcaataaatcacaaattgtaataaaagaaattatacatctcttaatcacaaattattaaaaaaacggagaggagaaccggcgcgttgcctcccgcctgctgccgctcaccacggccggcacgctgtcgccccgtgcgcggccccgctggccgccgccgcgtgctgccccaccacccgctagccgcttgctcgccgacgctgcccgccagatgtgaggaggagaggggaagaggaggaaggggggaggagaggggaggggaggaaggaaatacgagggatagaaggaggatatgatcttatctaaatattttggtgaggaggaaatatcatctgggacttaaccgatcagatatggagagaaatatttacttccggttggtagtatcaaccgggactactttagtgccgattgatacctcagcctcctgacatgcctctgacaggggtttgtgttactaaccgggactaaagatcaaaatttttataaccgggactaccggttcttattggaaccggtattattgtggaaaacagccgatccagcaaagatcatttttctagtagtgtagttttatctcatgtcaaatttatattcgactttattcagttaacgcgttgttaattcgtggtcgatcgatctagtttgtaggtgtagctgccgcaagataatatgcacaagcacatggatcagattaatagctgtcgttttaggcactacgccatttatgtggatcaggacacatgttgcaacttgcaagtgacatgaccgcaagtatatgcattgaactagtctaaaaataataataataaaaatagtctaaaaaagtagtatatgcattgaaccagtcaagtaaacgcaagtaaactaggtactttgatagtctgattgacacagacatatgtagcaactaaccggagtgtgtatggggcacaacgtacgcattcaaaacgttgggcattcaggcatttcagggttatgggtcgtaagtgaaaaaaaaatgtgaccactaatggaaaaacgcagttaatttacagcaagacttttatacccttacctttagttagtggaccaaaagatatagctaagtgataaaacgatgaaaaattcccaataaatcctaagagtacgctttaaaactcaacattattaattgtctttgaaacaagcaagcctaatcaacaattctgattttttttttggtggatggcacatggagcagtgttgatatgcttagatcgaggtcgtgcgtttggcggcgaccttcgtgagcgtggttagcggacgggaaccgcggcaggatgtggtgtgtactttgtggcagtatccttgcctagtcggctttgatgactttggaggtggtaatatctaggtcaacgactgatattctccgatgttactccagttctatttaggttcgatgtcagatgtgagcaaaattcgattagcacaataatcagccgctgatttcacagaagataaggacttcatacaacacaaaattcgattagcacaataatcaaccactgatttcatagaagataaagacttcatgcaacttataagccattgagcagaaacaacgaatggctatgtagattctcgccaaacatagattaaagtttagcaatacctattatctttatcttaaggttggtatttttaattcgtagccattcgatccagccacaacctacgtaataattggttatagcttctttgtagcatatgttgggatgaatttcattttaaaaaatgtgtattgctagattccaagagcataaaaatttgcgaaaattaggtcacctaaaaattacacattcataagcctaaaactgcatcggtatgcaatatacaattttacttatttttaactataatattattcttatatatagttttgatttattaatttgtatctgagcttgagtacttctaaaaaaaaattaaatctttatctttcatgtagtttggtaatatttattttttaggttagaatagtttacaaagtagcgtgcctcgctataagacatgtcacgtgtgtttgtcatctttatatatgatatccttataacatgctttaaggcatgttatacttgagtatgaagtatgaatcttttcactcccccccccctctcttcttattcccctttcccttttaaaagttgccaactatgcaaggtcaattagcagcacttctctcacgcatatgcaagtagctagtagtgcatgtgcatgggcgactgacaaggagcattctcgtaagaataatcaacaccttatccctatcgatgcctatcgatgtactcgtttacttggaagtttggaagttcacttgccggttcttacattctaaaccccgcgtggtacgcgacgttattagatactacatatactgtgtacctatatgtttctcccactagctagctaattaattaatctctcgtacgtttctatatatataagtgaccgcgagatcgatccaagccacggtatgctatgagctactgaaacctacctagctactcaaaagatcgatctagcttggcgagcgtgaggtggtgaggtacgtttacgtacgtacgtatactcagcatggccgggtacaccgaaattttggacaccaaccatcacgagcacaaggtgtgcttggttcgcaaggacgaacctttcatttgctctggctgcaaagagctcggcttcgagctccggtacgcttgccacactgcgggctgcaaccatcagtaccacaggtcctgtacactgcagcctctcaacactcgcgtgccagctcccttctacaagcacgacttcttcttcttcaagtcggtcagtacagctggtgcccgttgcgaggcatgcgctgctgaggtctccgctctcttcattcttaattactaattcctcctggcaaggtttatgattagatatacttaagtctggcttgtatatatttatatttgcacgtatttcgaataacataaatacatatttaaaaaccaaagtaattttgaataagataaatgcatatttaaaaaaaatcaaaggagtcatccatcataaaattaagccggtgataatacctccgaaacatgagaaactatttttatcccttgagggatgttccctcattgtttatatgttacttatgttacttaaatagttatgaaaaaaattgagaagatatattaacatgtgatataccactctacaaacatgtaagtttaaattcaacttatgcatctcgcaaaaaaattaaattatagctagttaacatatattcacagtcaattttattttttttctttgctagatatagaaattgaatttgaacttgcatgttcgtggagtgatatatcacatgttaatatatcttctctttttttttaaatttttttcataattatttaagtgacatacaaacaacgatgagacatctcctcgagttatcagaatccactcccccgaaacatatgttgatgtttctttccttggatggcgaggcatgcgctactgaggtcctcgctctctccattcttaatacttccttccggcaaggttgaccttgactgcaaattaatactctctatgactttttagtaaagaacgtcgttttgattttttacatagatttcatcatttgacttattaaaattttatataattatgatttctttattatggtttggtttatgattacagttacttaagtatgacttgtatttttacatatttgtacatattttgaataaggtaaatgcatattaaaaaaagagacgtcatccgatccattgtaaaagccggcgataatacctccaaaacatatggagttgtttcttttctttggatgtccctcgtttcttacatatcatccaaacaatataaattatttttgacaacattaatcaatatgtaatatatatatatatatcattatgtaaacatgtaagtttaaatttgactcatacaagttgaaaaaaagataatgaaactaactagcaagctagtgtattgttcacatattcacagtcatatttattatttctattccaacttaatttgtatataggttgaatttaactttaatgtttctgaaataacataccacctttgatctatattattagatatatttttttatttaagatggcatcgaagaaacgatgccttaaggagaaaaatgactttccatgaaatatatatgtattcacgaaaatagtattagtagattttttttcctcaaaactactccttcaatttaatcttttagaagaataaagattaaaaggtgctagccatatacattgagaataaaaaagttgagaagatatattaatatgtgatatatcactccacaaacatgcaagttcaaattcaatatagaagttgaatttgaacttacatggtttaatttgtttttttcgttgcgaggtgtagaagttgaatttgaacttacatatttgtagagtgatatatatatcacatgttaatacatcttctcaaattttttcaattttttatagctatttgggtaatatataaataacgagaggatatcctctcgatgaaaatagtttcccagtagaaaaccctttcccgccgttaatttacaccatgctttaggaagctcgcaggtgcgaggttacgtgtactactgcccggacaagaaggtcagcctgcacccttgctgcgcagatctcccccgcgtgataaccaccgagacggtgcagctgaaactggagaggaagatcaccaagaaatgcggcatgtgccacgagcggaatcaggggagcttcagcaacccatgggcctacgcctccagcgagaagatgatccagctgcacgtcgcctgcgtccggaaagctctcgtttcgcagttcgagtcgaggctttacggcgtgcaaaagccgaagatgctgctgccgccgccgcctgctgctggagcaagcgctgcttcttcaactagtagttcgactgccattgtggaatgcaacagcttccccgtgctcgaggtggataagtaccggaggaaatcggccgggttcctcgatacgttcaggcggatcgtcagggcagtcatggccatggtctcggcggtgatcaccgggaaccatttggagatatacatggctttcatagaattcttcaaaccgaactgagctgacaacatttgcatctttgcggtttggagctcgtgtgtttgtgcgcagcaccagtttctccctttaaattatagatttgctttcagaacttgaaaatgggtttgggtggtgtgtggtggttcttgcaagttgtaataagggggaaaaaaaggaacacatttgttcgtacaattttcaacatatatgtataagacgatcagtttaactggataaggtggttgtttaagctgcagagatgtttttggattttgagttatgacaacatgcaaatgattttccgaatgtaaattataattaaattttctttcagaacttgaaaatgggtggtgtaaaaaaaaacatattcttcatgcaagggaaccgtgaatagttcaaagtatagctcaggtgacatggtgcgagggtgttcgcccagtcaacctgggtcctggttttgaatcctaaatcagacttgtcgggcctgttcactttaatgtcattttcaaccttaccaagttttaataaagttgccaaaaaaatggctacatttagtttgtagctaaattttggtaactatataaaaaatcctgccaaaattttggcaagttaccaaaattttcgcaatgccaaaatttggtaaggttttttttttatcaaagtgaataggcccgtcatctcatggtgtttcttgtaccccttattcttaatacaaagatagccagctccgttattcctctttttttttttttgaccaaacgttattcctcttttgtttccaaaaaaaaaaggaagcgcaatctggcatacatgcatgcaaacacgaaccacttaacagttggaacatctgaaaaccccggccagccagatgctgaatcaactgtcgatcatgccgctgataggatttcgttagaaatagatacacacacatatatgcatacactgatacacaaaagcttgacctggagaatcaggccagagtatcaggttgagttgggactgtgggagctagtacaatcacagagtcgttctcaaaaactgtacaatgaagtagagaacggccaggaaaagcgcaatctggtacacatcttggttcaatccatcatccggcctttggaagaactgcaatattgaacacaaaagctcaaaaagttgaaaacactatcactggatagctacagataagtgggtgggtttatataaagtgacatcaatttttgcaatgtatgattcatgtaccttagtaggatcccctgagggatctggataaacctccaagttctcatctttctttgatgatagccgagatgctgtaccctttgcagcttcgattgtgtcctttccggcttcaacagtggagaaggccctcctggacaaccaaaagtaggcctgggcaggaggagacgaggcagagaggtcccatgagtcgacctgttcgagcacttggccgctaatctggttcaatacgaactgtgaggtaacagagacgatcaggtctcctccgatggttgcgaagattggattcttaggtttgcctctgaatgtccatttgatggtcaggttgcttgtcgattgcattgacatttcctggactgtctgacgcaataacacgaatgctgattagatagtcagactggaatcaatccaaactcatgagcatgccaatgtgaaataaggagagaggcattctttgtttgaatttgaactgacaaagtcctttttcttttggacagtatgttatgcaacttgtttgggttagatatcttacaacagagttctaacttcatggatatggtatagaattgcagcaatccttaccactgtagggttttcgagtgccttggtgatccacaatggcctcttgtacttctcccgtccaacaaatgttctgaccgggtcctgaaaaaaaaagaaaggcacgaaaccacaaggtgatgtcaagtagctcatcagttattgtatctgcatctggacatcctaatctgtcactagttcagtagtttgtttcttgctgttgtttgagtggtactttcgttgctattcttcttaatataaaatcagcatcagcctggctaaaacttctgaaaatggaggcatgttacctacttaaacattcatcagatttcctcggggaaaaaaaacattcatcagctaacagcagtattttgtgttggttcatagagcttttgcaagagcttctcggggtctactctgtgcctgaaactattcttgttggtgttgctaaaccttcggagcgaatacgcaaaagcgttactcgctgattgaaatggcatagctctatttttcccttccaagaaaaaaaaaacagatagtactgttaaaaaaaaaactacagatagtgtttgccacagttcatggaatcccatgatcatatcagactcgtagcttacatgtttgctagattaacttgaaaggagatgcaaagcattggtgcgagattggtaccaaattaatgtctgaattactgataacacatagtacggagtagcagtaaagtggtaattggtggtacaagggtgatgcgcacaccttgtatttgacggagacggcgtagcaggtgaaggcgcggttgtcgtcgcggaggtcgaggatgtcgcgggcgagctgcctcgcggtggcctccacgtaggggctgcttatgcactcgaagtcgttgcagagctccccgaagtccatcccgtccaccagcttgtccgtctgcgacctctcctccgcaccatctccggcagccgtctctacctccttggaatcatccacaactgcaatcacgcacagagccgggagttaattagatcacgtacgtgcgagctggaccgcacggcgagatcgcattggtgagatgagatcttcaccgtgcaggggggcgaggcggcgttggagcgcgggagcatggcggcgggagaggaagccggtgacggcggcggggatgcctcgccgtcgccgtcgccggggggaggaggagggggaaagggtgcgggaggagaagagagcggcggcggtggcggtggcggtggccattggtggcccatggcgcggtcggcgtggcgggacgtgaaaaggcgggaggataaggcgcggcgctccacggcctctcgttgccacatgtggcctccgctccattagccctggcccaacaactgctagtccattccatttctcatttctcttctatttttcctcaatttttttaagggaaaacaaaattggcccgtgccaactactataggtctagtattttctagtggactgccttcttctaggcccaacgaggaagatgtatcccaggatgggcatgactttcctgagctttcacgtgcctctagcttcgtgttttgttgaagaacacaatgttttcttatagaaactgttctagaaaatcatgcgtcacttatgtaattcttgtattctgccctctctgtttcatattcattttacgagttactttgattaagtatataaaaaatatcatagtattttcaacacaaaacaaacgtattattgtaacatattgaatattagatttgataaaactaatttaatgtattagatattgctgaatttatttataaatttgatcaaacttaaaaagtcaaaggtacatgtaatatgaaacagagaaagcagatgggactgcaaatgggagatgattttgtggatgaagtataggtcctgtttgggggagcttttagcagctgcagcttctcctagaatcttcagttgccagaagctcccccaaacagttcatcttttaatctagattttgagaatctgtagttgtagaatctgaaaaatgaactagaagctagaagctgggacccagcttctccagattctcactagctagcttctcagcagctcattctcagaatcttaagctccccaaacaggcccatagacacgaagaatacctctgttgctccaaaactgcccagtttacggacaacaaatcgaaagatgcacctgtgatccgggctacatgcaacagataaaatatacttgcatcgaagagtactttactcctggaggtaatcatatacagtatggtgataaagtagtgagttgtcctctttgtagtggaggaggtagtagcatttgtcgcagaaataacagggattgttcagagtccacttgtcgtccaccgtcatcttcgtggcatggaagatctggcacaccgaacacttctgtagccgcctctgcatctggaatgtcatgagagggtattccgcttggttctgtgtgtcctccgggtggatcaacctcatgtccctgatcacaatcatgtgtttgcagtttccctgaaaacgtatgtgcagggtattgtcagaaacatgggggaaagggttgtagatctctacctcaaccatcatacattactacagcttcaagttaatcgattttagatttcatcacaaaacatagataacaaacaacacaaggtttgattgtgactaaatgacgatttgatttccacaaaaaaagtgatgcagaaacatcacaacaataaaggcataaggagaatagataagaacctgatgacagtagaggtacccagcaccgagacggaagttcagatcagaaaagcgagtcttttccatttttgcagatttaaaatcaggaacatttgaaacattcaaacccatcagtaaatccttttgtcgtttcttcagcacaccagaagtaatggcatcccacttctcttccgcctcatttctggaatttttaatccagtcaagtataggtttactataatcaacagtagaacgccttgtgtcattatagaatgtgtcctgacaatagagagcgttgattaatacagttgcaattctttaagaacacacagcaaatttctgttcacagatgcatacctcaataagaaaataaccagaatgaacgtgttgctttgccacattcatcagcttgtctttgaaacagtaaatattgtctctaagatctgtaaggagctggcttcccaacactagaaattcctggctctgcaaggaaaggagatcaccaaaaaatttattccccacatatttcaccctacaaataagtataccaaaaaatatatgtatataagtcattactttcacagagccatatctcttctcataaacttccacacacagaagtacttctggatagactacaggtctgtgctccccaggtttgaaagttttgttctgggataacaaaaatggttagtgtgaaatttgagacaaatgagccacttgtgtaaaagagcaaatgaaataggctatagtttttaatgcaaaccttccaagttgtgctgatgtacctaagagattttgcaacatcaactttctcagctgatggcttagaaactttggccaacacagaatcaccactgcgttcaaaaaaatatgtttatagaaggctgtaatgaaaacaatataacagataaaatcaaatcatctagttatggccataagtgcatagcctggacagctgtattttatacttatcttattctctagtggctcagttataaaaaggaagcaaactattcctaccgggcataccatatatgatttacataaatgggctaataaataggatacatgagtaaatgtatgggctaatcaaaatccagtattaaggggaggtaaatttctatacctagttagttcagccagcacagaagtaccaattttttactgaaacatgaatctagccaaactgggctgcatcctgctatcatctgaaccacaaagaacgatttacattacttttacactgttatttgccacagcccatcagtaaaagttcaaattacttatcaacagaaattccacagctcttcagcaaagctgtgataacaccatcccattcggtagaaaattaaataatatatatctatgagcttatggcacaatcagaaaatggaattactaacaatacatacccacaaatcaaggtcaaataaatacatgcccacaaagttaactgttttacctgaatgagtgcaagctggctgcatgtttgtcttcctcttgtttggccttaatttctgccatcttcactgctttagtaagatagctcccctagttatagccatgccacaacatatgatgacgcaaaaccatggtcagattttccagagattaacaatagatgcaagaagaagagggaaatatgtatatatatttttttagagaaaactactatacaagataaattcatcagaaaatgcatgcaattaagcagagatgcaacattagggtaaggcatacttgtaaaatatgtgctcgaacttctctatcaaaatgcctgcctctctttttgccctttccgcattttgtatctccatctgcgcctgcagcatcatgtgaaacaacttccagatcctcgacaggtggtacagactcatgtgaaacaacttccagattctcgcctaatgaatttgaagtggtatttccaccttttttcattcttcctctggatttccccttcatgccacctgttttcccttcgatgccttgttgtggtacgtatggtacaactgccgtgtcaacagatggtccaggtatctccgtttcaactgacgaatttaaggtcggagtgacattttttcgcttcctgcctctagtttccccttttacccctcttgttttaccgttgtttccatgcacatgtggtatgcttgccgtatcctcagtaggtgatctggaagtctctctctcacctgatgagcttgatgtgatagcaccatttccaaaggtggaactagctgacattctgcatgtgatagttcgaaagaacatcagaccctatcattttgtgagccacataagacatgaatattaaatataataatatgaaaagaaaatttagatgccaggaattcagctacaagccataaaaattgaaaagagatgatttggtgcataaagtgcaaaccgctgttccatgctaccaattcacaatagaactttctttatgagttggcatggaatgacgctatccaacaattaaccgtccgtgttgcatctaattccaactcgcataaaagaagcaccaatcaagcaaaaatagcttaccctccatcaatcctctgatcctccagctgtgacaaagcagtggaatcccagccctcctaaaaacaccaaataacagagacatcacatcaaaatattgttcacaaaactagaactacaattaagcacattagcataagctcgataggaacggtcacctccatagcctcccggagagcgcgctccaccagctcctcctctgagaggaccctcaactcatctacgctgcagaatccacaaaatgtacaaaccagaacacgaataagcatatgaacaacatgacagacactgggggatttctccacctgatacggcggaatttggggggcttaccagagctcttcgtcgaattcatcaccaggatcgcccaattcatctttcagcgactgctcgcaaagtaacacagaacgcgattacaccaaagcaagggcacggattgaagagctagggtttggcggtgtgctcaaggggattcgaacctgcagctcgtggagcgcggaggacatgaactcggggaccgtggagacgggtccgaccatgaaggggacgaacacgggcccgccacgagcgaagggcatgcgccgctgctcgccggcggcagagctctccgcctcctcccccgccgccgccgccgccatcgccgtgtgtccgcctctttcgctggttgggggggttttcggcgccaatgcggtgggaagaaggctaaaagctactgggcccagtataaagcccaatatgaagaatcactactgggccgtcgtcgtctccgtcgagtatcgtctcgctccagagcactcggctggcgggcgaattttttttttaatatttacagaaataatctatcgaccaaaaaaattgcagaaatagcccctgccgccccaatggtgggcggcaagctgacgtggcagacggtgggtcgaccacgccgtctgccgccgtcggccaaaattgcgattagaccctagggcggcaaggggctaattgcaattttggccgcccataaagagcttgcggccgtaattttttcatctgggtcccttgccgccccaatagagagcgacaagggacccaaatgaaaaaagtacggccaaaagatatttctatgttatgttaataataaataaagaagtatttattggtaaaacttgttaatattgttataaaaatgtattgaagttggttgttgcgcaatttcatatgttaagtgaggtattattttgtaccttattcgatgtattagtactcagataatttatataggcctatcgcagtctgggtcatagaaacattatatggacttaaacaaggagaattatgtaacatgaagaaatagtagtacaatttgaacatgatacaactatttccattgcggttacatagatgatattagattcgaactaggagggaggtagtgcaatagttgaacacaacgacgatatagtaatgggacaaggaagcatgacagtagaaatttcaatatgctaagttgtccgataatagctaacccctacgtgaggatccctctcctctctcaaaccgcgctttagtaaccctgtattgctctggtagttcaagctgcacaacacggctaggtggagttagaacccttctggtatctatccattctctgtattgacatctccttggtggttcctgggaggaaagattaaatgtaaagcaagcaaagttagtaaatgttgtgagaaaataaggattcatgtaatcaaaatattcttaccatgaaatcgtcgtcaagaatatttggacaaacaaagaaccttcgacccaatgttgtaggatttatggaacaaagaacctgacaacgatcaccacacctgcatcttggacgggcttcccatggagggagtgccgtagttagcacccgccagtcgctctgttgttcacgacattgtcgttcataagccgcttttctctgtaagtattgctcagtactttcggatgcgaaataccagcaaccttcttgtaaacaagtggttaggtcgagaacgggattttctgtatcgacccactcgatgtatgcacaagccgtagtgcgggtctgccgaatagagtagtgttacgaagaataaagcgattgcccatacggaatgaataagcatatgcagataataaaatacctcacggtcatagttagggcacctaaaaaagcgccttcctcgaatatcaggattcctcgaagccattaattggcatcgatcaccgcataggcagagaggacgctggcaccaaggtggtagtaggtatacacaaggatcgctacgccagtttggatcctcaacaccccggcgtctagccattgacgaaagccggttggatttgtaatgaagcaagtggggaagagagtactgaatgtgactgagttctgaaagattgtgaggcctcactcgttaaggcgacttatataggcgcaaaaaatcgagtgatacccctgacatgtgaacgtggtggggtatggtgggtacgcctgattggcgccgaaagttacatgcatgatcggcgccgaaagttacattggtcgtatgcgccaaatggcgggcaaatatcgtatcgcacgcgaataaaggaggctgcatcggtgcggcagaaagtagtcatgcatgcgccgaaaggtatcgtgcatgcgccgaaaggtatcgtgcacatataacaacaacgtagtcattacacaagcatacagtactgaaaagtgaagcaaataaacaaagagaagattgctctactggccctgccccgcgccgcgaccacgcttggtcctccgggcctgtgctcgcacgtagtcctgggagtaggtgaaacgatccggtggcacagcacgggtagcacgagtgtcccgcggaggagtggcctgcgcctggtcctgcgtctgcaccggcggtgcgcctcccagctgtgaggggccgatgacatcctctgtcgagcctgaagcgaagtcgaagtcaaagtcagtgatgtcgaagagcaaggtggaaggcagcaagcggtccgacgaggtcccagcatggtccagtggtggaccctgactcgacgtgccggctgcctgtgatgaagtcccggtgtactgccagaactgcgctaagtgcgaggtcgacgcagctgcctgagacgctgaccttgcagcctgggagaagtgggcggcctgcgtcatagcgaactgggcgaaacctacacatcgacaacgggacccttgtaagctaagacataatgcatgtaaattgattgtcgaagtaatgttgtttttttaagtacctgtggggggcacaacagaaggcctagccgaggaaggcggggtgctgaacggtgcacgaaaccctgaagcaatcggcaggtgaaacggctcacttatatgtgcgaggcatgtacagaaatagtaataaaaatacttacctccgtgcggagggggagtcggcctaggaacgtgcgcagctggacggggaccagtcagtacgggtggccgctgtacagctgcgtctgcccgagcaacgtcgtctgcacgacaggtgagcactcggagaatcgagcgcatcgactccaccatccgcgtgtacgtcgtcaggtgctcctctacgggtaccggaatccccgcgcctaaatgttggatcgtcgttgaaccatcaacgacgacccggttgatgtcgtcgacctgcatggttaatttgttcgtaaatattcgtaaaatttgatgaagagaaagacatgaaaacataaaggaatggtgcgatgcagggtactcacagcacgagcgaagtcctggtcgtggtgcctggcgtagaggtctctagtgctcgcaacgtggggctgctgctccaagggagcgaaggtgaccctagtacgggtgcgtggctggtaccagcgtaggtaggcctggtacgcctcctcagtgtgtggctctccctcgtggtccacgacctcctcggttgcgaggaaccagtcctcaacaaaagtcgccaacgttactagtgcgaaacgtgccgtcagatcgtcctaccagtccacagccgtggtcactggcccaacagcgtctcccgcgagcggtagccccaacaagtacgatacgtcctgcagggtaggggctacctcaccgcacggcaagtgaaaagtgtgtgactctggcctccatcggtcgaccaaagctgctaggagggacctgtccacagtctattgtctggccgggtccgcgtcgccggcggcagcctccaccagccgacacatcggtaggaggccggcctcacgcagcctgcaataacaaattaatatgtcattataaaaaatattacagcgcaactaacttatagtaatacactgttcgtacctctcgacaaaggagtcgtgaaccgtgagtagctcaccgcacgtccgtgcccggaacgtcccaagctgagccccctgcaccgcagtaaggtgagaccggtgtcggtgatctatcgccgggtccaacaactgaggtgtatactgacgtgccatctctgaaaaatatagtgtttcgtgttagaacaattcagaaagtagtaatgtaaaacaaaagataatttgcaaaattatgaaatagtaataaaatcatgagaataattatgtacaacaagagtacaggctatttaaatatagcaaacgttactaatggtacactccgatgacgtgcaatttaacatatatgtagagctcgataatataacataacattacgtgtcgaagtccgacatacatcagcatacctaaagacgttaggcgccttagtccgacgttacatcacgagaccaaaagacatgacatgccgaagtctgacattacacgacgaaacatagaacataagaactacaccacggagccagacgtggcacgacgacgcctaggacgtggtcgagtggaggtagtgccttcacccgtagggcgagctccatctgctgttgatcctgatagtcctgcctccgccgcacttggtttctccttgtctttaggacaatgcttgtaggtgtgcccatgttcatcgcatttgctgcaacgcttcaccctgccagcctccgactcgtccatatcgttgcggatgcgacgagtcctcctccttccagccttgcctcggagcttcgatgggtcaggaatattgagtacttcatcgttagtctctgtgaactccccagctatgccgaacccataaatctcgccgctccatgtatgatatattgcttgcttactgaagtactatgacacatatattgcatctggtatgccacactccgctgcggcagcaatgacatgggtgcatggcctgtggagcagcttcggctttgcacaagagcaatgacatgtgccgtcggctttgagaacacactcctgcttcactctcttgcggtagatactcatgcctgccttatcttgacatagtatctcaaacctgtgctgttgggtaccttgcactagagctcgatgtttcatggcctttttatgcaactcctctagctttttctgcatgaaagctccaaacaaaatgctgttattcggcatagagggaagaactgcctggaaccgatccctaaaatacctgcatgtcccatgtaaaatgaactccactatgccaactagtggcagtccacggacaccgcgcatcacccagttgtaaacttctgccaaatttgttgtcattattccatatctagcaccacctgtgtcatacgccttggcccatttctcttttggttcatgcagaatccactgagaaaatttccgaatctccaatccagttcttctaaccaatgttggactatccgttgggagaggtccaagagcttgaggagggtcagcaacggcggtcgatggagctgctgcacgctgatcactgcatttggctgtcaactcatctaatctcttccaaagctcattgaattttttctcctggttatgattgcacagcctcttgaacatgttcatgagctccttgttcttgaattgcttgaagaaatcagcccccatatgacgcatgccccacctactctatacatcttcccaaacaccggggtatcctcgttccatactcccaaactgcaactcttctatcgctcgcagaatgccaacgtgcctatcatgtatcatgctcacatttggcctcataccaacaacttttgttttaaccaatttcaggaaccagtaccagctgtcggtattctcactctcaacaaaagcaaatgccaagggcaatacctgattgttcccatctacccctattgctgttagtatctggccccgatactttcctgtcaagaatgtcccatcaatgcagagaacaggacgacagttcacgaatgctatcttgcatgcatgtagagctaagaacgccctttgcagcacactcttgccaggatgttcaattgaggggaatttcttcacttcgtaagagctctcagggtttctttcctcgataacaccaagcaggcgtggcaaattgtcatacgaggcttcgtaagttccaaatctcatctctattattttctgtttggccctccaggccttggcatagctaatagtatacttgtatgtctcttcgatgtgtcggattattgaccttggttcatatgtgagattatcgatgacatgcgcatacatctcagatgcaacaaatgcacatgtaatgttcctgtggtatttctgaacaccaggtagaaaacatgtatgcttggtaacgactgacactgtccaataatccttccatttccccttatatgcgtgcactctccagggacaaccatcttttttcttaacacaccgaacttcatattgcgaccggttcgacttggcaacccaaaactctctatgaagtgacactgcaaaatgttttactgcttccttcatatcttcttctctactataaatcgctccctgaataacctcattttctttgtgctcccatctcacactatcctcttcagagacgatcagcccagaaaaatcctcactagcccattctgctggattaatatccgtctcatcatctgacgaatcaccttcctctacacgctcgttgtcagaatcctccctctccatttcatccacaatggcaccgacagtctccccctcgtcggccacttcacctggttgaatgcccactggagctactacgcccccgtcctctcgtgcgttgacctcctccacagaagtctcatttacttcagcacttggtccctcgccatcatccatgttcatctgcacacctggatccttcgggtgaacaaacggaaccaaagctagaggccacccgcgttgcaatgcattttccaaataccatctccacactcgagagttttgaactggcattagttcccaataaaaaccctcagttgcccgacttactataacattgattgttatgtcacttgtctgtggatcaactctcaagcccctcattaactatccttttatagaaggtacactcctctcagccggtctatcaattcccctttctgatacaataaaatctgacagatctaccccagttggcccgtaacggacgtttcctggtccatggtaaacttggaatatttgtttgttcgacatatctgtcaatgaaataactagatcatattactctttcatgcaataaacatctacaacgtaatatcttcttgtgtaagccaatgcaacggtaatgtattgattccaaactagcagatctacgtagttaccgatatctacaatacgcacttctagattagtacaactaaaaccctaaaaatataatgcatttattcaaacaaatttttaaagaatacacactatttaactcaatagtcacatataggatctatgaatattacctgaaatcggcgtctgaatctggcagggcttcgccccttcttctcttctcctcccctctcttcttttttttttcactggaattgaggagggaagaatgagggctgggggctaggcggcaagccttttataggcagcg

SEQ ID NO: 5208 - DNA, 7846 bp, Oryza sativa
ctaccaccgacagaggaatatgggaactcatccacgatggctgatgtctctttcatctggcccactaggcacctcccaacaaccataagcaactcagtgtgtttagattatcaaagcaattttatcactacaaccacctagagagtggaaaatttcggtttttgcactaaggttgcattaagtgcacaaatccctaaaacaatacatgttcgatattctactactagcagaggtattagcatacatcagcaaactttataaaacagtttcttctaaattcgattttccacctaactttacattaacagatgcaaaaaaaaaaagtcttgaactgagagggggactttataatggaataaacaaaataacataaaaatcagcaacagaatcaccacaaaaacaatggatgagaaaatctgccaaacgaagccaggaacttactgttgttcgccattgttggggttctgtttctctccttcacgattactactcgaattcgaattacaattggatggatttaacagaaactgcggggagaaatgcagcaggaagatgatgaggcaggccacgtagtggttcgagttcgagttgagtcccaggttcacgaaacagttcatgcagtcgtgcagccaaatcgccgcaacctcctagcaatttgatgtccaaccctttcacgatctcacgtcagcgccgagaattcgcgcgatcccatcaacttctcaggcaatccggtttaagtctggatcaactcccgcgtgatatcactgcgaaaaaatcaaaggaaaccaaccgtttattattcacccaaatttataaaccttcagttttagtcacacaaaaaccgcttcccagcacacgaaatccgccgcaaaatcgagagatttaagcgattcaagaaagccgatgattaaaactagaccaaaaatcaaccccctaagtcatcaggaagccaatctccgaatcccacaccagaagcgatcgaatcgagccaaggcaatcaacaaacctagggctccctatctttcccctcgcaaacccagtccaaaaatcgcacgcaagctatacgaaatcgcgccacacacccacctcgagatttcgattcgaggcgcacgcagtcgatcggagcaagagcaaaaaaaaacccgaagcagtcttgcggcgatcgatcgatcgatggatcggatggttttcgctggatttttggagattttcggagagggggatttggttttggggagaggaggagaacgagaccttccgctttcctggcgtttcgggagctttttgggcttttggaggtgacgggatcctgtcgagttgggggggggggggggggggggatttatagcttccttttcccgggggttacgtgcaccaccagggtcagcttaccggctacgtgggggccaccccaccaaacccgacatatcttcaccgttgatctggattggacggtccggatcgacgccacgtcgcccgaaacgttggtgaccgcacatctgacgatattttcagcgtacatttacaccctactatgaaatacacaaccgtaaatcgtacataatcatcgtgtacaatagggtctactaagtaatttttaagattgtacaccctccgtttcacaatgtaagtcattcaacggagggagtactctagtactgttttgtcttaaattattttttttctttttatatttaattaaagtataaacggacgcacacgatacatacacttcactttttactcactccaccacacacccacacacgcatgcacgtctttttatagccaggctagaactcgtaacagtattgtattatgcaaaaactgaacaatttcacgtgaaacatctgcaaatctcacgggaagccctcgagtttataaaaaagtttcataccgaataataatgtaatgtcatctgtgctcatccaaggtcatttgtgtgatacaataacacccaatggctccactagatggtactacaattggaggagcacaaactgcacagatgagacatgtcctgcacagatgagacatgtcattggacgttggaatttaactaggtatatcttcctccaattgtcccatgattaattttaaaaatacttaatacctttcgtcttccatggtgagttcattgatgatgcaacacacaatcagaggacggtcgttttattttcttgacctggtaaaggtgcatttataggtaacacgtttttttaatcctctccttaactataccccttttgcatatgagagccacttgcacatttatctaacaaggagcaactcgaaaaatcaaaatcaaaaggaacttaattcaccactctgactcattccattgacacgtcaccagttgcatttccacagcttatcattgcatgcaacacaaaaattgggaggaaaattatcacaaggaggaccatctcttctccgttctcacaaaccatgcattagcaccgtttcacagagaagagatccccttccgaaaaaaacaaactttagtttatctgatatttcaaaaagttatataatacgtagtactaactggcatgtatatcttgaaacccgtcgatccaaaaagaattctcaaatcgtaggaagaacatattcactggaaaggttgatatcgactggagcaaacagcatcacgatcacgactggagtacagtaacaagatggcaaattaatgattgtctaattgacgtactagtacagtttttttttttatttttcgtgaacgcgtaaaaactgttcaagtcactgtggatatgtttggaagatcataaaattttaaaaagctaccggtaaggatatgaaaaggttaagttcattttctaaattatataactatatattctcaaaatttaaataaaaatctagacggttgagaaagcttcgcaactgaaaaattttaaaagaagctaccggctaccggccctaccgctgtcagaagttgtccaaacagacctatatagtttcgtgcccgtttatcattggaccgcctatgaacccactgctagcctcgtgctcgtagattggcgacaactagctacgcatgcaaaaacgatttgagaaggaccgagaaagacgtgcgtgatggggccagataccgtggcctggcctggcctaaccggggccatcatttcatccaacgcacagaccattaggctctcgctatccgaaagaacagaaaattaaaacaaattcgccaccacaaacgatcgcgtcgctgcatctgctctctatctgtacacggagataagacacgagggaattatgcacaaaaaagtctctctctctctctctctctctctctctctctctctctcattttcggaggacgacgttaatctcgttaattaattcagaacacgtaatattcagaatatcaccagttgatattatcacataatttagacttttaacagagacgtgatctacagtgcattattcagaggatgcggcaaatatagagatgatcattatatcgttgaaacggatgagcgcgcgtagttaatctgtcaattattcgccgtcattttcccgagggaatatcgtgttcccgtggccatttcgtcttgttccgaggactaaggacaaagcttcacgcagtacgtgttggcgcttttctggccagctggacgatcatgccatcaacacagacactgaaagaacgattactaccttgctagtgacatgcatggcacgccaccttaattatatttctttccatggagctcggaccaactgcttgatgaaaccaaacacgagagctaatatgagtttcttatcattgctagaagtcgaaatcaaatcacgaggtccccaaacagtaggccattaatcttagctagtactagtagctactccctccgtcccataatattacaacctcgaattggatgtgatgttttatagtacaatgaatctggacatttatctgtctagattcgttgtacgatgaaatgtcccatccagttcaaggttttaatattatgggacggagagagtagttggcactttagatgattaataataataataagttcagctctgaatgatttatcacgtaaatgggaggataagaatcgaggctagctatacacgatgcttaatttcgtcgttgtaagttgtaagcgagaaagtgacagcttcctcagaagcaggaggccctccatggctggagcgaactgccagtgccacctgctcatttcgacgaatctcggcttttctcgctgcacatggaggaagaaactcatcaacccatctgttagccggtcggcactctggccggatcactccgtcggcgggatccctcacctattgtcacctcacccgtcgattggcaatttgtccgtggcatcaaggctacggagtagttcattagcgtataattaattaggtattagctatttttttaaaaaatagatcaatataattttctaagtaaatttcgtatataaatttttttaaaaaaacaccgtttagcaattaaaaaaacgcgtgcgtgaaaatacaagatcgacgacatagtacggccgccaatgcagcgagcaccagcgcctcctacgtgctgtaccagtttccaccaacctctgcctttctctgttgcgcgcagccgcgcgcgcggggtctcgcgccgtccttggcgacgagacgacggagggagcgcgcggcagcggcacgcgagagagtcgttgtgttgcgcgctcacgcgcgaggggatcgagtgatcgaccgacggatgcttcaccctgcgacgcccgagcgcgcgcgtgagcgagaccacgccaaacacgcgcgcagcccggccggtgggctgcaggaaaacgagtggatcacgcggacgcgcgcgcgcgaggcgcagttggtgtgtgtcccgaggagtacgtaggaactctactggtgtggcgctcggagtcggagaagctactactcggctggagtgcagttccagccaacacggacgtgtaccgagtaccgacggtgtaattttcacgggccccgtgatttctcccgttccaaaattaaagatattactacgaatttgaaacaaggaatttttacacttaggtaccacatatcacccattatttgcatttgacttaaataattatatatatttttaaaaaatgtaaacataaagaaaattatttttgtatcaaagggaaggcaccctccatttacattaagattgaaaacatcaattgggatgacataagcctatagacagacacgcaagactaaatttaattcataactagagaaaaaaaataataaaatcaagtagagaatagtatatgtacaaatcagataaaatttgtttttttatgcatatatcaaatttagatttgcatgattgcgtggagtcttataatatcataatatttcttgtcaaattttataaaaattttatataactatttagaccgcatgcatatacctagatgtcatggtatctagtggttgaaaatatttttcctacgaatcaggactagtattaggattattaacattttaaactaggcttatttattttgagatatatattataaatcgtttgacttttttatagtcaaacttatttaaattcgatcaaattatagtaaaatatagtagtgtttccaacacaaaacaaacatgttatcaaactacattcaattttaagtttaataaaactaatttcatattttagatgttaattttttttctataaatttgatcaacctttgttaagttcgataaagagtaaataagctagcgtgcaatcggaaggagtgcgggtcatggcgggccaggaagaagaaatcgaagcctcgtggccgatgctggcgccatacatgcaggacgcggtcagcgcaagatggatgtggagccgcccgtttcccatgtgttgaagctgcaaccaactgggagcaaaacatgcatgtgctatagctgatcctgcaggtccatttctcatgctgcaagagggcgtacgggtaccaggtttccctcccatcatcccatgtaccttgatggcttgatccgttgatcgtgtgcaaacctaacggacacttagcgtgagaagcatatttgacatatgagccggtaaagcattgttgtcacacgcacatgggaccgatcgacccctcgccacaactaactttgtccggtgccactatgctaatatggccggtttaagctattgactctaaagatcagggcaaagcgcttctacctcaaagaaacgagggacacatggctaaagcacgaaggttgcttttaatttggttgggagaaaaagaaggggtctagaagcatctgtctactggcacatcatctaaccaacacgctaaaagagcatgactagtgtaaagatgcatgcacaaggggaacacaaggaagagaaccagccagctgaccttggaaagctagttgattatacgcaaagcgatatcgtcaaagtaaaccagtttaaagtgcagtaggtgctacaatgtgcaagcaattctataaccagtttaaagtgcagtaggtgctacaatatgcaagcgattctataaccaatttaaactgcaataggtgctacaatatacatgcaattctaggtaaacgtgagatagctcaactgttgaagtggcatctgaggccatggcctcaaaaccaaacagataatcttaattgatcatgcaaatggaacccaccaatatccacctactagagtactaggtcgctgctcaccagataacgaatgaagacgattagcgagattgggttcaaaacaaatagccatgtaaatgtttttcttttttttaaaaaaaaacgtcgatagatacatggaaataatcaagaaattaacatgtttgcaatttatcgggtttggagcagagaagcacatgatagaaaacagaaattgaaacagaggaacacactcagaaaagttcaatgaacaatatcttcaaatatattttaccagcaattaaatccacaaaaagaactattaatactccagtcaaactggagagagcagggtaattgggaataggtagcttaagatctgaaaaaagaattacctccgagacatctaaatttcttctctctctggttcagactgctgttcgaaactggtccatagaaaaagcaagcagacagaatcacagaacacatggaacgggagctggcaacaagaaaaaggccaagcattacagtccctagtatatttcaactgagcagtattcaacaagtatcgtagggaagcaaaaaatgacaaacatatggtcacaaaggggatgaataatatgcgattgaaacaagtaatttctgcagcgctctctaatcaagtggaacaaaaataagtcatggtgcacagggctacaacaagattgtaaaacactgacgcttgtaacattcagaacatgcaattccaacatggcatcagcaccataccagaaacaagagctcagacgagaaagttggttgcatccaaagtcatacaagataccaaaattagcaaacagagttgacagtgacaaaataaacactaaagcgcttcttcattctactacaaatcaatcatactactaaattagagaaaccaatgactaatgcaggaaatgcagccgctgtatcctattgaactgaagttagattgaataacaggtcccaactaacttccaccaggatgtattgatctcacaagttcaaataatttaaatggcatatgctacccaagaataaaaagcactaataatacttttcaatagctgacagctcatagataaagcaagacaaatcaaagaaatatcattccacactgaatccagcaccgaagcatatcaaatagatgtgatggtcatccaat

SEQ ID NO: 5209 - DNA, 4687 bp, Oryza sativa
tccgatgatctcctctttaaatttctcgcgctgttgttgttgtgatttgtgaactgaattgaacgatgctttgttgttgttgttgaggaggagggttggagtggagctggatttatactggagggaggccagtgggggtggcgcgaaacaggtggccgcgctcgctggttttcccgcgataccgggtgcttccttcagccgcttgctcctcgctatctgtcccggctgggttggtgactcaccatcttggcgcccgtcccgtctcgtctttgtcccacacgcgcaagtgcgcaactggcagattcgtggggattcgtggggataatatgggtttatatggagtaaggtgacaaggacgcgcgccactagcgagctgatgcatcccacacagttctcttctctcggcgcctaatcctttttgggctctcgaatcttaacatggacgaatctaaggcccatgtgatcatacgaaggcccggcctggctgtgtgtcaagctaacgttatccggttgcacaccacctcttcctcctgtccctcgtgtttgtgtcacgttcgattctcccaagctgatcttgtgtcgccggaattgagcagggggggacgtgccgcgacggatcgaggcgatgcggcaggcggtcggcttgtgcaaggcccatcaacttcggccggccgcgctgctgtccccgcggccgttgctccggcgagcgtccccctgcctccctgcaggtggttacaagttacactacctcccactgcatcggttcttcgcgtgtgtgcttactgcttagtgctaactggatgcaattgtgcagcgggagcgggtggggagctcaggagggccagcgccgcgtcgcggttggtggtcaggaggagatgccaagaagaggagcagcagcaacagcaggaggaggaagagcggagcaatggcggtggtggtgatggggagcaagagcagagaacatttctcagcttggaggaggccgggctggtggagatgtccggcctcagcacacacgagcgattcctctgccgcctcaccgtaagtgtgcatctctactgatcgattgcaaagatattacagtggcgagcagattagcatatcaaagttgtgaagtttaggtgaggtgtttgtctcaacgagccgttgacgatgacgagtaaccatgtgattttttgtgacagatatcgtcgttgaatctcttgagagtgatttcggagcaagaaggcgtccccattgaggagctcaacgcaggccttgtttgcgactggttcgtcaaggacaagctcaagagggagcagaacgtgggctcagctgtcctgcagtgggacgaccctggtttctagctccatcatccgtttatggatgatggtgatttggtggtcttgccggcgtctccaccgagaaacagggttcatcaagtcaacatttttctcggttgatagagctcactgatcactttctttgaattaaagagggttcctttgtcttgcgacactcgttgtgcctaattgggctttttacatgtcagtacatgacgacctgtatcacttcctttgtatgccagagaccaaagccagaaacacagcttaattacgaagaatcagtttcaagaatatatggatcagaaattgctgtcggattgttttcaacttttcatttctagcattcagttgaacattttactcatcaattttcaaagtacttgcaaatcctagaaagccccaatacttcttgtcgatagtgtaaggctaggagcttgttcataaggtcatctgacttcttttggcaaacaataacttcacgcaggtgttttgagtcaaggagatacaccaaaaatgactttatgcgtgctacagaatgtagccaagtacatatgcccagatgtgccaaaaaaaattccgcaagtatggggagatattacaggcacgacagcaaatgccaagtagctaacaaaagtatttgtacgtccatcaaacagaattacagtggaccctggcccatgggtgaatcatcggccaacaaagatgcctacaaacacacataatcacagtacatatcttttgtttccttaggaaatgatttcgctggacttcttatcaaaagagtgagtgcaccagatgcaagtccaacgggctcaccaactccttcagcctctccatttccttctgcaatcacaataatgcaacttatatctctatgctcactattcaggcataaaaaaaatcaaaacaggaaaacaccaaatgtctgagatgtatgagttcatgtcatattgcatgctgtttcaggcataaaagaatcaaaacaggaaaagagttgatgtcatattacatgctgtttcaccaagtaggttgtcttaaaagaagatacttggatctacaacatatccattttgcagacagaacaatcattgacagttcgtaagtgaagcaatcataacaaatgaaacaggggggagagcagcatcccacaaaacagggaattaaatcataacaaaggcccagtaaagctgaatgaaaacaatatcatgcaacagcgcattgcacacaccctcaacttaacaagggccacaagcatgagttaagagatagtgcctcaaatttatcacttgatgtcatactatctactgcttcctcaagtatgttctccctgaatcagggacttgaatccacagaatatatattttgcagacatgatcatcgttgataacaactagaaaaggcacaaaactcagggcatggctctttgataggatacatgatgagcacaacaagacttccctatgactaaaaaattcaacagaatatcaaatgcatcagatttatctgttgatgtcatgttatccactgatttgtcaagtaggttctccctgaaacagggacttgagtccacagggcatccattttgcagacaatatcatcattcgcaaaaaacatgaacataagtttgaatacatctctatcaagtaataatgctcagtaaaaacttgtaacaaataggagtaccaacaagtaggttcagacctcagtaacagcccattaatctcattataatgtaggccccccaagtaggttctccctgactaacagggacttggagaaacctacatctcacattttgggcactgcatcataggtcacattctattaccatctaaaatatcttctcttacatacaagactatggctacaaaagcgagttacaattcaaaaaatcatgagctacttaatagtagacttcagtttaaaaagcccatataactcattacaatgtaggaccccaagtaggttcaaacctgaaaaacaggcccttgaagctacctacatctcacacattgggcaactcttcatagtctactaatgaaacaaaaaaaatacaacagatggcaactcaaatattgcttgaacaagcttgcactataattaagaatactgtaaagagggctttcaaatttatctcatacaattcatatagcgtgataacctcagaaaaagcaatcaaaaccgtactaaattacgcaccaaacaaaagcattgaacatgattgccgagattgtcttaaaccacgtttctcagcaaacagagacttaaaaaataataattaatgtggtgagacattttagaagcataaccaccagattactgttatctcccacgttaaactcaccagaaatcgatttttgcctccatgactgggcaaccatgagaaagaccattttcaaggagccaaaggtgaggaaaggcacccacatggcaaatactacctcaagatttcattcgatttttgcacatcctctatagctataataataaacaaattaatcaagagtcttacccatcatgaatcggtcttctctggcgaattagaggacggcggagaagacccagatgccgcgggaggagcatcgtgtgagcaacaaccaccggggccgtgatgatggtggtggtgatggtggtgcttcttgggctgcggctgccgcagcggcttgcgcatgtcgtaggcgtcctcgccgtcggcgtagtacttggcctcgacgtcgtggatctggtacccgagcgtggaggtgtagaggttgaaggccgcgcggttggagcggcggacgtggagggagacgtactcggcgccgaacacctggtccatggcagcctgcgcggcggacatgagcttggtggcgaggccgagcttgcggtgggagcggagcacggcgagggaggtgatgtggccgtggcaaggctccgaggggtcctcctccatcttcgcgagcacgtagccgacgatccggccgccgtaatcctccgccacgaacagcagctgcggccacgacagcatgtggtagaggtagtacttcatctggtagttctccggcaggcacatcaggttgcacgcctgcatcgccagcaggtcgtcgatcgtcgcctgccgtatgcacaccatcttcgccttcgccgccgccgccgccgactacttctccggcgtgatgtggtggtgggtgatcgcgatgcggacggtggtggtggcggcggcctctcctgcggatttaatagaggtgaggaggggaagagaccttgacctaaccctagaggaaaacgggccgtgtatatggaaagtgggctcgtgtattgatattaatgggccttgatgggccggcccattgctattgctacatcgagaagggcgcgcacaa

SEQ ID NO: 5210 - DNA, 14037 bp, Oryza sativa
tcaccccgtcgtaacttgatgttccatcctcgcaggacctcgtttgccttcgagtgcccctagcttcggagcagtgcgacctacaacaccggtttcgcacggtacagttcagcccagatattagttcatttttgtttcagcttttgcacgaatatgtcactatgttttaactgcacgtttcctcatcgcaggacctcgtctgccttcgagcacgttcgcaggcacgaccggcgcttccgcgagctccgcaggggcgttcgccacctcttcgggcgcgttcgccagctcttcctctcacggagcgtcgatccctcgcccacacggtactttactttttattaccactgttaaatacttgtacgaaactgatggtccttgtccagcaggatttgcagccgggatcttcggtactggggcctcttcgtctcacgccggtaggactggtcctactagccagttctacgatgacgacttgcacggtgcacaccaccacgacgtactaggctcctctcagcttggaggagctccagaggcgcacactcaggagcagccagaggtcacacctgtacaggcaggacgggttggccgtgccgtacccccggaccgactcacgtactcccaggggcacattagggcgcagggtaggagggacaggggtaagaggcctcgtcagtagtgttctacctcttcagtccttatgtgaccgtttcttttggcttacaaaattgtaaagcagtactacttttgctattactactgcagtactacttgtgtttgtctcgtctacatagttcttttcattcatatggtgctagaacaacttatgctcacgacaacacactttcggcgcttcacggtagtgtcagatccagtagcgcgcacagtccacaacagcacacatgaaaagcggcagctcgagttatcactatcaactttcggcgctgcctgttgacataaagtgattcacgcccacgcgtgatcgtcttgtcacatctaatgaataatgtatctcattgagttcacatatattgcagtgaaaacgacgctatataattgacaatctgaaggcaacctcttcatatcttctttcccactagcacaccacacacgaaaatagaagcctattcattggtaatacgtaatctagatttgagattatgtagaacattcttcactacaattttacattttggcagcaaaccaaatatgatcaaatgcaattttaccttaccaaatatttggtagtgccaaaacttgcttatattttggcactaacaaaatatttgtacggtaacaatccaaatatgccctaaaaaataataaaattgtattttaccagtcttggagattttaatcttgtatagttttcaatataaaaagatttgataactattgatatttataaaaaaatttagagcacagtataaaatcgccctcccccagggcggcaagggggccgcctgcaaaattccatgcccccctcaccgcccatttgcaggcggcccccccacagtacaaaatcgctctagcggagggcggcaagggggccgcctgcaaaattccatgcccccctcgccgcccatttgcaggcggccccccgcacagtataaaatcgccctagcggagggcggcaagggggccgcctgcaaatttcgttgacggccgtcgcccgagagcgaacggccggctgccacgtcattttcgccgccctctcgccctcccagagggcggtaggcgactacttccgtcaatttttaaaatggaaaattatttttgtaaaacttttaataaaaaaaattataaataaaaaaattcgaggtaggcagccccaagaggggtatttttcatccaaacaaacgccgtcagtgggtgagcgaaactagcaagaaacgcgtgcgtaccgacaatgcaagaaaaaaatatctctttgatacggcaaaaatctgtatacgatcatgcacgacaatgtatacataacaccaaactcggtatgccatcattttgatttacagagatcggtacgtaatcatgcaacattggttttggaactccacatgcatacgcgaatgtgcatgtgattcttgatggccaatccaaagaaactaccaaagctgcacttggtcctgattaactgaagaagttaaaaggcttgttacctgtcaaaaataaaagaataataaaacgataaataataaatatatacttcctccgtttcgcaatgttaagtcattctagcattttccacatttatattgatgttaatgaatatatatgtctagattcattaacatcaatataaatgtgagaaatactagaatgacttacattgcgaaacggagggagtatcttataataatctcatttgcaggccactggtaaagttccatttgatattatagcgacaacaaaggattatagtgttaaaaggtgcggaatggcaaaacgaaagatgcacattgagttttacttttgagagtagccagctatatttccgaatatgtggtctgctatcatatacccatataggtgacaacaaactgtgaccgcaaaattttgcatatacagttaaaaacaacctttcaaaatgtcattagcaagagttattggttatgaacttacaggagcaagttatatggatactattcttctctaccataatacatggaagatataaattgactgaaatcgatatggagtaaaagcttgctgacagcgaacttcaattgacttatgctgcgccaaggaaactttcaaattgtactaattactaaacataagtggaagctagcaaaaccttgtgtaaactttgaaatgttcatgttttatttgggggaaaatatgcacatcagtacatgacatgcatgatatcatgatggaagacatggagaaaaatgagaaggcatatggtcagcaggcggtgaaagtgcaagaattacaaagagagtaaatgcttcaagcttgagattgcagacatatagagtttttcttttaaaaaaggttcataaagcaaccattaccagcaaaggattgctcctactgttgcagaccatgacttaaaaagttgaaataaagcatgaacttcctagtcttaatctatgtgaacctaaaatctcgcattataaggtaaatctgagatcctaaaagtgaactttctggctggaatttgtaagattaaggtggacaatgaagtaatgaaccatcaatgtagatgacactgtaggggcacaactacagtcattagaagagcagattttgctgaacatatataatgcatgaaacaatcacagaacattgattgtcataagtaagaagcactgcatatgacaaaagtaataatactgcagaaattagcacttgtatgaccaagcagtatgagcttcatgtgcccatgcagaagtaactttaatatggtacgctgggatactcacatcttcactaagaattgggaagccggcatttctgtaatttcagcttgttcactgttgccatttgaacctcttaaggtcactgagagcatcttagtatggttgaaaatacggaccaatcattttcatgcatagagaatgaatgagcctttgttttgatgcttgaaagccataatgtctgtttagaagcaaatcacagtgccctggcctggaactccttccgatcacaatatttctagttgcataattgatcctagaaagaaggagaaaaaggcatcatcacaaggtcaatcaaacttagggaaaattctccaagccctattactattttgtatagccacaaaccattcagtaataaatatcattgacagcatgctggattaagtctgatggcacttcttaattagtgtgactttttgtacatagaactgcgagatgatttatattaacaatatgaggtatacgactggaatattgattcaaacagcagactgagcgtagtgtatttacatcaaaggatcagttacataccttgaaagttaaaattgtcactcatcccttcatagtgttaggaaacaggaacatcaagaaaataaacaatgacgaactgaccattcctgataggtttacaatgaggcaaaaattagcagttgcttaattgctttaggcgatgtcatattagctcatgtaagtacaaaagagctgcattccagaaacacactgcaacaaacaaaaaggcatacgtacatgtgcttgtgtttcaaaatggtactcttaagacaccaactcagacgcaagttctgtttcccaaatcaaaactcttagaaaacgagcataaagaaaaggatcaatctagcatttgccgtgcccccaaatcaaataaaccctagaacataatctccaacaaatactgcaaagaaacctgccatatcaaccatatagcttgagctgttcgcctcccgcggccatacagcctactgcgatcctttgtcttcagccttcagtggcaacgtccgcatcgttgagcaggtgccctaatgggagatgatgaatgagataggggagaaagagaagtgatataatggctgagcaccccatctcgcctaaagttgcaacctcgcactcgccttgaccacgcctccacaatagctactaatgctgccactgacagtggatcatgcatgaaccatgttggcaagttcaaatgccccaaactgcttagagatggggttttttgaacctttgatccatttacatgggtattttgaaaccaggtgcttagacactggggtttatgaaacacaagcatatgtacatggggttctctgatatttactctttatttttcaatggaatggatgggcacaagatttacttctgcatcagtgagatcctaatcagtagtgagtagtaagtatgcccaaatctaatatccgtgaaatacagcagaagtaaattagcaagcagcagcatcagtaacagcagccatgaacagttagcagtagccaggaggagaagcatggctgcgaggaacggctcccaaactcacctgagaagagaacggagaggagattcaaattgagcgagcgaggagggcgcaaataaaaaaacccagccatgattgtggcgccgtgctccttctccttcgttcttctccccgacctccgccatccccacaccccactgctccgaccaccatcttctaccggatctggcggcccctgtgcaagaacctgcatcgagtggggagaagagggagagaagaagtggcctgtggcggcggcggcttacgtccatcgcggaagaggcgacgatggcggcggcggtggctggaggaggcgaggatgcggcggcggcgggcgcgaggctgcgggagaggccagcgagggggctatggcttggtgcgggtgagcgaaatctgcgccgtccgttcccgatccgacgatccacgggtgcgaaagggccgccacagcgtgaaacgtggacggtcagatcggccctatagagagatcgaacggacattgttattgggaaccagtatgtaattaacgaaaacgcaagggttctgctgcaaaaattgctgacgcggcgcgattaatttacagcgatcgcattagagtggttaatattttctctcttctttttttttttcacccggcctctctccctcgccttcctctcctcctcgccttcctcccattcctctcgattccggcgtccaatagccaggcgcgccggccgccggtacccgcggcggcggcggcggcggtgcctccccttccttcgcggcgtcttcctcctttgcgccggcatccttcgtcgcgcacgcagggaaatcaacgcctctcccgggtggttagtaatctttttctcgtcttcctcccaagcctcttgctaggttagggtttaatcccatgttgtttcagattgcgccgagaggggtagggagaagggagggagatccggccaccctgcaaggcatcgtcaccgccgtgatctggtaagaatctctctcgcctcgctgcaatggatccttagttttggcctgttgttcaagcagagctggtcttgtttgcgttcttggtttttttttttttttgggtgagggtgggggtggggggcggaggaggtgggggttggggttggcggtggcgcggcgggaaggtgggggttcaaattggtgtcactttcttgatcatcgagttgtcgtgtggcatcgctttaaaaagtttcttgtattttaattctcttgttcaaaaaatctgctagtcatgcgattaaccatctgtacatggtacagtaataaccaccgatgaaaataacatcaaatgaggagaaatctctgctttagcagttacttgtcactactgatgaagataatatcaattaagaaattatctgctttagcagtttagttagtactcctagtactactagtataaatatgaatttcagaattgcagtaatatgaatagttcaaatgtatcatgtttctttctaggaaacaagaaccatgtgttacctgtttgcacttcttgctttactgtcttcattagcacagtctatgattgccccaatatacaagtgagttggagtcactttgccttcttttttttcctcaaacaaaaatgcctctgtcaaaatcaggaaaatatgaaaccatgactacaaaatcacttggctgactaatttttctgtggttattttcttttcaaaaggtactacagaactgctctagtttgcttggattagctcccattttttttctgaacataacgttttgtctcttgtatcgaacaaatatctgagattgactttggttcattataaattgtcatacaacgacacttctgtacttatgatataagcaacgatcttttgtactttcaccaccattttacgatccaaacttaattaatcttttgtactttatcgtgctatacttaattgcaaggaaatcatagaatcttctattttggcatcctatgatgctttgataggtaattatgttgtcaactcactattcactgatggtctacaccaaaatcgctatatattttctgcaggaagcactatatacaactacatagtgaatctgaggccattgtttggtgcatgccttcatcggaagttctgccttttttttttaacttgagttgtatggactacttatgaacgtggaacttctctatccttttgtaataaaacactataattcagatggttggagtgtaatgcttgtgataaagcaaaatgcttttactcttatttggagtttacagactgagttgcctgtaaatttgtaaaaaataggttggaaaattggtatgaaaaatctgactatctgagagtactagatgatgcttatttgtttttattaacctgacatttctgctatgcctgattttggtgtgcttctgtatgtggaactcctgcaatgcgttcgcaggtcactctcttttaaattttgattactaccaaaatgctatgagtaaaatgtccattctttgctttttcccatgcttatttcaatatatgttattcacttgactcaaccaaatgttagactattgtataatattagaaaaatatgagggggctaattatagaacatgcaaaattagtagttatgggttggtggtcagttggtggcagaaccactaccaccactatttctgttatagtaggattattttttaatttttgtaatttgctggttcaggaagaagcaatccctgctattcttgtgatattcagtttgtatccaagcaaaccaattgaatggaggggattgggtgggtgggaggggatcaacctaatcacccccatgggtgaattttccctgagaaattcctatcagataactgaacaaagcctgagagaggaaaggaagagaagggagaagccattttcaccaactgctctagtgcttgatagagtctgtagaccaactgctccagtgctcagtagagtctgtagaggcaaacattcagatgaatactagagataaaatatatattcatatggagatatctaataaaacaactgaatttcagaattgcagtaatatgaatagttgaaatgtatcatgttcctttctaggaaacgagaaccatgtgttacctatttgcacttctttctttactgtcttcaactcttcattagcagcggctatgactgtagacttagtgtcttaattaagtatatacctgaaattatatgcatttgagagagttcagtacttgagttggttaagttctactcttgtcctgaatgaattaaatatttgactagtttcttctagtttccatgtaccagttgctactctaatgtctttgggattgactagttatggtcactaatcagcaattggtagtagtaacaatcagccggcttgcccaaatatacaagtgagttggggtcactttgccccttttttttttccacaaacaaaaatgtcactgtcaaaatcaggacaaaaatgaaaccatgactacacaatcacttggttgactaatttttctgtggtgatatatatattttttttcaaaaggtattacaaaacttctctattttgcttggattagctccttttttttttctggacataacgtttttgtctcttatatcgaacaaacctctgagattgactttggttcattataaatggtcatacaacgacacttctgtacttattatgatataagcaatgatcttttgtactttcaccaccatttaggagccaatcttaattaatccttttgtactttatcacactaatatacttacttgcaaggaaatcacagaatatgctattttggcatcctgtgatgctttgatagctaattatgatcactatattatgttgtcaactcacagttcactgatggtctacaccaaaatcactatatattttctgcaggaagctctatggccattgtttggtgcatgccttcatcgaaagttttgcctgatttttttttagaaacttgagttgtatggactacttatgagcttggaacttctctatccttttgtaatacaacactataattaagatggttggaggataatgcttgtaataaagctaaatgcttgtactcttatttggagtttacagactgaattgcttgtaaatttgtaaaaaaataggttggaatttggtatgaaaaatatgacagtactagacgatgcttatttgtttttattaacctgacatttctactatgtctgattttggtgtgctttctgtttgtggaactcctgcaatgcgttctcaggtcactctctttttttttttggattattctgttaaactttgtaatttgctgtcattcctatgttcaggaagaagcaatccctgctattcttctgatactaacctcacgctttactgcgggagtttagtacgataacaataaatagaaataatatgtaagacagctagattgacacaagtttatgatatacgataattcaaatagtatatggaatgatgattcaatgtaatagtaaggtgatgtagttttatgagagaagaaaagaaaagagataatttagaccataggttaattatcgaatggctaaaaacaattgagatgatatggctcaatgagagaatttggattatagattaatcatctaagggttaaaaataattgagatatagcttaataagagaagagagaaataacattaactaagtgggagatactgaaatttatgtgaattatgtgagatgatttaacatgtttgtattttaaagctctaaagtttaataaatatatagttgtataaatatagcatacatgatgattaagatgtaataattgttagtagatgatgatataacatctttgtattggccggttaagaaggtgggtttggctcaagaggaggcaaccggtattgctcggttgaatgggcgacaagggcaatgattacgacgatgagtatgaattgattagtaaaaattgtgattccaactaatcctttggatatatgccctggtacactatatatagagatcaaggctgagtgattcacgtctgataaaatcagtcccaattctttgagcatgctctatccccttctcgctcctcttattgtgacttttctcctaccttactctgagttttatcgtaaattgatgtaatcgatgcttgtttctgtcgacatcctctttcctgcgagccaaagatagcggtaaagattaaataacatgccattgtttgtttatcatattgctcatttcgttttaaaagaattaaaaaccattccgtgttgacctacatctctttttttcgtatttggtgattactttttttttcttaaaattgctttgattgattattgttatgtaaacttcctcttcatgagaaccgaagatgggtaaagattgaagaatctttgttgtttgacatttgcttgtttatcttggtttttaagcattagaatcccttatgtgtagatgttttttttaaagaaattgctttgatagttgattcttgtttatgttgcagcccgccgatattcgcttggaattgtttcttcatcgtcctgcacgtgtcacttgtgcagttgtaaggcgaacaaactatcttacacctccaacctgccaggtagaggtaagaacaagtccatcttgagaaataatttgttttttggttcttttaatcatggcagagttcttgtgctgcagacagcaccattttttgttgaattggttgaattttttttctctgttggtatctagtttgatctaaggcagatgtcttcttgtttattccagggaaattagtaaatcacatcacgatgtgggaattactattttgggatctgctaggcagggaaaaaaagaaaatgaaaaagagaagagaactactcaagatcagaggcaacctaactgctgaggtatgtttcattcttatacaatgccctcgaaactttgcttttagtagagagtagtaacaattctgaatttacacgagtcataaatgtacgggtaaacctgctcttgtaaatttatgctaagagaaaaatgctattatgccatttatgatgctacatcaatcacattaacacaattagttctagttggtagtggtctgtgggccaacaggcaaaccacggtagatacatgtgcatggcagtggcacccctaaaacttaaagaaaatagtattgcgccgtggattatccatgtatgttactctctctattcccaattaatcattatataatttttataaggttattttcaaattatattcattccctagttattatttgtgcatgggagtgaatagacattagtgcatgcatccatgtacacaactctttacaaccaatattcaatgtctttgctttgttagtggctaggaaatagcgggatggtgcatgcataagtttgttataaatgtagtacgggagagttattgtttcttcttaatcctagtgcacttatatagtgtgatatcaattggaaacggagggagtatcaacatagggctgtaggaataggtcatttgacaaccatgctttggtggcggctcattttttttttctcttttctctatttgtttatagttcaatttattcttagcagtagttctaatgcattaatggtctgatttttggattatgatcccagttcaagactaatccagccgcacctaaaaaattaaaagaaaaagcccttttactctatttttggattatgatcccagttcaagactaatccagtagttctaatgcattaatggtctgatttttggagtatctattttcatgctaccagtgttcttccctaaggtttgacttacagaagactgcgaattaatgttgaatttctactgatgacatgctgcaaatgtaagggaaagtagttgtatatggagcttatgttaagtcgaagcggttatctattttttatgcagagaaccgatttcttgaggaaaatgcattcgcatgtgatttgtgatctacaagaggaaggccagagattggatttttatgttgaagaaaaagagcttataagtgaagtgagcgtgccagggtcagaaagcactctaaggataagcactgaagtttgcagagctgttcttttcaagataatcaaaaggttccaatccatgcactctgctggattcagtctaggtgggtttgaacacaaaattctgtttgtcacgtcagattttgaggtgaaaattggtggtattagtagagtgaaagatttcaccaagacaagaggatcgaaggattacaagagcatcggaaaaattgcccgggaagtgatattctcatcagtgacaaatttgccggttgatatcgagcaactacttgaccttttgaccgacaatcctatggagcaaacagcccttttgggcatgcactactctttattggacccattgactcaagtatctgagttcctttggtggcacaagcgcctcattcacctcaaagacataaatccagaaaagtttcaaagaatcatggaaaacatcccaactggtaacaattggatgagtcgggcggtggagaataagtacataagaaaggtttcactgggcattcctaagaggagaaagggattagtacataccaccgaggaagtgaagcctgaaacaacagcggcaagtcaaggtactggtattgagggagtaaaaccaaaaactgcagttggccaggataccaatattgaggacccaaaacctgaaactgcaacaccaaaatgcaagtactcggaagattcatgggggcagagtttgttgtgtaggaactcaatagaacacctggacagatgggcagcattgagaaggatcaaaaaaaagaaatcaggtggcaagataagaacggtaaaagttcaattcgaggaaatgggcagatgctatatcataatacaagcattctctaagttctttggagagttgcaaaaagccttggcagaagagaatgaactgccacagaagaagcagtgaagttttggtgtcgaaaaggtgatgttcactgtagcaatgatgttgtgcaaaaacgaggttccctggatacttgttagcagaagatgatgaggttcattgaaaatattaattgcattgaataagcaatgatgttccgttgatactgtgcttaacagaaaggtgatgaggttaattggaaatagtgcttaacagaaaggtgatgaggttaattggaaatagtagttgtattggtatattggctgagaaatgatgtagtgcaaaaatgaggttccgttgatacttgatactatgcttataagaagatgatgaggttcattggatatagcagttgtatagcagttgtattggatatacatcaacggttacgtgactactacttcttacactgaagagagaatgtgattgattgttgatacagccacgtcgtataggacaaccagaatcccagattacggtgtgtattgtgaacatgctctactcgtacaatacaaacacccacaccaatatttgatatattccatcactgccctggcaaacattctactgccgcattgtctctctctctctcttgccgccggcgggctcgcctccccctcgccgccgcctgctgtcagccgccggcccggggacggaaggagaggcggtgagtcctcgtgggctgccgccgccgctgccggatcaccggcaccggcacgcgggcgacccgatctgcggcacgacacgtcgttggccgcgggagttttggtgagcagctggcaccaatacgacgggaccaaacatctcttacaatttggggatctcgcgcgctgccccgatttgccttcaaaatgtttccctcttctcttcgtttctttctgtttctattttgtccctggtgttttaatgttttaataatctgattttctttgttgcgttgataccagttgaagatttctctggcctcacctaacaatttggacaaaaaaaaaaagagtgatcacattatctctaattccatagtgctggtgtggcagtacccttttgcaaacaaattcctttgccgcaatgtcaaagcttgccattctaggccgcaggtatgtttttattttctactacttcctccgtttcataacgtaagtcattctagcattt

SEQ ID NO: 5211 - DNA, 11921 bp, Oryza sativa
  unsure (1)..(11921): unsure at all n locations
atgaggccgcttgcttcttgtaacttgtacagtaggaaggagagtggcactgcgctagtgcgctgtgagcagaagagaacacgcatgcatcatgtgttttctttctgttgtagctgatttgagcaatattaactgcattgcaatgtattttctggagtaactttgtatgcaaccgtgggttccaaaatggtgtactacttttgcccggcagaacttcgctgctggctcctgcatcaaaatgatggttatgccacgaaatgtgtatcggttcgtgccatatgatttgtaactctgtatttccctgcgttttagttctgtcatggaatgcgtattcattctccgtcgatgcatccactgaactgcagtgcaaatgcagtcagtgctcatgaagtttttcagttgcaaacttggaatatattccacagaaccacagaacttgcggtggacgaagattaactgcaggtacatgattattgaggtttattacttcaaatattaaaaaataatttatctaataatttaaaacaacttctatataagaaagttgcacaaaatgcactgtctagtagtttgaaaaacatgctaataaaaatgaggtaaaatcagtatcactgtatcacaatgagaaatgaacggactatgccttttttttttccttcttccaatcgatttcaagatgcactatggttaacggactaggccatactctttttagattactagagtgagctcgcgcgctacgctgcgcggtattgtagcatgtaagactgtaacgcacagaaagaaatgtacgattgcaaggtttgtctaagaggattacctaacaacaacagtcaattccttgtgtacctactaagaacattatttaacctgtatagttttttttttaataactgaagtcgccagaaacagttcctgatagttaataatttaaacaataatttcacaatacatagcaggggtggcaagcatagtatgactcatccaatatcaatgggcacaagatgcagttcgttatgtcaactaactgaaaatggaacatggttaaatttctcgtagttttgtttgcgaggactgcagtattaagataatatctgtaaactctagaactggccaaaaacccagtcagatgagacaatagtattgcatttatcaactatggtatgaaagaccgactacatatttcagattcattagttttaagaagagacttgacacttcactatgagaactttctgttcaagaaacatatccgcctcagcaattcagtcaacttagatcaccaggtgcaatggcaagcatctgctaaaatcatttcttgaacactaagaaaatatgtgccaagttaaatcattcctaagttaatagtttggagaattaacttagcatattgagagatgttactaagtcagtagaactcaaagtttggagaattaagtcagcacatggagagatgttactgagtcagtagaagaaactcaaattaatgaacagatcctcatttcagtcagtgttatgttactaatcagagcagtggactcttaaaatagccatgtaaatgaacttatggttcctgaaaagagacatttaaatgcaacaactgagtatccactgtgaatcaatggacgatgtatacatttacatcacctgtctgattaattagctaccaaactactttgagagttgaatatttgtatagctaaggcagttgtagatgacaaagatgatggatatacctgccttacagtatttcgaaaagaaaaagatcatcatggttaacacatgtgtagggatatttccataggtatttcaaatggttttcctgctttccgtaaaaaaaaaatggttttcctgctaagcatgagcttcaatcttgtcgcagtccttgaggagaatctatatgatattatgaaatatgttaagataaaaaagtgagcgaagtacatcaattatgcaagtgagaaaaggcagtcactactacatcagtgcaggaaacaccaattattcaagtgtgggattgaaccaccactgcagcatgatttttagcttggaaacaactttggaagtgatgtggtggcagaacacaccaatggaagagctatatctgcacaggctataaagaccatattgtttgtgctttgctgcactcaattggcttggcattgttaaactttgcactaggatcacctaggttagatctagtcgggtggttctatttgggtttgatgtttgaactatagagattgaaaacgggagagggtttagatagaccgaccggttgaggtgttggaggatgaagaagtgccggccatcgtcgtcgttggcgctcggttgtcgtggatgcggcgccggtgaggtcgacggcgatgacggctgcgggagtgacggtcgtagatgtcccggcgatgaggtctggcgcggcggtggcgcttcccgtcactggctgcgccccctctcgatcggattagggtttgtagggtggagttggcggcggcggtgaatctcgtaccatgtgccgtgccggcctccacccctcttttatatggcgcagtgtgacgggggcccaccagccattgggctgggcgcccccgatcagggcgcggtcaaggcccccttgagccgttgggctcaaggggagagagatctatctaacagtgatcacaacgaaaagatgcaaatcttagcgtacattaccaccggtagcagcaacagcgagaacagtttcaagttcaaaaattaattgtatgagatgcatatatactacttcatacaataattttttaaactgatttttaggtgctctttaaaactgatattcaaaaccttgatcagaaccaaatggctcgttagaacataatgccctatttgaatgggagagactgatttcacagaaatataagtgcctcctattcaagcagcccctaagtctatagggtgggtggggagaggagcaacgatgttggttagatggcttaattgctgttcccggattttttttttaaaaaaaaagacacgttgaacgaatactctcgacctcctttttctactggagtactttgagtcaccaacatatagatccttcttacttccaaaatataaacatttttagaatagtgtcaagttattttttttaactttaactattagtagaaaaaagatcaatcatgtaaaattgatgttactaaatttatcattaaacaaactatcataatatgcaactcttttttatttaaaacattatatatatatatattattgatcaaaatagcatctcgaaaactgtgtcgaagtttaaaaatatttatattttggaacgaatagagtatgtatccacatgttagtgatcctaaaatcacttgatttaaatcaaaggatctcagtctaggataaatcagggtacctacgtttgctactaatcaaagacccacacaagacacgttctccctccgttccgaaaaaaataaatctagtaatggatgtatacgaatctaaacatgaacaaaggtatctccagattatagttatagatatgtcacatccagtgctaaattgtttttttataggacagagggtgtaagcattgagcatgctatgtatatattcctactcctttggtcccaatataaatacacttaatgcataatataaatgcacttagtatatgatgtgatatattctaatacacatactccctctatccaaaaaaaaggcaaaccctggatttccgtgttcaactttgactgtccgtcttatatgaaatttttttataattcgtatttttattgttgttagatgataaaatatgattaatattttatgcgtaagttgtctttttacttttttttataattttttcaaataagatggacggtcaaatgttaggcacggaaatcagggtttgtttgtctttttttttatggagggagtactcttttctcaaagtagttgtacctcccaatatgatgatctatgaccacgagacatgacaacaccaacaatgaccccgaccaaaagcaacctcagtacgctctgctcagtgcttggggtcctagctgctcctatttggtgcgtgaagcaattctcactctttcttcgtctactaggagaggcgaagtagccaactaaccgcggcgatgtcggcggttgagaggaagacggcgtgcgtgaccggcggcagcgggtatatcgcttcggcgctcatcaagatgctgctgcagaagggatacgctgtcaagacgacagtcagaaaccccggtgagattcttcttacttctcaccccaacaatggtctgtagatcgtcttcagttcattgattttgtgtgtatgcggtgacgatagatccgggcagtaacagcatgctgtgtgcatagaagattttgcggtgttctgtttggtagaagataaatgctgatgtttgatttgtttcaagttgatatgaccgaagaaaactatttcgggaattcacaagaacaccattggtttggcctctgaaactgcagcgcattgtgattttgagttccagatgatatggagaagaactctcatttcaaggagttgcaagcactaggccccttgaagatcttccgcgccgacttggaagaggaaggcagtttcgacgaggcagttgccggctgcgattacgccttcctcgtcgccgctccgatgaacctcaagtctcagaatcctgaggtaaatgcatgcagacacgtagcacatctcccaccaaactcagtgccattgtggggccaagtgccactcgatgttgtccacttgtcctaggtagtaattgccacttgtcaagtctctgatcgctgccaggccactgttgattagatatcaattatgtcacattaattactattccttcctccaaaataagtttgttttttacctatctcacacaaaccaatatttacctacaagcctataatatactcactttattaaatcccaatataattatttctatttttatttattctcaatacatatatactatcatattttcaagaactctaatgtaatgattagttaaaaataaatttattttgggataaatgggagaggcttatcatactttcacatgatgtaatgattactttaaaaataaatttattttgggataaatagaaaagtctaaaactgaatttattataggacggaaggaataatatttcctcccataaaaatcttgtctctgaaataataataataataataataataataataataataataataataataataataataataataataaacaactttattatgtacgtgtccaatccaatactatgttgttttattttgaaacgggagagtacttttacttgtatcgtcacgattaatttacttggtttgtctagtaaatcctctccataataaccagctgaaataacgatctagagtattatttggtaatggcagaaagaactgttggaagccggcgtccaaggcactctgaacgttctgaggtcgtgcgtgaaagccggcacggttaagcgcgtgatcctcacatcgtcggcggccgccgtctccggccagccgctgcaaggagacggcaacggcagcagccatgtcctggacgagtcgtcctggtccgacctcgactacctcagatcaaccaacgggatatctcctgctcaggtacacacaaacttacaaaattttacatgttcagtcagagttgatagtacagtcgcttgcgtgagagcacagcggtggtgtttgcgctgcaggcttacgcgatcgccaaggttctctcggagaaggaagcgagcaagctggcggaggagaacggcatcagcttagtggcggtgtgcccggtcgccaccgtcggcgcgtcgccggcgccggtggccaacgagagcgtcgccaacgtcctctccttgctgtccggtgagtacgtaagcaccggcagtattgtttggagatcatggatggaaactctttccctccgcacggaaaacggaacagttcattaacacatgattaattaagtattagttaacttttttaaaaaaatagattaatttaatttttttaagcaactttcatatagaaagttgctgcaaaaacatattgtttagcaatttgaaaagcatgcgcgagaaaaacgagagagaagattgagaaccctcagtagcaaacacgacctaagtgtgctagaataaactccttcttccaaaaacccaacctagtattagaatgtaatataatttagtataacgagagttttcatggtatggagggagtatctggttcggactcacgtgtccgattcgatttcaggcaacgaggagatcaacaccctgagaatgattgaccagtactccggcgggctgaagctggttcacgtcgacgacctctgccgcgccgagatattcctcgccgagaaagcgtcgccgtcgccgtcggggaggtacatctgctgcgccctcaacaccaccatgcggcagatcgcccgttccctggccgccaaatacccgcaccacaacgttgacatcgatgcgtaagacaaaatcatgaactggtctcaaagattatgcgtgtccactgcgagctgactccgacggtggcggcggaacatgcagactcggcggcggcctccctgagaagccgacgatcctcctctcgtcggagaagctgaccagtgaagggttcgagttcatgtacaagacggtggatgagatgtacgatgatgccttcgtggagtacggcatggcactcgggattctgcactactgacgccgacgacaatgctgttactacccagcttcgcaaccaaacggctcttgcaaaaataagtatgtgtaaaacagcagtgaatttgttcccatccgcttttatgaaaaacgtgcctattgacacgtcaaactgttcaataaaattgtgctcctttcaacattttctcaatttctacccctcaattttcacatgcacaattaccaaacgattaaacaatatgttttttacaagataaaagtatagaaaagttgttttaaaaaaccatatcaattcatttttcaagtttttcagttaaatagtatttaattaatcatgcgctaatccgtcactccgttttatgtgtcgggaggaaaggattcacaaccctcactaaagaacacaacctaattgtggctctatgattttcttttttgaaacaagcaagagatctgtcatttcattaagtagcaaagaaaatattctggtggaacaacgaagcctcacaaggtctttcaaggtccccagttcagcatctgaagatcaggtcgtgttaggccgtgtttagttccaaaataattcttcaaactttcaacttttccatcacatcaaaacttttctacacacacaaacttctaatttttccatcacatcatttcaatttcaaccaaacttctaattttgatgtgaactaaacacaaccttagtgtgggaaagttattacagagatgcgaagacaacttcttcctccttttctaaatatttgacgccgtttgatttttttaaacatgtttgatcattcgtcttattcaaaaaaaatatgtaattattattttttttctatcatttaattcattgttaaatatactttcatgtataaatatagttttacatatttcacaaatttctttgaataagatgaatgatcaagtatgtgctaaaaagtcaatggtgtaaacatagggagtactaataacatgaactaacttgctagcttttttttttatgctagctctctcagctcaactttgcgggcatcgcaggaattactttttggtatgattaatcacacacacaaacgagaagtccaattcgcaggcatgcagcgttgggttacttttcaatggcgcgtgtgctgttcctctctcgcttttgtttgcatagagaaagaaacggatcctatcattttcaacgatgttaaatcgtcacaggcttcagcgtcagatgtactacctctatcctaaaaaaaaaagttcaattctaagaatgaacctgtacacacgtcatctgggaagataagatgatccttttttcttggagcaaaagctttaccttttgaaaacacgatcgaccgcattaaaaatgtgaagcgtgagatgttcatcgatcgacataatcgatcagtgcaggtcattatctaaggaaggaaaatcaatcagaagagcaggtatggtgcatgcatcacgaaaagcatttcttgttctgcctctctgtctggcgactggcgtcgtcgcttgtaaaatagtgttggctaagtcaaatgtattatgttcctgctctccgggatttgtcctggcaagtgccacaacagcgcaatcagcaaaagaaacctcatcatcagtgtgctgctcggattctacctgggagtaaacccaagtcaccttctctgtcacaggagaggtattaactgaccggagagagagagagagacgatgtcgtcggaggttgagaggaagacggtgtgcgtcaccggcggcaacgggtacgttgcttcattgctcgtcaagatgctcctggagaaaggatacgctgttcagacaagcgtcagagatcccagtgagattctactccctttctttcttgttacatgtttttccagtgttcagttttaactgaaaatcgaagaacatgtcatcagttcataatttgtttcagaggagtatttgcacgttcagttttgggattgattgtgtcagtacaattttggtttggcctctgaaactgcttttgtaactctgaatttcagataacccggagaaggtctcccatttcaaggacatggaaaaactcggccccctgaaggtctttcgcgccaacttggaggatgaaggcagcttcgacgaggccgtcgccggctgccactacgccttcctcgtcgccgctccggtgtacgacaagagccacaagtccgacgatctcgaggtgaccactgctgcaacctgcaagctcgattagtatctgtagtcagttagttagttactgaattctgaacttggccatggcagaaagagatagtccaaggcggcgtcgagggcacactgaacgtgatgaggtcgtgcgcgagagccggcacggtgaagcgcgtgatcctgacgtcgtcgacggccgccgtctccagcctgcggccgctggaaggcgccggccatgtcctcgacgagtcgtcctggtccgacatcgagtacctcagatccatggagaagctgtcgccgacgcaggtacacatatatacacacgagctgttccatgtcactgaaccacagcaatgtctcgtagaacatgagttcggcgccattgttgctgcatgcactgcaggcgtactcgatctccaaggttctttcggagaaggaggcgaccaagttcgcggaggagaacggtctcagcctggtgaccctctgcccggtcgtcgccgtcggagcatcgccggcggtgagggtcgataccagcgtcccggcctgcctctcgttgataaccggtgaggaactatctagcgatcaccgaatgaatgaaacaagaagcaatccaagaactcgacttctgaacgtttttgggtcgctgcatcgatgatctgtgaattttttttttcaggcgacgaggagatgatgaacatcctcaagggcatcgagaaggcgtccgggtggtcgatgccgatggtccacatcgaggacgtgtgccgcgccgagatcttcgtcgccgaggaggagtcggcgtcggggaggtacatctgcggcagcctcaacaccacggtcaccgagatcgccggcttcctggcggccaagtacccccagtacaacgtcagatgcgattggtaattaagaaattaagctttatgcattcgtgcatttggttatctgaatctgatcatgcgttgctatgtacgcagcatcgaagagcatcaccccgagaagccgaccatctcgctctcgtcggcgaagctcatcggcgaagggttcgagttcaagtacaagaacctggacgagatgtacgacgacctcgtcgcgtacggcaaggccctggggttgatccccaactgatggtgatgatgggcggcgtaattccactgctttggcgattacgaccaaacgtgtgttgctttcaaaaatactattgtgtctagcattctattgctacattgctagtagtactagtaccaagttccaatacatttggcggtttggctgtacttcgttctgttcatgtaagaggaggattgagaatttgagatcctcttagggggtaagctgtctaattctccggaaaggattagctgaaatcctctaatagtttttgcaataccaacgtactttcccggtttnnnnnnnnnnnnnnnnnnnnnnnnnnnnnaaaaaaaaggttgtgtttagtttcttggccaaattttttttagtatacggatatacatttgaagtattaaacgtagactaataacaaaacaaattacagattccacatataaactgcgagacgaatttattaagcctaatgtgtccatcattagtaaatatttactgtagcatcacattgttaaatcatggcgtaattagactcaaaaaattcgtctcataatttacatgcaaactgtgtaattggtttttttccacaaataatactccatgcacgtgtccaaacattcgatgtgacctttttagcaaaaaaaaaaaatctaaacacggactaagccacatgactttgagtcactaacatgtgggccctctttactatggatccatgtgaatccgtaatgggaatgttgtggtctggcacgcgttgaaaaaaaaaaaactctctgaacagcgtttctacctgctgcgacactgctgctgctgtcaggtgcagccgagcaggttgagaaggccaaggccacaaatcgatcggtcaattgctcacgctacacgacggcatgcggatgcgggcaatgcgagcatgcaaaaaccacagacgtcacacgctgcctggctctgtcacgtactggccacctcgtgtttcacctgggcacggtggccggcctgatcttttgtgcagtgcgtggacgagatttttgagcgcgacgggcacgtaaccaggcaccggggcgatggatgcgcggcaagccggcaacgacaatatccttggcatcaacctccgccggtcgtcaacgtgggactagggatggcaattgtgcccgtttgcccgtttacccgcgggtaaaaaccctattagggttgggtttgttctccattttatacccatgggtatcttattgggtcaaaagctatgcccgatgagtaaatgggcatgggtatgggtaatcactacccatgcccgctttgcccgtttacccacgaaatctaacttatatgtaggctaggagcaaaatccactagaatacataagcccagttctttgatttcttcggtttcccttttatttcccttattatttctctcctcttactctatcgccgccagaggagagacacgacaccgaggtggagaatatttgatgttttaagttcgattcgaacttagtagcttgtagactttttgttccactgcttttgttgtggcgggtaaacgggcacgcccgcgggcaatgggcataggtaaccatccttacccgtcatgtagtaatgggtatacccacgagcacaaataatctcacgggcatgggtataggtaggcactacccgtgcccgtcgcgcccgattgccatccctacgtgggacaaggcgaacggtggaaattagtgcagagaaatcagtcaacggatcgcgcatgcgacctcccgctcactcccggcgcgtggtcgcgcattcccgatcccctccctcgcgggctcgcggcccaccgcggcctgctagctttctagcgcgcgcgatgggctgcccctgcctgctcggcatcagccccaattaggaaaaagtggatttttt

SEQ ID NO: 5212 - DNA, 35206 bp, Oryza sativa
ccaccgactccgaacatcaggccacttagctggaagtcccttctcatcccaaccgttctgcaagtagtcaatagcccgcaacatacccgcatgacgatcatgtataaggcaaacgttgggcctcatacgcaccactgcaatgtgcactctctctaggaaccaataccagctttcagtgttctcactctctacaaatgcaaaagccataggtagaacctggttgttcccatcacacccaattgctgtcaatatctgacctcggtatttacctgtcataaaagttccatctatgcatagaacaagtcgacaatgcacaaaagcattgatgcaagcacccaacgagaaaaaggctctttgcagcacactctttgttcgatcatcaactgatgtaaatgtatgtaggtcatagtaagtattattattcctctgggcaatggtggctaacaaacgaggcaaattatcataagaagcttcaaatgtgccatacctcatctcaataatcttttgtttggctctccaggcctttgcatagcttatggtgtacttgaatttgttctcgatgtgcctaataattgattttggttcaaagccaatgttaccaacaacactgctgtacatctcacttgccacaaaaagctgaagtgatgtttcggtgatacttctccaccccttgtaagtagcacttgtgctcggtcacaatgctaactttccaataatcattccatttacccttatatgcatggacacgccacggacaatcttccttcatgcacctcacttcatacacataatttgttgacttgaccaccctaaactctctctgcaaggaaactgcccaatgcttcaccgcctccttcatctcatccttatgagcataccttgcaccctcaattacctcgttctccttatactcccagggtacatgatcaccctctgatataacaagtccagagaagtcctcatttgcccaatcagtggccattacatcactttcctcatcggatgatgcgtcgtcgtccgcttcctcattatccgaatcttccctctccatttcatcaacaattataccgactctctccccctcatccgccatgcccatggcctgctcctcccttggttgattttcctcattttgcatcgatggtccaacaacatcccctgcattgataggaccctctacatcttcggtttgcattgaaacatttatatctttctcttgtaccgacacaaatataacgaggggccatgaccgttcaaaagccatttccacataccgtctccaagcagcagtgctgtccatcggcattagttcccaaaaataaccttctgttgcacgactcactacaactgatactgacattgtgtagacttcttggtctattctaaatcctctcaacaaccaactataaattgactgaaatgttctctccgcaggcctatcgatgcccttagatgtcattacaaaatctgacagatcaacaccatctggaccaaatctaatatttccttcaccgtgaactatctaaaatgtgaccttatttgacattgtgcctgatgaaaacaataactgcgttaacctcgcatttctgtactacgccctaagttacattctctacaatattgttctccaaaattctaaaagtaggttacattctccagatcaaactaaactacatcttacaattaacactactgtctatgtctcaattcatactattatattctatgctctggatctacacatatgtgctgtgtgctacagatctgctaaaatatatggaactaaaactaaaacgcaacatatatactcaaacataacatattagtacaaatgtaaaagatgtatgggagcatacctgtgatgaagtgagcgaaccagcagggcttcgccgctccccttctgctgccctcccctctctctctttcgttttttttggatttttagtgaatataatgaaatttcagagaggagggactgggctttataggggggaggcaaaaatcgccctcccccagggcggcaagggggccgcctgcaaaattccatgccccctcgccgcccatttgcaggcggccccccgcacagtacaaaatcgccctagcggagggcggcaagggggccgcctacaaatttcgttgacggccgtcgcccgagagcgaacggccgtctgccacgtcatttttgccgccctctgggatggcgatttttaaaaatcgccctcccagagggcggtaggcgactacttccgtcaattttcaaaatgaaaaattatttttgtaaaacttttaataaaaaaattaaaaataaaaaaaaatccactttttcctaattggggctgatgccgagcaggcaggggcagcccatcgcgcgcgctagaaagctagcaggccgcggtgggccgcgagcccgcgagggaggggatcgggaatgcgcgaccacgcgccgggagtgagcgggaggtcgcatgcgcgatccgttgactgatttctctgcactaatttccaccgttcgccttgtcccacgtagggatggcaatcgggcgcgacgggcacgggtagtgcctacctatacccatgcccgtgagattatttgtgctcgtgggtatacccattactacatgacgggtaaggatggttacctatgcccattgcccgcgggcgtgcccgtttacccgccacaacaaaagcagtggaacaaaaagtctacaagctactaagttcgaatcgaacttaaaacatcaaatattctccacctcggtgtcgtgtctctcctctggcggcgatagagtaagaggagagaaataataagggaaataaaagggaaaccgaagaaatcaaagaactgggcttatgtattctagtggattttgctcctagcctacatataagttagatttcgtgggtaaacgggcaaagcgggcatgggtagtgattacccatacccatgcccatttactcatcgggcatagcttttgacccaataagatacccatgggtataaaatggagaacaaacccaaccctaatagggtttttacccgcgggtaaacgggcaaacgggcacaattgccatccctagtcccacgttgacgaccggcggaggttgatgccaaggatattgtcgttgccggcttgccgcgcatccatcgccccggtgcctggttacgtgcccgtcgcgctcaaaaatctcgtccacgcactgcacaaaagatcaggccggccaccgtgcccaggtgaaacacgaggtggccagtacgtgacagagccaggcagcgtgtgacgtctgtggtttttgcatgctcgcattgcccgcatccgcatgccgtcgtgtagcgtgagcaattgaccgatcgatttgtggccttggccttctcaacctgctcggctgcacctgacagcagcagcagtgtcgcagcaggtagaaacgctgttcagagagttttttttttttcaacgcgtgccagaccacaacattcccattacggattcacatggatccatagtaaagagggcccacatgttagtgactcaaagtcatgtggcttagtccgtgtttagattttttttttttgctaaaaaggtcacatcgaatgtttggacacgtgcatggagtattatttgtggaaaaaaaccaattacacagtttgcatgtaaattatgagacgaattttttgagtctaattacgccatgatttaacaatgtgatgctacagtaaatatttactaatgatggacacattaggcttaataaattcgtctcgcagtttatatgtggaatctgtaatttgttttgttattagtctacgtttaatacttcaaatgtatatccgtatactaaaaaaaatttggccaagaaactaaacacaaccttttttttgtggcagaagtttttaccggttctccgggaaaccgggaaagtacgttggtattgcaaaaactattagaggatttcagctaatcctttccggagaattagacagcttaccccctaagaggatctcaaattctcaatcctcctcttacatgaacagaacgaagtacagccaaaccgccaaatgtattggaacttggtactagtactactagcaatgtagcaatagaatgctagacacaatagtatttttgaaagcaacacacgtttggtcgtaatcgccaaagcagtggaattacgccgcccatcatcaccatcagttggggatcaaccccagggccttgccgtacgcgacgaggtcgtcgtacatctcgtccaggttcttgtacttgaactcgaacccttcgccgatgagcttcgccgacgagagcgagatggtcggcttctcggggtgatgctcttcgatgctgcgtacatagcaacgcatgatcagattcagataaccaaatgcacgaatgcataaagcttaatttcttaattaccaatcgcatctgacgttgtactgggggtacttggccgccaggaagccggcgatctcggtgaccgtggtgttgaggctgccgcagatgtacctccccgacgccgactcctcctcggcgacgaagatctcggcgcggcacacgtcctcgatgtggaccatcggcatcgaccacccggacgccttctcgatgcccttgaggatgttcatcatctcctcgtcgcctgaaaaaaaaaattcacagatcatcgatgcagcgacccaaaaacgttcagaagtcgagttcttggattgcttcttgtttcattcattcggtgatcgctagatagttcctcaccggttatcaacgagaggcaggccgggacgctggtatcgaccctcaccgccggcgatgctccgacggcgacgaccgggcagagggtcaccaggctgagaccgttctcctccgcgaacttggtcgcctccttctccgaaagaaccttggagatcgagtacgcctgcagtgcatgcagcaacaatggcgccgaactcatgttctacgagacattgctgtggttcagtgacatggaacagctcgtgtgtatatatgtgtacctgcgtcggcgacagcttctccatggatctgaggtactcgatgtcggaccaggacgactcgtcgaggacatggccggcgccttccagcggccgcaggctggagacggcggccgtcgacgacgtcaggatcacgcgcttcaccgtgccggctctcgcgcacgacctcatcacgttcagtgtgccctcgacgccgccttggactatctctttctgccatggccaagttcagaattcagtaactaactaactgactacagatactaatcgagcttgcaggttgcagcagtggtcacctcgagatcgtcggacttgtggctcttgtcgtacaccggagcggcgacgaggaaggcgtagtggcagccggcgacggcctcgtcgaagctgccttcatcctccaagttggcgcgaaagaccttcagggggccgagtttttccatgtccttgaaatgggagaccttctccgggttatctgaaattcagagttacaaaagcagtttcagaggccaaaccaaaattgtactgacacaatcaatcccaaaactgaacgtgcaaatactcctctgaaacaaattatgaactgatgacatgttcttcgattttcagttaaaactgaacactggaaaaacatgtaacaagaaagaaagggagtagaatctcactgggatctctgacgcttgtctgaacagcgtatcctttctccaggagcatcttgacgagcaatgaagcaacgtacccgttgccgccggtgacgcacaccgtcttcctctcaacctccgacgacatcgtctctctctctctctccggtcagttaatacctctcctgtgacagagaaggtgacttgggtttactcccaggtagaatccgagcagcacactgatgatgaggtttcttttgctgattgcgctgttgtggcacttgccaggacaaatcccggagagcaggaacataatacatttgacttagccaacactattttacaagcgacgacgccagtcgccagacagagaggcagaacaagaaatgcttttcgtgatgcatgcaccatacctgctcttctgattgattttccttccttagataatgacctgcactgatcgattatgtcgatcgatgaacatctcacgcttcacatttttaatgcggtcgatcgtgttttcaaaaggtaaagcttttgctccaagaaaaaaggatcatcttatcttcccagatgacgtgtgtacaggttcattcttagaattgaacttttttttttaggatagaggtagtacatctgacgctgaagcctgtgacgatttaacatcgttgaaaatgataggatccgtttctttctctatgcaaacaaaagcgagagaggaacagcacacgcgccattgaaaagtaacccaacgctgcatgcctgcgaattggacttctcgtttgtgtgtgtgattaatcataccaaaaagtaattcctgcgatgcccgcaaagttgagctgagagagctagcataaaaaaaaaagctagcaagttagttcatgttattagtactccctatgtttacaccattgactttttagcacatacttgatcattcatcttattcaaagaaatttgtgaaatatgtaaaactatatttatacatgaaagtatatttaacaatgaattaaatgatagaaaaaaaataataattacatattttttttgaataagacgaatgatcaaacatgtttaaaaaaatcaaacggcgtcaaatatttagaaaaggaggaagaagttgtcttcgcatctctgtaataactttcccacactaaggttgtgtttagttcacatcaaaattagaagtttggttgaaattgaaatgatgtgatggaaaaattagaagtttgtgtgtgtagaaaagttttgatgtgatggaaaagttgaaagtttgaagaattattttggaactaaacacggcctaacacgacctgatcttcagatgctgaactggggaccttgaaagaccttgtgaggcttcgttgttccaccagaatattttctttgctacttaatgaaatgacagatctcttgcttgtttcaaaaaagaaaatcatagagccacaattaggttgtgttctttagtgagggttgtgaatcctttcctcccgacacataaaacggagtgacggattagcgcatgattaattaaatactatttaactgaaaaacttgaaaaatgaattgatatggttttttaaaacaacttttctatacttttatcttgtaaaaaacatattgtttaatcgtttggtaattgtgcatgtgaaaattgaggggtagaaattgagaaaatgttgaaaggagcacaattttattgaacagtttgacgtgtcaataggcacgtttttcataaaagcggatgggaacaaattcactgctgttttacacatacttatttttgcaagagccgtttggttgcgaagctgggtagtaacagcattgtcgtcggcgtcagtagtgcagaatcccgagtgccatgccgtactccacgaaggcatcatcgtacatctcatccaccgtcttgtacatgaactcgaacccttcactggtcagcttctccgacgagaggaggatcgtcggcttctcagggaggccgccgccgagtctgcatgttccgccgccaccgtcggagtcagctcgcagtggacacgcataatctttgagaccagttcatgattttgtcttacgcatcgatgtcaacgttgtggtgcgggtatttggcggccagggaacgggcgatctgccgcatggtggtgttgagggcgcagcagatgtacctccccgacggcgacggcgacgctttctcggcgaggaatatctcggcgcggcagaggtcgtcgacgtgaaccagcttcagcccgccggagtactggtcaatcattctcagggtgttgatctcctcgttgcctgaaatcgaatcggacacgtgagtccgaaccagatactccctccataccatgaaaactctcgttatactaaattatattacattctaatactaggttgggtttttggaagaaggagtttattctagcacacttaggtcgtgtttgctactgagggttctcaatcttctctctcgtttttctcgcgcatgcttttcaaattgctaaacaatatgtttttgcagcaactttctatatgaaagttgcttaaaaaaattaaattaatctatttttttaaaaaagttaactaatacttaattaatcatgtgttaatgaactgttccgttttccgtgcggagggaaagagtttccatccatgatctccaaacaatactgccggtgcttacgtactcaccggacagcaaggagaggacgttggcgacgctctcgttggccaccggcgccggcgacgcgccgacggtggcgaccgggcacaccgccactaagctgatgccgttctcctccgccagcttgctcgcttccttctccgagagaaccttggcgatcgcgtaagcctgcagcgcaaacaccaccgctgtgctctcacgcaagcgactgtactatcaactctgactgaacatgtaaaattttgtaagtttgtgtgtacctgagcaggagatatcccgttggttgatctgaggtagtcgaggtcggaccaggacgactcgtccaggacatggctgctgccgttgccgtctccttgcagcggctggccggagacggcggccgccgacgatgtgaggatcacgcgcttaaccgtgccggctttcacgcacgacctcagaacgttcagagtgccttggacgccggcttccaacagttctttctgccattaccaaataatactctagatcgttatttcagctggttattatggagaggatttactagacaaaccaagtaaattaatcgtgacgatacaagtaaaagtactctcccgtttcaaaataaaacaacatagtattggattggacacgtacataataaagttgtttattattattattattattattattattattattattattattattattattattattattattatttcagagacaagatttttatgggaggaaatattattccttccgtcctataataaattcagttttagacttttctatttatcccaaaataaatttatttttaaagtaatcattacatcatgtgaaagtatgataagcctctcccatttatcccaaaataaatttatttttaactaatcattacattagagttcttgaaaatatgatagtatatatgtattgagaataaataaaaatagaaataattatattgggatttaataaagtgagtatattataggcttgtaggtaaatattggtttgtgtgagataggtaaaaaacaaacttattttggaggaaggaatagtaattaatgtgacataattgatatctaatcaacagtggcctggcagcgatcagagacttgacaagtggcaattactacctaggacaagtggacaacatcgagtggcacttggccccacaatggcactgagtttggtgggagatgtgctacgtgtctgcatgcatttacctcaggattctgagacttgaggttcatcggagcggcgacgaggaaggcgtaatcgcagccggcaactgcctcgtcgaaactgccttcctcttccaagtcggcgcggaagatcttcaaggggcctagtgcttgcaactccttgaaatgagagttcttctccatatcatctggaactcaaaatcacaatgcgctgcagtttcagaggccaaaccaatggtgttcttgtgaattcccgaaatagttttcttcggtcatatcaacttgaaacaaatcaaacatcagcatttatcttctaccaaacagaacaccgcaaaatcttctatgcacacagcatgctgttactgcccggatctatcgtcaccgcatacacacaaaatcaatgaactgaagacgatctacagaccattgttggggtgagaagtaagaagaatctcaccggggtttctgactgtcgtcttgacagcgtatcccttctgcagcagcatcttgatgagcgccgaagcgatatacccgctgccgccggtcacgcacgccgtcttcctctcaaccgccgacatcgccgcggttagttggctacttcgcctctcctagtagacgaagaaagagtgagaattgcttcacgcaccaaataggagcagctaggaccccaagcactgagcagagcgtactgaggttgcttttggtcggggtcattgttggtgttgtcatgtctcgtggtcatagatcatcatattgggaggtacaactactttgagaaaagagtactccctccataaaaaaaaagacaaacaaaccctgatttccgtgcctaacatttgaccgtccatcttatttgaaaaaattataaaaaaaagtaaaaagacaacttacgcataaaatattaatcatattttatcatctaacaacaataaaaatacgaattataaaaaaatttcatataagacggacagtcaaagttgaacacggaaatccagggtttgccttttttttggatagagggagtatgtgtattagaatatatcacatcatatactaagtgcatttatattatgcattaagtgtatttatattgggaccaaaggagtaggaatatatacatagcatgctcaatgcttacaccctctgtcctataaaaaaacaatttagcactggatgtgacatatctataactataatctggagatacctttgttcatgtttagattcgtatacatccattactagatttatttttttcggaacggagggagaacgtgtcttgtgtgggtctttgattagtagcaaacgtaggtaccctgatttatcctagactgagatcctttgatttaaatcaagtgattttaggatcactaacatgtggatacatactctattcgttccaaaatataaatatttttaaacttcgacacagttttcgagatgctattttgatcaataatatatatatatataatgttttaaataaaaaagagttgcatattatgatagtttgtttaatgataaatttagtaacatcaattttacatgattgatcttttttctactaatagttaaagttaaaaaaaataacttgacactattctaaaaatgtttatattttggaagtaagaaggatctatatgttggtgactcaaagtactccagtagaaaaaggaggtcgagagtattcgttcaacgtgtctttttttttaaaaaaaaaatccgggaacagcaattaagccatctaaccaacatcgttgctcctctccccacccaccctatagacttaggggctgcttgaataggaggcacttatatttctgtgaaatcagtctctcccattcaaatagggcattatgttctaacgagccatttggttctgatcaaggttttgaatatcagttttaaagagcacctaaaaatcagtttaaaaaattattgtatgaagtagtatatatgcatctcatacaattaatttttgaacttgaaactgttctcgctgttgctgctaccggtggtaatgtacgctaagatttgcatcttttcgttgtgatcactgttagatagatctctctccccttgagcccaacggctcaagggggccttgaccgcgccctgatcgggggcgcccagcccaatggctggtgggcccccgtcacactgcgccatataaaagaggggtggaggccggcacggcacatggtacgagattcaccgccgccgccaactccaccctacaaaccctaatccgatcgagagggggcgcagccagtgacgggaagcgccaccgccgcgccagacctcatcgccgggacatctacgaccgtcactcccgcagccgtcatcgccgtcgacctcaccggcgccgcatccacgacaaccgagcgccaacgacgacgatggccggcacttcttcatcctccaacacctcaaccggtcggtctatctaaaccctctcccgttttcaatctctatagttcaaacatcaaacccaaatagaaccacccgactagatctaacctaggtgatcctagtgcaaagtttaacaatggtatcagagcaaccctagtgtttagatcgtttcggggaaagaaatccaaagaaagaaaagcacaagatccgcacggatcaaaagaaccaaaaaccctaaccctaattcttacctcgtcgccggccgtcgttgacgccggcaacggagggggggaggggcaaagaggcgccgcctaggagccactcgacggccgcgcgcgcacctgcacgcgcgtgccggcgagggggcccgcggcggcgccgccatcttcgtagtcgccatctctctctcacacggtgggggttagagacggtggggggagcggagaagagaaaagaaaggagcgccggccatggctcggcggcgcgaaggtcccgggcgatgccaacgcagtcacatgcggtcgcgtgagagagagaagagaggagaagctagggtttcggcggccgcccggggcacgaggggttttgatccccgttttcggcgcccggccgtccgatcgcaaaccctaagatcggacgtccggcggcggccggaccgaaatcggcccaagtggggagcgcgcggcggcggctttcccggcccaggcccaggttgcggcctgggggaggggagggggcgctcgcccgcgcgcaaggtggccatgggccgaccggcaaaggccggaacaaagtccatattaggtccctccggggccgaaaatgaataaaagagaacagtagcaatttttccattttattttgtcaattttcatgcaaatttcaatagaattttgaatagatttttgcatgttttacctctgtttaaatttgaaccaacgggagaattttcacagagagagaattacagagatttagctactgttcatatgattttatatagtcttccgctgcaaatagatgaaattgatgaaaattagtgtttctaaaattaaatttcgaaccaacgggagaatttaattttaggaacattaattatgtgctatgatgttgtaattttctgaccaacgttgttaattgcaatattatagttatggttatatgtgttatgtctaattctgcccaacggtgatgtaggcttaatgcataatattttaatgttaattttgttctcaccgcacatgattatttcaggtggctactccttgatgggttgcattaaagatattccgaccctaaaaggagataactacgcagaatggaaaagaaaactcgaccttgcttttatcttgggagaggtggactgggtattgactaccccatgtcctatagaacctgctgaccttgtcagaggtgaaaatgagtcagatgctgactggcaaaagagacagagggacaatgctcctctcgtcatgtcgtatgacattgaacaaaagaaatggtccttagccaacaagaaatgtttggctgtggtaaagaatacgattgagcctaccatattgggctcgatcccagagtgtgacgctgtctcagagtaccttgaaagaataaagagtcagtttactggctcttcaaagacttatgctacacagctgatcaagcagcttgtgacagaaaggtaccatggaggtggtgttagagaccacatacttagaatgagcaacatggcttccaaattgaagccaatggatttgggcataacagatgactttctggtccatctggttatggcctcattgccaaagcagtttgacaattttattgtcaactacaacataagtccagagaaatggaactttgagaagctcattgctaattgtgtgcaagaggaggagagaatcaaagaatcaaatggtggttcaataaactatgttaaagataagaaaaagaaccacaagtctcccacctcaaaaggtaaacagtctcagcatctgcctcaacaacaacagttcgctgttgagaaagatcaatgtctccactgcaagaagacaggacactacaagaaagattgtcctgactttttgaaaatgatcatggcaaagaaaggtgagaacattattacatttgtaaatgaatctcattatgttggttactctagatccacatggtggattgattctggagcaactattcatgcttgtaattgtttaaaggcattccgttcgacgaggactacgcaaagaagagaaagcaccattagagttgccaatggagttgaagaaaaagttgaagctgttggagatcttcctctagagctcgcgaatggcttcatacttttacttcgagatgtcttttatgttccttctttgcaaaggaacttaataagtgtatcaaagttggattttgatggatatgattgccgctttggaagtggcaaatgtgaactatggcataataatgcatgtattggtcttgctgtgttgcgagacgagctttatttgttatctctttctgagaatgtgaatgttgtgtcctcgttgacaaaagaaaacaagaaaagaaagcgaactcccgatgtctcatcgaaattatggcactgtcgtttgggccatatttcgagggggagaattgagagactagttaagaatgaaattcttcctccattggagttctcagacttagaacaatgcatagaatgcattaaaggaaaatttgtaaagagcatcaaaaagggtgcaaaacgaagcgcgggaattttagagatcattcatacagatatttgtggtccatttcctgtgaaaagtgtggatggctatgactcgttcataacattcacagatgattactcccgctatggttatatttatccaattaaagagcgatcagaagcattggataaatttaagatattcaaagctgaagttgaaaatcagcatgatataaagattaaagtagtaagatctgaccgtgggggggagtactatggtcgacatacgccttatgggcaagtccctggaccttttgcaaggttcttgctagagaatggaatagtagcccagtattcaacaccgggcgaacctcaacagaatggggtagctgaaaggcgcaaccgtacccttatggatatggtgcgcagcatgatgagctactccacactaccactcggtttatggatggaggcgttaaaaaccgccattcatattctcaacagagttccaagcaaatcggtgcccaaaacaccgtatgagctatggacaggaagagtaccctcgctaactcacctccgtgtgtgggggagtcctgcagaggccaaagtatttaacccaaatattgggaagttggaccccaaaacagtcagctgccattttattggctatcctgaaagatcaaaaggctatcgtttctactgtccaaacagttatacaaagtttgtagaaacgagacacgccgtcttcttggaagacgaaatgattagggggagctcggtagttcgagaaattgatcttgaggagaggcgggtgtctgtacccgctccgtcgactcaggaacctttcttctctctacctgctgatgttgtgcctgcaatgcctgtcattgaggtaccagcacctgttgttacccctcctgtggcaacaatgaatgagagtgaggaacctgttatacaggattcaacagaaatggttgccacaccagaggaggagctacaacaacctcaaatagataatgtgccagtacaggagactcatcaagagcctcaggtacaggatgtgccaaatgtgcaggcccctagaaggtctgaaagagtcagaagatcggctatccgtgatgactataaagtttataatatagaagagtcgcatatggaggatgatcccacctcatatgaagaggccatgagaagcgctcgctcatctgaatggttggaagccatgaaagatgaaatggaatcaatgaaactaaacgatgtttgggatttagaagaaattcctaaaggagccaaaacagtaggctgtaaatgggtctacaaaaccaaatatgactccagagggaatatagaaaagtttaaagcgcgacttgtggcaaaaggcttcacgcaacgagaagggattgattacaatgagacattttctccagtctcttgtaaagattccttcaggattataatggcactagtggcacattatgatttggaattacatcagatggatgtaaaaacggcatttctaaatggagatttggaggaaaaagtatacatggcgcaaccaaaaggttttgtcatgaaaggaaacgaaaatatgggatgtcgtctaaagagatccatttatggattaaagcaagcttcgagacagtggtacttgaagtttgatgggacaataaataaatttgggtttcaagagaatgtcgaggacaactgtatttattcaaagtttaagaatgggagatttattttcctaattctgtatgtggatgacattctactggctagtagtgatgtcagtctactgcaggaaacaaagaaattcttgtcctcaaactttgacatgaaagacctcggtgaggcttcatatgttttgggcatagagattcaccgagatagaacaaagtatgcattgggactttctcaaaagacatatatagaaaaggtgttgaagaaattcaacatgtacagatgcagtgctacacctgctcctataatgaaaggcgaaaagtatggggcatcgcaatgtcccagaaatcagtatgagctcaatgaaatgaaaacaaagccatatgcgtcagctgtaggaagcctacagtacgcgcaagtgtgcacacgacctgacttggcatttgttaccgggttacttggcagatttcagagtaatccaggcctagagcactggaaattggtaaagaaagtcttgcgttatttgcaaggaacaaaaggcctcatgctgtcttacagaagatcagaatcactccagatagtggggtactcagattctgactttgcaaaagataatacaaagtcaacatcgggatacgtgtttaccctggcaggaggagctatttcatggaaaagctcaaaacagactatcactgcagggtctactatgtatgccgagtttatagcatgctatgaggcaacggggcaggtgaactggctaaagaagttcatacccggtttaaaggtggttgacagtattgagaaaccactaaagttatactgcgacaacgaacccgcagtaatgtacactcacaacaatcagtcaagtggtgctgccaaacacattgacataaagtactatgttgtgaaggacaaagtccgggatcaaacaatcagtctcgagcacattaaaacagaaaggatgctcgcggatccgctcacgaaaggcctaccacccaacgtgttcaaggaacatgtagccggcatgggtttaagggaagccttatgaatcctggactacagggcccaaaagtaaagtatctgtttctgaatagagatgtgtatagtggctgtcgaatccatcggcgattgaccgtgacgatgaaacatgctctatttacaaatctgtgatggaatagaaaaagctaaaagaaaaagtgagatcaagggggagaatgttagatagatctctctccccttgagcccaacggctcaagggggccttgaccgcgccctgatcgggggcgcccagcccaatggctggtgggcccccgtcacactgcgccatataaaagaggggtggaggccggcacggcacatggtacgagattcaccgccgccgccaactccaccctacaaaccctaatccgatcgagagggggcgcagccagtgacgggaaacgccaccgccgcgccacgcctcatcgccgggacgtctacgaccaccactgccgcagccgtcatcaccgtcgacctcaccggcgccgcatccacgtcaagccgcgacgacaacgacgatgtccggcgcctcttcctccacgaactcctcaaccggtcggtatctaaaccctctccctttcatctacaatgtcgttcatcaaacccaaatagaaccacccgactagatctaacctaggtgatcctagagcaaagtctaacaatcaccaccagagaaacagatgatatacgaggggaacaacatcgttatcagtatggcagaatcccgagggctctaccgtactccaagaaggcatcatcgtacatctcgtccagcgtcctgttcttgaactcgaacccttctccggcgagcttctccgacgagaggcggatcctcggcttctccgggaggtcgccgaggctgcatgaaagttcaccatcgtcagagctctcgataagatcatggagacgcatggggaattattactcagtgagatcagctcgatcttacgcggcgacgtcgacattgtactccgggtatttggccgccaggaagcgggcgagctgcagcatggtggcgctgaggccgcagcagatgtacctctccgccgccgccgccgccgccgccggcgggggcttctcggcgaggaatatctcggcgcggcagaggtcgtcgacgtggaccagcattagcccgccggtggccttctccatgagcttcacggtgctgatcatctcctggtcgcctgaaagaaaatcaagagatgaacaaataaatttcacaggaattgcttttcgttgccgcatttgccatggaccggccggttcttgattcgattagttatcaccggagagcaaggagaggacggcggcgacgcacggtttggcctccgctgccggcgccgggccaacggtgaccaccgggcaaacggtcaccaggctgatgccgttctcctccgcgaccctgctcgcttccttctctgaaagaaccttcgaaagcgagtacgcctgcattgcatccatgtcttaatattttcgatatgcacaaatctatcagggacccaaaaaagtttgaaatttaaacaaatcttgaccgaatttaaatatttttttctaaattaaaaaaaatatgaaatatttggatgaagtaaatgcttgccggaaatttcgaaccgaaattgtaaacgctgattgcatcagcacacggagctgttctcatgtggccgatttaatgggctctgagcctctgattgactgacctgtgttaaataaaatctgtaattttgtgtgtacctttccgggagatgtcttgttggctggtgagctgaggtagtcgacgtcggaccatgacgactcgtcgaggacatggccgtcgccttgcagcggcctgccggagacggcggccgccgacgatgtgaggaccacgcgcctcaccgtgccggctctcacgcacgacctcatcacgttcagagtgcctcgtacaccggcttccaccagttctttctgtcattaccatcaggctgaccaagtaaaaaacaaaactactcccttcgtacaaaaaaaaaatctataactgattatgatacatttagtataacgaatctggatagagatatattcagattcatagtattaggatatgtcacatctagtactgattggtttctatgagacagaaggagtgcgtgtatgtgattctgtgtatgtgtctgtgtcatcgcaacagaaagtagcattgtttcgcttatttaaatcgcttattagtaaataaaaataaactatgatgagaaaaagatcaaacttaaaattaagttctaaattttaaatgttagcttgtaaatgtaagcataagccaacaatgaagagtgaagtgcaaagagacatttttatggaggaatacttagtatcattaatggcctggcaaccataagagacttgaggagtggcaaccaccatctagctaaatccataaagataatcttaaaatatgtttccccttcctccgttttatactataagatgatttaactcttttctaattatgttttattatgataagttcataaaaaaaatacagaacatttctcacatataacaaacataccatctaaatacattcaaagttatttttaatgaaactaatttgatgttataaatattattaaattttctataaacttaatcaaattgttgtagacggctatgtaatacctgagggttctctgacttgaggttcaccggagcagcgacgaggaaggcgtaatcacagccggcgaccgcctcgtcgaagctgccttcctccttcaagtcggcgcggaagaccgccaggggaccaagtgcgtgcaagtccttgaagtgggagttcttctccatgttttctgcgactcaaaattgcaatgtgtagcagcagtttcagaggctaaaaccaaattcctttttaaaaaaaaaaagaaaagaaaaacgaggttaaaaccactgatgctactgcaaatctatgcacgagtatgcacgaaattatgaactgaagaagaagaatctcaccggggtttctgactgtcgtgttgacagcacatcccttctgcagcagcatcttgatgagcgccgaagcgatgtacccgttgccgccggtgacgcacgccgtcttcctctcaaccgccgacatcgctggtcagtcggctcgatttcctactagcagagaacgatcgagaattccttaacccaatagaacaccaagcactgatataatggtagtggtttgatgattgtgctaaggaccagtctcatcgaagcaacaagagggtgtactatgtccgtgttgaatccggatcagctgcagtcgctactgggactgcaatttaggcggtaccagttttcatcaacggatgtagatggaacggtccagatcagcgaggtgcactattcatcgtactgtagcataaatactgtagcacagaatataagttgcagtaatagctataactgcgcatgatctgaatccgtctgtgtgtatagatccaaagtttgatctaaacttcaattctttttcatcacgtcaacctgtcatacacatactttttcagccacatcatctctaatttaaccaaaatccaaaatttacgctgaaataaacacagcctatataggagaggtgaggttgctggcctaatcgaaacagtctcatcaaagcagaaacagagacagcatttatcatatcgtaattgtggctctcgctggagtcactgcaacgtatagacactgggccaggaggacacgtgatgctgaaccttctggatacgagtactgtccaaattcatagagcaaccactgtgagcgatgatataccggcttcattctctccactcacaaaagaatacaccagcacttgaaaaatcgatgatacacggtttgtgaaaccatatttgtatacgaaaatcattaactgaaggagtcaaaattttggccagtagaccacaagaattggcaaacgcaagtacaaaaaatccctcatttccacgccttccgtcctctgaattgctttcccgagcgcttttgcagttttttcttctcctgtcgagaacgcgctgccttcgctctgcttgcagcgaggggcattttcttcttgtgttgtttctgcctattgctcaagccaccggtctaaaacgcaatgagaagcatataagtagagaaggaataaaagcaactacgaaagaacaattcatgatcagatttcacaaggttgtgccatatagccaacataggtcaaaataagcaccaaaaaggaggatcatataaacgaatacctttttctgtttcacagctgttcttgcttggtattttcctctatcctctcttccagccttcaccatttctaatctctcctctttcgtaagctttctctttatgtgagcctacataaaggaagatgttcatataagcaaagtgtggatgtgtgtgcatgagcgcgctggcacgagtgcaatgcgggaggggaagagagaaaatgcacctcaagcttggatgggtcaacccgtttcagactaagctgatcagaagaaggcattttaaaggttactgattttgtgtcatggcccttgccgagtccatgttgtgccagagccagttttgcttctttttttgcctgaaactcataacaatgtcagatatacacaacttcactttctttcccaaaagaaagctccacagcatgaactacagctggaaaaaactcccatacctttagctccttaatacgcttaaaatcttcatcagataagattttaccagcttcatcgcacgaagcttcagccttcttggctcctgccaacttcttcagagctcgaaggcttgcatctgcagcattaagttgccctatataatcactcaactttctcttatttgccttgcgactgctgttttttgacttatcatcctggtcactgtcatcatcctgatcagagccttcatcagaatcatccaatttctcactgagttcctcatcatcatcagattcagatacatcattctcctcatccatatcagagtccaattctagctcatcatcattttcttcactatcattgtcagagatgtcttgatcctcatctagttcctctgtatcatcttcatccccagatagttgatcttcctctttcataccttcatctgtgtcaagcttgtttgcttcagacgaaccatccaaattttgtttagtaccacgagcagattgcaactctttctcatcattagaatcaaaagcatcagactcatcgtctgagccttccccttctgatgaaaaatcttcatctagcaactcagctccaggcacatcagaagcgatagttgcttcgccgaatgcttttggtcgagccttcggatcagcaggacgcccacgatctttcttgactagcagagaaggacagatctgaacccaaaccaaaagaaggtttagctgaagtgaacaaaaagaaatcacagaatatgcaaaaggataagaactgacctcccggaataaagtaattagagaacgagcggcaatggaaacagctttttcatgggactttttgtataaaacaaggtcctggagtagatcttcattcatcaactgcaggtataacagaaggattaacagaggcctgctagatgaataaaataaatagaccaagaatatcttcctaaatatcttacaacccgcacagtacctcaggtggtaatgtagtatacaaacctgcatgtgtgttctcaacttctcatgcataagtgactaacgtgtcaggctacacaagactaaatgtggcctggtaaaaccatgtttataccttttcaattcttcattaagttacacttatatgcttaaaacctgtagcaatcgactatcacatccttttggagtttggactacgcaaccagtcatttaagactagtaaaaaaatgaaatcacaatttctactagagcatgtccagggcacaggaattaggtacaacaaaacatgaccaccataaaaatttaatgaatccatcacacaaatttaaggggtgtctggtcagaggtcagtagcactagaaagcaagagtacagatttgagcaaggtaagtaccaaaggtattctcatgcagatctctcgcacaacattcaagccaacagcaatagcctaaaatgagattggttagaaatatgccatgttagttggaaaatacttaaatatattagatatgtgatgagtgttatgcaaacctctgggcgagaacgatcatgcacaaattgatttactatctgcttaaacagtggttcaactgcatcaggaggcacctgaaattgaagcatattaatttagctgaatttggacaaagcaaaagaaatgatataagtagtgaaatataggagaagagcaaaagtgtttcaaccatatcatggcaagcctgtactgctgcagcaagtaaagttgttacatctcgttgatgaggctgcatcacagaaaggtagaaaacttattatcaaaactagtatgaactagtataatgcacgtgaggtgcaacggtttttttttctaattgtctattatattatcattatgctaattttgctgtcatttcgtaaagatgaaaattttcataatattctattgtcatattttcctttcgacgggatctatggcatgtgggggctaagagatacgcaactcacagtccgtgggtccaccaccactaccatcttttatattagtatagagtatagataaacattatatctaccataaggttgctacaagaagaacacatgccaagttaagaacatacctgaacgtatctttgaagatatggatagaagttcaacaaaaccaagtgatgcagcccaatagtcctcgctataacctttaacatcatcatccttacctgcaagcacccaaccaacattctctaaatttgaattaacgtttattttcgtttaaccatcggatggaactcacaacagacattgtgtttaaaaaataaactattgcacatctgggttccaattctcctacttgaatgctggttccaactatatacactcatgtataaaacttcagcagaaagctaaaagtactaagtaatgatagttctgacaattatatataactttttaaatctttacagaacaaggaatcttcagaacaaggaatggggccaacctcaaaccgctcattgcatttctggagccgagagaagagcttctcagcaaaaccctgtcagccaaaaaacgaaagcttcaatataacagtcaatatgtaaatgataacactctgaacaattatgggattacaccatttcccacctgaggatcctttaaatacgtcagtggtgaataataattggagccagtgtcctcagtggatttacgttgttgccttttcatactacgaatcacacgctgcaatttagctttcttctttttcttagtagcagcagtgcccttgtgatttgcctgagaaagtaatatgacaataaaatacattatatcagaaggcacgtaacagaaaaaagatgtaaaacactataaatcgaaataatggtaaaaattcaaataaccttgtaaacatcctctttactaagaataatttgagggttttgagcttcatcttcactgctggatgcatcactatcatcttcttgctcaacgttttcatacccaagaaggaatgaaatagcggctatcataattctgcatgtaaaagatatattttagatcaacacctattaataaacacaaagatgctggcagtatgtacctagaagaaccatggaaacaagcattgcatatagcatttgctgtgcggtcatcaaaccagaccctccgacggtgaagatcacatagaatagtaaaggccctctttgctctcgactcttcctcgccctgggaaacagcgaagcaagatgcataactaaacgaggtaggaagagaatcatgaatgtattcttgccactatgttaaacccgataatactaatcagtgcaagtgtggtatagtggtatgtcacaaacctgtaggaatgtgaaaaggatgttttgcagtttacgattcctggcttcattcttgtgggtctgattcattctcctgatactgtgtacaatatgtgagaatgctagttttttgacagcccggtcccctataacttgaagctccataaataactccattgtgtcctccagatcaacaatctaaacatcaaaaagcaatgtatacgaggagaatttactctacagtcatacgataatcccgttccaatccacacgatttgaacaaaatttaacttaatgtgaaatgaacagatgaactaaacaggcgtcaccttccgattcaccagtagtatcagcgcctgcacgaggtgcacacggagcccggacggcagcgcgcgcgcgttggtgtcaagcaggccaccaatctggtcgggcaagtcagcgaggtcgtccgggtagaagggcgcgacgtgggcgaggaacagcgcgaggtcgccgagctccttggccacctcccctccgccgccggacgaggacgtggaggccagtgccgcctgctgccggaagaggaacaccgatgactcgaagtggcgccgcagctggcggagctcctcctcgtacccctccgggtcgcgcttcatcttcgcctgcagcgccgggaggctctgccgctccccggccccgccggtggccgacgccgacgccgcctccggcgtgaacgccggcgcgtgctgacgaggcatcggagcggaaaatccggtgtcccccgccgccgccgccgctgaggtgagaatgctaaaaccctaggccgccgcaaaacttcccgggagaaccgatggcaagaggtagtcgacgatgcgagtgactgggctggccagttacagtacacgtccggcccattaatctagctaaatttggaccagtaaggcccatttttcctccctctagcaaagaaaataagtctaatttgaaagacctcggtcaaattgcatcaatcaaccgcaaaaccgggtatatcgcactctccaacttcaaaaaccggtataaatcgactcctttgatggtttgaaaatcgattttctactgatgtgttaaattaaccgtgatcaaacttattatatccgaattttactattgaaggagacaattcaattagaagcaagagatgagggaagaaaaatatacttagagcctctttatttagggaattttttcttggatttttaagtcgcctttttagtttatatgatttataggctaatggattgaagtactaagtttaatagtagggtcataactctatctagcgtaagaaaaaaaaacttcttcaacataatttttgatgatgagtacaaacgaaagaactgcatatttgttaagcttagactttccagctcataaggttaagagcctactataagcttcaaataatctatagtcaatctaatagttaatttatacaatagttaactataaatatacactaggggtgtgtttggttggacttttcaacctgcttttccttttgcaaaagtcaagagtcaaccaaaggacccaaaagcataagtgcttttgctccaagtgcttttgagggaaaaattacccacctctgccattatgaaaaaacggtccgatattcttttcctcgtctcctccttctcgcgagtcgtgacttcatggggcgagcgtcggccatcgggcgcattgggtgtccgccatcggcgccgcccccgcccttccccaaccgacgccgcccaacctgatgtcggcgcagcccccgcccttccccaaccgacgacgcccaacccgacgccggcgcagctcccgtccttccctgatcgatgccgcccccgcccttcctcaacagacgccggtcaacgcgacgccagcgccgctcccgcccttccccgaccgacgcctcctcctcccgacgccgccgccccttcgctcgtcggccatggaggtgggagacgaaggtggtgaggtggccgacagcggtggcgtcaccactgcctcatcctcctggcgccaccgctcctcaccaccgtgcgtcctcttcgtcgctgaaccgccgctaccgctcctcctcgccgagacgccgctgccaccgctgaggccgacgacaccgccgttgccatatccatctctccctcttcttttatttcaacgtgtgtatgacatgtgggggtcgctgtcagcgggactagttatttcaaaagccacagctattgaaccaaatgagcttttccaaaagccaccgtacatattccccagctacttttaagaagggagtacctatacatctttcgaaagatttttataatcgtatcacacagatttttaatctttatattaaaatccgatagatataataaaaagcaaaaagcaattaagaaacaccataatgaacattaaattaccatatcctcaagaaaaagaccaaatccaatacaaaatttaaaatttacatgtgaagattcaaaaattacagtgtaacttacaaaagttacagtgtaagtttcataaattacactgtaacttacaagaaaatgcactgtaaatttgaatgagaaaatcgagtgagagataagaaaaaaattttcgagtgagatatagcaaaatcgtttaagaaaactacagcccacagatatttttttcaaagccagagctcaactaaacacaccttaagagcttagactttccagctcataggcctaaacaaagaaggccttcttcctctcgcgaaccacgaggcccagttggctagtaatcgttcgcggctagccggcccaccggaccagcgcttcccccgccggcgtcgcgcgtacgtaggagacgacacgacgacttctccgtgagatcgcgcgaaaatcacgacctcaaccgtgcgacggggggcgcaagcgcgacatcacgcagcgtttcctccccacccacccgccacgcgcggcaccggcaagcggcgacgcgcgacggctgcgcggtcgttttcggcggcacgccctgcgcgcgcacataattcattctgctcttcccccacggtcgcgtggtcctttccgacgcccccgtccgtgacaaagccaggtttggtggcgagcgaacgagtgactcgatcatgccccgggtcgccgtcacgcagcagcgccctgtgtctgcccccgctccggcgatcgacggcgaccgatcgatcggcagctagcgacgcccgagcttacatgcgcgcgccgcgtcaccttcccgcgaccgatcgatccgtcaatcttccgctaccgtgtatacgcagcagtgtcggctgggacatgtacatacattatactaaaatacagtactacgagccgctttctgaaaaagaaaacgaaggccattattttcctctgtttcttctcttgtatttttctggttgcagcacagacgtcgtcgtcatcgttctatggagtcatgtacaaacatatttaaaaaagtcaacggaaacattttgagaaggagggagtattaaatcagcccgcttgatcgatatgggacctgttttctttttctagaatctatcattaatcagaaacgtacgcttagctagcagaaactggtagtctggtacggcgttctactgtacatacatcttggcaagaggtacaccggtctaacatcgactataccattgtcacgttttgcgtgaactgcaagagaacgcatcactgggcatcgctaggccactatcggtgccattatgtaggagtacaaggtaatcaatacactccctaatcaaaacaggattgcaatccagaacagcggtgacatctgtattaagctcgcagatactgtaccaattataactcgattactcaaacaacaaagcactggcacttcagtggaccacgtttggcaaggacgaaacgtggttttaaggcgaaaaaactcaggagctttgagaggggacagcagcggtcatgctcttttcccccaactaataaagcaccagaaatagtaaatggctagctgacaacgtacgccaagcatcattacaccaaacccccttcacaaatccatctttaaggccctcgtctgtgggccaattgtcgaaaatacgtcgtacggcgcgttagaaaagaatagtttataggttaaatttttctatatactagaaaaaaatgcccgtacgttacaacgggtgaagtcgattttaatcttattattgttatatgttttagttaaaatgaaattcactgtgagagttcgctttatatatttttagaaaatcatgagctatatttaggagtctaatcatctcaagttagcatgcaagttttttaaaacaaatttcttatatgatttcttctgtattaccaaaagtggacgattttaaaaaccgaatcaaatacggatacatatttttaaaagcaaacaaacttaaaaactgacgtatacacatatgacgtaccaaaataccgataaaaacatcttaaatttttataatagtagagatatgttcaatgaaaaaaattaaaataaactctaaaatttaaattttgacagcggttaattctatatagaggaaccaatgggagcctaagctcttttcagttactgtctgttggcttatgatgacacgctttttatactgtttgtaaaaaacttctctatatatatttttaaaatagtcttttaaagaaactataataattaagtatttaattaattataaactaatgatcttctcgtattgcgtaagacaaataagatttgaatacgctctaccgaacgcaacctaaaccggtaaggcacaaggcaattaagacctaatctcgcaacttgacgagacgagacaccaatttactaatactaacaaacagcaaatttctaattagcatcgcgtcgattgtccgatcattctcaggttccagtgcgcgaggtgactgacaagctagcttaactattcgttgagatttcaggaagaaaaagctgtcaaaagcttaataacaagacgtggcacctctaagctgttgattcccgaaaaggacaaagaaaacgaggagagcaacgtcgcaacatgccccggcccggcccggcccattatcagcaaggcccaaggcgacgcgaatctcgaagcccacaacatcgaagttgaccgttcaacagaaataccgaaaatacccctgactaaccaatcatattacgcgaatgaccctgcccgagccggccagccacttagacctggtcaccgccggcttgggctttaaactaacaccagtggcattgggtgtaaataaatcgaaatcggaggggtggggtgggtacccctgatgcgtcagcgttcaaaatatttcgaaatagctcggccgcctcgtcctcttcttctccttcctctctctctctcttctcccacacatctctcgctcagatccgagcgaggcgagaaatccatgaaaaatcgagggtaatctccgctcggtggcttcaaaaacttcgaatccttccccaatttcatcggctccgcagtttttttctcgaggtttttcggatctaaagcgcggctttgtcggcgcttgtaagccacgagagagagagattcttgtgccttcgagctcactccatccggccccaagaaagctcccctcctcccacccaccgccaccactgaggaggagagaaccctaactataacccctaatcctgccactaatcccagttcatggcctcctccctcacgccccgtagcccttacccggtaattttctctcttttgtggaaagaaatcgcctattttgggggagggttgattcatgggagcttagttcttgcgatttgtggggtgtggttgttgttgttgttgttgcagaagaaggagaacttgggcaacgcgcggcgggggatgggggtcaagcctggcccgcgccgcaatgtcctctcggcaatcaacaatggcggtggcacgaacagcgacacggcgtcggtggacggcggcgagggcggggctgggccggcggcgcctgtgatcgagttcaccgggagggaggatgtggagcggctgctcgccgagaagatgaaggggaagagcaagaccgactacaaggtgggttcttttgggggatttcttggcgttcgttctgtttgagaatttttggggggcgggtttcctgaatttggttggacctgtgcaggggagaactgagcagatgagtgagtacatcaagaagctgagagcttgcatccgctggtacattgagttggaggacggctacttggtcgagcaggagaagctccgtagtacgatggatgcagagaatgcccagcacgccaagttgggtaatgaattcgaatgcacttctcttttttttgtatttatttgatcacaccaagagaacaagatggtactcttttgggttttgagcattcatgtgtgctgtttggtcatcagagtaccatctcatcgtagtgactgagtttattctggtcatttatgttcttggggtactgtacttccagaggcccagcttagcagtgatctggaagagctgaaagctgcacacctgaacttgacgcggcagtgcgattcgttggaggaaagcttcaacaaggagaaggccgacaggatggttagaactcatctatcgcataataagctgcatagttatgtactgttgctgtgtgcctgtgtgattggtttcagccacggcttacacttgttgacctttaaactggcagcttgctgtggagtcctacgagaaggagaggcagcaaagggaatcggctgaggcgtccctcgacttgctgtcggtggacctggaaagagtcagccatgaagcaaaacggtttagtgagcaagtacgtgttcagaaatgttctattagtcttacatgaatttgagtcatatataatgttcctttctgatggatggaaattgtgaactagctgaaaatggtccaagacacgaacaaaagactgcaggagtacaacaccagcttgcagcaatacaacagtaatcttcaagctgatgcctctaagagtggggacatcatctcaaaactgcaaaaagagaagagtgccatgatggaaacaatggcttctctgaaagatttaaacaattcaatgaagaaccatttggattcttctagggtgagttgtgttttttcgtgaattgataatttttttgggcagtatagttcttgtttcacttaaacatttaattgttttgatttctgttagacttctcaacaagaggccattagaatgaaagaacaacttatgaaagaagtggattgccttagaattgagctacaccaaattagagaagaccgtgatcagtctgtttctcaagtaaataccttgagtgctgagcttgctaattacaaggaactagcaggcaagtctacaaaagactgtgaaagcttgagtgtaaaagtgtcagcctttgaggttagtggtttcagattaaccaaatcaatactttctgtgcgcaactatttggctcaccattatgcttctgctcaggaaacatgtagtatgcaacaagaacagattcaaactttgcagaaacaacttgcagttgcaacaaataaactgaaggttagaaataatattttgtcagtgctgatttacatgtgagatatgattatatgacatttgatctaattgtttacttttgcagcttgctgatgttactgcaattgaggcgatgacaggatatgaagaacaaaaggtgataataaaagatctggaagaacgtttggcatccgcagaatttcaaattgttgaagctgacaagctacgaaagaaactgcacaatacaatattggtaattgtttcagcatactagcacttcttactaaaaacaatttctctattttactgacagaagaaatttttgagtaaatactgaaattttttcatcttgctattgctacttgttactgattagcctttctatttgcaggagcttaaaggaaacatcagagtgttttgtagggtccgaccacttttgcaagacaacgattctagtggtgcagaagaagcccttatttcatatccaacatcagttgaatctgccgggcgtggtattgatttgatgaaccaaggtaaaatcatattcattgttgaagctaaacagaaactatgtttcccccactaagttttcagtggtaaagttaatcggagacttcattttattgttttgtgttgatgtaggtcagagattttccttctcatatgacaaagttttcgatcacggtgcttcacaagaagatgtgtttgtggaaatgtcacaactagttcaaagtgcacttgatgggtacaaggtatgaatatttcactacaacaatgaagtattggtgaataatctgttcatgaggttcctgtctctaataactcaaatatcctaactttattttttttatttcaagaacaaatgaaagttgttttaattgatatggtggcaccccaaattttatctcttcagcaccaccacataagcacaaatacatgctaaaagccgtgaacatcttacattgatgtttctagtatatatcacctgcattctgcatttgtataatcaccattatcttgaaactctgactgatgtttctagtttatttcagttttgaagtacttgtcaatttggtatgcttaagttatttttgcatgatgcaggtttgcatatttgcttatggtcaaacagggtctggtaaaacttatacaatgatgggtccaccagggcgtgatcagaaaggcatcatacctcgttctttggagcaaatttttaagacaagtcagtctcttgaatctcaaggatggaagtacagtatgcaggttagtatccatagtgcaatgcagattctgaagtgtacattctatgtagtgttgctgagagtttttcctatgtgcaggcatcaatgttggaaatatacaatgagacaattcgtgatttgttagcacctggtcggtctaataactttgatctgtctaccagtaaacaatacaccataaagcatgatccacaagggaacacaaccgtcactgaccttactgttgctgatgtttttagtagcgccgacgtaacttctcttctagcgaaagcatcccaaagcaggtaaatacgctttattcatttttaatcattcacttgtgccttgtaactgtttgctctaagggtattgaccattatcagtttaatgttatatttgaaatagcaatgctttggatatgtctagatgattctctcatctatcactcaaatatattagagagagcagaaacataagagggtttaccttttatacaagctagcacttattatctgaattcacatgtgtctgttagccacctagtctacatatcaacagtgagtctaaattttttttcaccacattgaaccaggtctgtgggtaggacccaaatgaatgaacaatcttcccggagccattttgttttcacactgaagatatctggatcaaatgaggtactcgcttcacccatattttagaatattaatcacagtgctgaaactttacaaactggtcacaatattttttttttcattttcatgctaactaaacagaaccactgaaacttgagcaaatgtatgtcactaattttcttttgatcttaatgcagaacactgggcaacaagtccaaggtgtccttaacttgattgatttagctggcagtgaacgccttgctaaaagtggctccacgggtgatcgtttgaaggaaactcaggtgagtgtgttcatcacaaatttacaatattcttatttgataatcacattgtcttatctgtttgttttctttatgtttcaggcaatcaataaaagcttgtcagctcttagcgatgttatctttgcaattgcgaaaggagacgatcatgtgcccttcaggaactcaaaacttacataccttttgcaggtgagtgacttgtgcaaatggatggta

SEQ ID NO: 5213 - DNA, 1130 bp, Oryza sativa
gcaggccgtgtatttggccacctttccggccagagccaactcggcctgctgtttgttgccccagaggaggacaacatggagacgatcgtcgcgcaggatgcgcttgtaatcacgtggaactcgtcgccagacaccgcagatcttgcccgtggcattctgatagacactgagagtgcccgccaaggtggtctccagttgatgctcctccaggattacacccgcatcatcaacgaattgaatggcacgcggacgaccgattcgcgatgaggtgtagaaggagtagtatagattcttcttgtggaacaggaaacgggcggtggccaccacattctgcggattgtaggtggtgtacatggacttcatttcctcacccttgaggaaataggaggtgcggcccgttagcaacgcagcgtaatctataaatagggatcaaatgaaaggtggagataatccaggtgttagataaatacaatagttctcttgttaattaaatgtaggagctggtgaatgggattacaatttcccgcaggatttggcggattctattgggatctgggtgggtgtccggtacttttgtacttacgtttcatgttgcgctcttcctcttcattgggcacgggcacatccaaggctacatccgtatctgaaagatggagggaatacaaatagagaataagatgatgctgggcgataaggtacgaccttaaatggaatttagatagcaacaaatgcttcaaagcaaccgaaccgccgccagccattcaccatccatccagccagccatccagccagccatccagccagccaaccaactatccatccacaatttgtggacacaattccggcattcaaccaaaattccagttgaatgggtgaatggtgaatggctgaatggacgaatgccaggggatcatcatgaatggcaatgcaactatcaggtagagatcccacctccgaactaagaccttccatttccacctctcgcttccacccaggtggcattcattaatcgtgcataaattgagggcaggtagaaggtagagtttctcgaacgggaagtctaacctacatctaactagggaagtgctttgtatttgaggatgtgcggactctggggttctgaattcatg

SEQ ID NO: 5214 - DNA, 9260 bp, Oryza sativa
aagcatttactctctttgtaattcttgcactttcaccgcctgctgaccatatgccttctcatttttctccatgtcttccatcatgatatcatgcatgtcatgtactgatgtgcatattttcccccaaataaaacatgaacatttcaaagtttacacaaggttttgctagcttccacttatgtttagtaattagtacaatttgaaagtttccttggcgcagcataagtcaattgaagttcgctgtcagcaagcttttactccatatcgatttcagtcaatttatatcttccatgtattatggtagagaagaatagtatccatataacttgctcctgtaagttcataaccaataactcttgctaatgacattttgaaaggttgtttttaactgtatatgcaaaattttgcggtcacagtttgttgtcacctatatgggtatatgatagcagaccacatattcggaaatatagctggctactctcaaaagtaaaactcaatgtgcatctttcgttttgccattccgcaccttttaacactataatcctttgttgtcgctataatatcaaatggaactttaccagtggcctgcaaatgagattattataagatactccctccgtttcgcaatgtaagtcattctagtatttctcacatttatattgatgttaatgaatctagacatatatattcattaacatcaatataaatgtggaaaatgctagaatgacttaacattgcgaaacggaggaagtatatatttattatttatcgttttattattcttttatttttgacaggtaacaagccttttaacttcttcagttaatcaggaccaagtgcagctttggtagtttctttggattggccatcaagaatcacatgcacattcgcgtatgcatgtggagttccaaaaccaatgttgcatgattacgtaccgatctctgtaaatcaaaatgatggcataccgagtttggtgttatgtatacattgtcgtgcatgatcgtatacagatttttgccgtatcaaagagatatttttttcttgcattgtcggtacgcacgcgtttcttgctagtttcgctcacccactgacggcgtttgtttggatgaaaaatacccctcttggggctgcctacctcgaatttttttatttataattttttttattaaaagttttacaaaaataattttccattttaaaaattgacggaagtagtcgcctaccgccctctgggagggcgagagggcggcgaaaatgacgtggcagccggccgttcgctctcgggcgacggccgtcaacgaaatttgcaggcggcccccttgccgccctccgctagggcgattttatactgtgcggggggccgcctgcaaatgggcggcgaggggggcatggaattttgcaggcggcccccttgccgccctgggggagggcgattttatactgtgctctaaatttttttataaatatcaatagttatcaaatctttttatattgaaaactatacaagattaaaatctccaagactggtaaaatacaattttattattttttagggcatatttggattgttaccgtacaaatattttgttagtgccaaaatataagcaagttttggcactaccaaatatttggtaaggtaaaattgcatttgatcatatttggtttgctgccaaaatgtaaaattgtagtgaagaatgttctacataatctcaaatctagattacgtattaccaatgaataggcttctattttcgtgtgtggtgtgctagtgggaaagaagatatgaagaggttgccttcagattgtcaattatatagcgtcgttttcactgcaatatatgtgaactcaatgagatacattattcattagatgtgacaagacgatcacgcgtgggcgtgaatcactttatgtcaacaggcagcgccgaaagttgatagtgataactcgagctgccgcttttcatgtgtgctgttgtggactgtgcgcgctactggatctgacactaccgtgaagcgccgaaagtgtgttgtcgtgagcataagttgttctagcaccatatgaatgaaaagaactatgtagacgagacaaacacaagtagtactgcagtagtaatagcaaaagtagtactgctttacaattttgtaagccaaaagaaacggtcacataaggactgaagaggtagaacactactgacgaggcctcttacccctgtccctcctaccctgcgccctaatgtgcccctgggagtacgtgagtcggtccgggggtacggcacggccaacccgtcctgcctgtacaggtgtgacctctggctgctcctgagtgtgcgcctctggagctcctccaagctgagaggagcctagtacgtcgtggtggtgtgcaccgtgcaagtcgtcatcgtagaactggctagtaggaccagtcctaccggcgtgagacgaagaggccccagtaccgaagatcccggctgcaaatcctgctggacaaggaccatcagtttcgtacaagtatttaacagtggtaataaaaagtaaagtaccgtgtgggcgagggatcgacgctccgtgagaggaagagctggcgaacgcgcccgaagaggtggcgaacgcccctgcggagctcgcggaagcgccggtcgtgcctgcgaacgtgctcgaaggcagacgaggtcctgcgatgaggaaacgtgcagttaaaacatagtgacatattcgtgcaaaagctgaaacaaaaatgaactaatatctgggctgaactgtaccgtgcgaaaccggtgttgtaggtcgcactgctccgaagctaggggcactcgaaggcaaacgaggtcctgcgaggatggaacatcaagttacgacggggtgatgttttcgtagaaaaacagaaacaaaacttaagaaacctctgggctgagcagtaccgtgcgaaacaggtgccgtaggtcgaggtcctgctccgacggtaggcgcgcgaggccgtggttgtaccggaccagctggaggtacgacgtccacggcgctgcgacaggagaagacgcgcatgaccgcacgcatcttctcctgcatctggtcgaaggtcaccctctgctcaacgtcagtcaagtgcaaacctctgttcaacctcacttggactgcggtgatatcggcactgatatcccgtgcggcatcagcctatgcaagatggaaataaaaaattcagtagttgtcctatattatgcaagataaatgaaataattgtaagaagtaatacaaattggacgtaccgccacgaagtagtctcggtcacggtgcgtgggatacgcgtccgtgacagcagcaacgtgcggctctggggcgtctggagtgaaggtcacacgcgcacgagtgcgaggaaggtaccagcgaaggtagtcacggtagttctcctccgtgtgtgggaagagctcgttgatcacctcctctgtagctaacacccaatcgtcaacgtactgctgtacacgtggagcccaaagtgcgcctgctagctgtccccgtcgagtcaacctgtgaagagaggtaaattatatggctcgatgaagtaattatcataaaaatttagaaatgaacaatccgaactcacgagtggtcggcagggaggacggtcggctgcacgttgcccggaaacacctgcctaagtccgaactgtctcatcacacgctgcgggcagtgaggctcaacgaaaatgtcgaagaccatcggcaggatggtgagccagtaagcctggtcgcgtgtgcacaaggacgaaattcctagcggtgctctcgcagcgacggcctcttctgtgtacggctcccagatgacgtcgctcggctggagacggtcaaactcgaacacgaagtccgggtaaccacgtctcacctggacgtgagcgtaacgacgctgcaataaacatgatcggaattagacatgttatgtgaagaaaaaaaagaagacgactgataaacttataacgcagcgaagttgcactaaccccacgtcgacaccagtaagtccccatcgtgggaccgtcctctggccactgcgcgctgcgaccaaccccgtagggtgcgctgtccaccactggtcgacctatggcaaacctctcggctgcccaaagctgaagcaacatagggcagccagcgatgatcgctcccgcgtcagtcttcgtgcacgcctcacagagggcacggtacgtggctgctagcacggcagaaccccagctccactgcggcacgtcctgtggctgagcatccgcgatggaccgtgcgtagtggaccagccggaagtccacagcgtgcccgtgggtgctagtgaacatcacccacccgaacaaccacaacaggtacgcctcaagggagcgtcggaccgagtaatcatcagcgtcagggtgcagaaggtccgcctacaattaagaatgaaattttagtacaaaacactcatccggtcgcaaataagcatgtatgataataacaacttatttacttacagtgaactggagcaaccaagccttgctaggcccgactgtagagtacggaggaagggtgttggccggtcctaggtgtggaaggcgcatcacctgctcgaagcgcgcagtgatatcctccttccacccaaaaacaccgtccacgggaccaactggtgctcccgccagcggtagcccgagcaggtacgacacgtcctgcagtgtcggagccatctccccacagggaaggtggaacgtgtgcgtctcaggtctccagcggtctacaagagcggcaaggagtgaccggtctgcatcccaccgcttcgctgggtcacggtcgtccgccgccgcctcaacaagcctacaaagtggtagaaggcctgccgcatgcaacctgtatagagcaaacttcaaacataagtacgacacaaagcaaagttgagttgaaatgtgaacatacgcgtaccaaggaacgtgacgggggtcgacacgcaaccactcgcgcgacgtgcgtggacggaaggtgccgagctgtgcaccctcgactgctgacaggaacgagcggtggttcctgtcaatcccacggttcaacagcgccggtgtgtcgtacgccatacctgcatcaaataggttgatcagaaacatataaataattagttcaacataagtaataaatgttcataagcgaattactaacacatactaaacaagagtacaaacaaacaaaagtgtttagtccgaacactcatcacgataacattatgatacaacaccgaatagttcgcaatactactagtacaacaatagtcggaggtactcattacaacaacattgaattgaaattacacgatagaagtatttagtccgaacactcattacatcacaacagcattttatttcctaaatcgaaagcattgttacaccatggaatcgcctgctgcgcgacgacgccttggccttgcgcgcctgcttgttgttccttcaccaggtggtcgcctaccatcacttgcctgtccagatggactagcatctgcgccgcttggaacttctgcattcttcgggcatttcttgtaagtatggccgcgcagatcacacttgctgcagcgtaaagtcctcccacctgcttctgactcatccatatcatttttgatgcgtctagtttggcgtcgaccctttttcacccttaacttagatggatctggaatataaaaaacttgggcactcagcgttgtgtaagatcctgagatcccgaacccatatatctcctcactccatgtatgaaagattgcttctttcctgaaataatttgagacgtacacattgggagatatgccacaatcaccggcagcagcaagaacgtgtgagcaaggaaggtgatgaagcttcggcttcatacaactgcaggtacatccaccatccgccttcaagacacattcctgcacggcttgcttgcgatagataccacgcctgctcctatcaacacacattatttcataccgatgcacttgtgtgccttgagcaacaactcgatgtctccgtgcctttttgattttatcttccatgtactttgtcactacgttgccaaacactatgttgttatcggccatggacggaccaattttcttgtatcgatccctaaagtacgcttgcgtgccgtgaaggatgaattcaacaatagcaaccaatggaagtacccgaactcctcgcattacccagttgtacacctctgccaaattggttgtcattatgccataccgagatccatcggtgtcgaacaatagagaccacttctccttaggctcattctcaatccactgagtgaaatttctgatggacgaccctgacctccttctcattgttggtgggtcatcatgtaatgcaccaagaggtatgggaggctcgtcaccttcaactagtggtctgcgagattgctcatctgtttgcttcgttgtcaactcatccaacttgtcccacaactcattaaatttcttctcttggttctgtgcacagagcctcttaaagagctccataagatgcttgttcttgaattgcttgtagaaatttgcacccatgtgacgcatgcaccaccgactccgaacatcaggccacttagctggaagtcccttctcatcccaaccgttctgcaagtagtcaatagcccgcaacatacctgcatgacgatcatgtataaggcaaacgttgggcctcatacgcaccactgcaatgtgcactctctctaggaaccagtaccagctttcagtgttctcactctctacaaatgcaaaagccataggtagaacctggttgttcccatcacacccaattgctgtcaatatctgacctcggtatttacctgtcataaaagttccatctatgcatagaacaggtcgacaatgcacaaaagcattgatgcaagcacccaatgagaaaaaggctctttgcaacacactctttgttcgatcatcaaccgatgtaaatgtatgtaggtcatagtatgtattattattcctctgggcaatggtggctaacaaacgaggcaaattatcataagaagcttcaaatgtgccatatctcatctcaatgatcttttgtttggctctccaggcctttgcatagcttatggtgtacttgaatttgttctcgatgtgcctaataattgattttggttcaaagccaatgttaccaacaacactgctgtacatctcacttgccacaaaagctgaagtgatgtttcggtgatacttctccaccccttgtaagtagcacttgtgctcggtcacaatgctaactttccaataatcattccatttacccttatatgcatggacacgccacggacaatcttccttcatgcacctcacttcatacacataatttgttgacttgaccaccctaaactctctctgcaaggaaactgcccaatgcttcaccgcctccttcatctcatccttatgagcataccttgcaccctcaattacctcgttctccttatactcccagggtacatgatcaccctctgatataacaagtccagagaagtcctcatttgcccaatcagtggccattacatcaccttcctcatcggatgatgcgtcgtcgtccgcttcctcattatccgaatcttccctctccatttcatcaacaattataccgactctctccccctcatccgccatgcccatagcctgctcctcccttggttgattttcctcattttgcatcgatggtccaacaacatcccctgcattgataggaccctctacatcttcggtttgcattgaaacatttatatctttctcttgtaccgacacaaatataacgaggggccatgaccgttcaaaagccatttccacataccgtctccaagcatcagtgttgtccatcggcattagttcccaaaaataaccttctgttgcacgactcactacaactgacactgacattgtgtagacttcttggtctattctaaatcctctcaacaaccaactataaattgactgaaatgttctctccgcaggcctatcgatgcccttagatgtcattacaaaatctgacagatcaacaccatctggaccaaatctaatatttccttcaccgtgaactatctgaaatgtgaccttacttaacattgtgcctgatgaaaacaataactgcgttaacctcgcatttctgtactacgccctaagttacattctctacaatattgttctctaaatttctaaaattacgttacattctccagatcaaactaaactacatcttacaattaacactactgtctatgtctcaattcatactattatattctatgctctggatctacacatatgtgttgtgtgctacagatgtgctaaaatatatggaactaaaactaaaacgcaacatatatactcaaacataacatattagtacaaatgcaaaagatgtatgggagcatacctgtgatgaattgagcgaaccagcagggcttcgccgctcctcttctgctgccctcccctctctctctttcgttttttttggatttttagtgaatataatgaaatttcacagaggagggactgggctttataggggggaggcaaaaatcgccctcccccgcacagtataaaatcgccctagcggaggacggcaagggggccgcctgcaaatttcgttgacggccgtctgtcacgtcattttcgccgccctctgagagggcgatttttaaaaatcgccctcccagagggtggtaggggactacttccgtcaattttcaaaatggaaaattatttttgtaaaacttttaataaaaaaaattataaataaaaaaaattctgcctacctccagccaacccccctcctcccagggataaaaattgagcggacacggaccgataatgcttgtaccatattcgttttcattttttttatcggatatgaaaacgaatacggatagttcgaatacggaaacaaatacggattatctcgaatatgaataagaatcgaatataatcggacatgaatacggaaacaattttttctcgaaacacgaaaaccaactcaacttctaatagaaacaaatatcaacatatataattagctcattttatatatgaagtataatttataaatattttttagaatttaaataatattaatagtacactagtgttaagagataaactactattaaaatatataaatgttatagagttaaaaagaaatggggtatgtctcatggcttatgtggatatccaaatagcattgttcaccggatatccgaattattatctacagaagcggtaccacccattaggcggggttgg

SEQ ID NO: 5215 - DNA, 20292 bp, Oryza sativa
caatttgaaaataatagtactactaacctttccagagtcctaaaaaaattcagttgagtttgcttccacttgatggtgtattgtggacggatcgaaatcgcagagcccaatcttttgcatgtattaaacaatatatactacttcgtatacttaattaatctttgcaaaagaggcaccaacatgccaggtatgcaaatgccattttctaattcctctgcatactttagaagccaaaagcacccaaattttgtattaagatgttgctctagttcaaacacctgtctcacagcatctttctgaatacgcctttgacagcaatataaaattatctaccaaactatgcttgccaattggttacagctctgcttgaatcctagatctggactactacaatttattttttcttttgtgtctgtgtgtgaataatggatactttttcttgctacaaaccattccctactctttgttttaaactgtcactgatccattagaagctttatatttatgagttgtgatgcatgcagctcattattgacaccaggtgcttgtcttttgttagcaacatcaacactaattgcgggctaatgaaaaaaatcgaaacacaagaagattggaagaataaaacagccaaggtcagacagatcaaaacacaaatatgttccattccacactcaagacatcctaggaagttgcttggaactcatcagtcctcacaagtcataggcatgcacaatgtccttaattccactcatacataattatctggtaaatttagtattatctagttaatttcctattttgccacttctagtatgtgaccaaattcattatatacttataaagaagagtatttgcccaaattgcagggccattgcacttttactgtctgccaatgtggccaaagttcagacttcacagacataccttgaggacggctgaccttaaaatttacagcaagcactaattaaattatagtccatcagttagccggtaacaaccgagggtttgtacggaatccatcgtaaaaagaattggcaaagacaatttctgactgccaatggtgcatggcatctactgctgggggcacagtactaatcccctgttaatgattgcctcgggaagcgtgattaaacaaaagggaggctgtcttatcagcataacaacacaacaaatcagcaagtgaccaatggcagcctagttttatctctgccatgtgggattgtgccatccatccttgcagacagggagtacgactaatcccaaaagataatcacgcttattagcgtccggtcaagatctaaccaccaccaccccccctccaccctctgcaactcgattgcatcttgtaccttcattggactctcacatttggcccccactagccagaccatatcacaagagattaaccaacaaaaaaaaatcttgattttgatttgctcagatcaaaatgtgattcacaagaaattaaccaacaaaaggtgttttctttttgcaaaacacatacatacatacactcacctcacaaatacacacatatacaacatatccttataaatatctctaaaaactgaaccagcgtatcttaaaattagcaaagtcatcgtaaacgttttacggtcgacggatacaccgcttaccattaaaatgtggttcaaagtttgtaacttcattgcaatatagcttggcaacaacttatctgaatttctctaggaacatgaccgtaacccatttggaacaaagaaattttggtgttctcgttggaaaacaatccacattgcttgctaatctcgccgcattgggtgcaaaagaagccgatgctgaatcagacgacgtcttccttttcggccggcccgtgtttacaactcatcacaggctgcttattgttaggaacacactatactatatctcaaacagtgttacgttatgtcaaagtgttattttagcagggcagctttagtagtgagtgaaggagtaagtttccagccgtgcaggcactagtgctccactggtgatgatgtggagaaaagaaagctgctttttaccggtgtctgtccttcactgtctgtcagtcacaaacttcttggtaacatgggctccaatcattgaataaccgaggagtagtagaaagttttcagtactgctgctgtatactgtgattactgtagtagtattgggcagtaactgcaatgcaagagaggcagggagatgctgtgacagagggagagaggtaggtgcatagggttaaataagggaggactcacttggactcgcttctggcagccacgacttctttcaaacaatttaggcttttttattataaaattatatagctgtaaaaatctagaaaataaatttggaaacaaagactaaaaacctggttttctaaattctcaccaactaattatttactagcggcttctcgaaatctcaaactcccctaaataagacctagccaggaaccgaaaaccatcgtcttttttagattttcatcagctggatactacttactagccgactagccgcttcttataatctcgagctaggatgcagtgctgaggatagatagagagataggccgatagacaagtggctttcagagtaattggacagagatatcattgggaattgtttcgccgcaggaggcaatggcgttgtagatgtgtagaggctgagctcagtagcggtagagtagggcctctcgttgctgttggatgccgggtgcatcatcgatcgacaccaatcaatcatgcaacctgccctggcctcctcctgcagcaaatgccattcactttcacattcaacattcacattctcccagtaaaataccaacagatgcaatgcaagagcaggtgagttttcagagtggcaatggagcgaactgatcggatcatgcaaaggtgtagtacagtccaactctgagcggtcaacactctacgattgcagatgatcacagtgagtaggagtacatgtatgaagaagtactcctatgatgcattgcctgctacgagtagtaaaaagccgtatgagtaaatgttgcaagtggaattctgggagatttagattcagacattcatcagattcaggtaggagtacatgtagtagtaccagtaaagcttctgccactaggggtctgttttaagagcttaaaattctgagaagcagttgctagaagctagctggtgagaatctagagacctagcttttgacttctaattcattttctagattctacaactacagattcttaaaatctgggtaagaagctgaactgtttggaggagcttctgacaactgaagattctaagagaagctgcagctgttagaaacacctctaaacaggcccggtcacctataccgaagaactctactacgaacatcatgtgtttcgtgttaggacgatgtacgtacggctggtctccaagtcctcgtcaggatcgaaggaaaaacttaaggaatctagtagtagtagcacttgctggcgtggagcatctctgaatgtgtctgaacgattcctgtactgctggattctcccgccacgagaccaaagtccaaacacgagtctcatcattagcttagcactagtacccccgtgcaatgcatgtactgcgtgtgtgctgtgttttagtaatacgcttgaaacctagggcaggcacaccaccgcggattgccgtgcacgcgcgagcgccgcgcgttgtcccacgccacgccacggcgcgcgcgcgcgcgcggcagatcggcaacggcacggcgcccgcgcccgcgcccgtgcgccccggttgaattgactggacgcccgcgcgcgcactggcgcgacacagcgcgacgcgtcgcggcgccttccaagtgggcgtcggcgtcgccgccggcgccggggaggaacgtccatggcgcgagcgcgagcgcggcgcggccggtcaaaatcttctctctgctggtcgagccgtcgtctcgtctggtcagagtcacacatcgctgctgtcccttgggactctcgacacgccacgcagcgcttcctgccactgctgctgctgatgctgatgctgatgctgccgaggtgaagaaaaatccatggcggaacacgcgcgagcagtggcaactcgctcgagaccgtggtactcttggatgtgcagtgcagggcacacagtcgaggctgctgcctgtcacctgtgttgttgttgttgtggtggttcatcgatgacaaaccgcaaggattcggaacggacggacgcaagcaacgcagcgagctcgtgctctgtcgctggctgcgtgtgctgtagcttctggcacggacgggctcgtgtgtgtacagcgccgtgttgatgctcttggcagggtgggcagtacacacgccgtgaggtcagactcgttcagtgaggtcgacaagaaactgcaacagtgaagagtcaagctggtggtcaatgatcagttctagacaacttagtactacctccatcctaaattatagtagatactccatctgtttcaaattataagtcattttgactttagtcgtctcaagtttaatcaagtttgtaaaatacaatagtaacattttcaacccaaaacaaatatattgtgaaaaatatattcaattatagatttgataaaactaatttggtattgtaagtgttactgtatttgtatacaaacttgaacttggaatagtttgactttgaccaaagtcaaaacgacttataatatgtaatggaaatagtgcatagttaaaagttgctatattttaggatgaatgtagtactaagttacatgtaaattccacgctcatttcacccgaggatctgatgatctttgctaacagctgcagtgcaaatacgttgaagactccaagaccattgcgacaaggcagatttttcagattctgtcccatcaggggaaaaaaagttcagaggacatgaaaaaattgtaccataaattaaggatggtttgaacaatactttgaacttcgaagtaacacgatgaacatgaaggaaacagcatccttttttgactgaactcttaaaaggaccactgaaccgctgttttgaggaggcgctacacaagctaactcttcgttgtgtggaacatcaaagacgaccttagagctcactattgctagcaccaccggttgtctttccattgacggcgataagctccgtgtcaaagattagtgttgctccacctattggttacgaaaccgtatgtcagtattataggtaaatgggaaaaaacttatcacatgccctgttggcaatgtaaaatgtaggtgtgaaacatggtaaaatagccatgtcaaagttgagaatctacacatggataattctttcacaagaaaccatcaagcaaacaaacaaatattcagaccatacctggaatcttcggtggggagcctctctccccataacccatctttgcaggtatctttagcttcctcttttcaccgacacacatacctagtaacccttggtcccaacctatagataaaaacaacaatgtaggttgttggatatgcgaaggccattgatatgaactgcacagtccatttcctatttttgataacatccttggtcattcaagctacctcagtatggactatggataaatatggagaagttcagtattccagggaaaaggaataaccttttatcacttggccgtttccaagagtaaattcaaaggggtcacctctgtcatagctagaatcaaacactgatccatcagtgagtgacccctgcagcattatcaaccatttcaactcaatgatggaaatgtggaaataaactatgcaggaaagtaccacaatttttttttctttaacagttgtaaaagaggtcttttaacaaacatgacagggaaaccaggtaaaacacacaataaaagacagaatctacactgttcattcagcaatgtagtttatcactctatccacaaaactatttaatctgatccgttaaataaaacatgagtatgtacagatccatagtccaatggacgatgccttccattatatgcagtacaacacgatagagaaaaacaaaacttagttctagtccttaacatccaagttagtgtagttagctgcaatcactcgttctttgagtttcaaccactcaatcaggttttattttaaatgttggaagtttctaggattcatgtgggaatcgaaatgtttcaagttacttttcatattattaacaaagatatggaatacttacacgataatgcactttgattttgtctcctttgtgagcttgcagggtgcatgactctggcttgtactgaaaggaggatagccaaagaaaacttatgctatgcaatgcagtgaaatgcagaaatgcttaattttaaacgtaaaaacagaacaatcctaactttgcaatgattgtctttttcctgtaggaactgagcgttgaaatcaaaatatgcaaaaaacattcaataacaacaaccgtcccccccccccccccccaagcacacactttcatttgtgatgtactatctgctttgagccggtccattcagcacatgaatagatcaggtgaacataagcaatttaaaattcttatctttgttgtaaagaacaggttcaaatattcaagtgaaacaaagttcattcaacagccctttcatggaattggaaaagaccctaaccagtaaccatccatttcgcacatttcagatccgcacaacacaatctattctaccatatcgtccaagctcaacaacaccaatccatatcaaattcgtcacgcctggtacaaatcgagcttgtttgaacggattagcagatatacatcgaatcgacgaactcagcagtatcagatccactacaccccgaagcaagaatcgcaagaacaaccagaaaaaaccggttaccttcacaccgatctgaagctccgtgacatctccggacttcttggccgaagctgaaagccaaatcgagcaaacgatgtataagccaaacatatcaagaacaagaagagtagaaaaacaacagatctttacaagtcggctgagctatgagaggagatggggatggggaacggggttgtgcggataccggtcaggatgagggccgccgcgacaacgacggcggcggcgacggcgaagcggacgagccgccgctgctgctgacgcttccccattcgcttctccagtacacgatactaccagttgacgacttgacgtaggcttcgccgtatttgcacacggaatggttcgcgtgggcctacgactgcggaggcccatttttagtttgggcccggcccaaaattcaggctactacagtattttttgggctttggaatacttctaaatattgggccgtaaaatcttctctctctctctctctctcttttttgagaattttggacacaattcttttctacgcgtgcacagctcaaaacggggcctgactccttctgtgtttgctagaaaaaacttataagttttattactacacatgagtcatatataattgagagctcagaaataaagtcagaagtcgcaattggtcatgttaatttctcagtattcgaaagagtgttcatttagattaattctccggcccctggatatcagatcagccatgcacaagctgagaccgcatgctcacaaattaactaattcagctaccatatcataacgtcggccaatcaactgctacatgcgtttgcaatattggagtcagacacatcgtttattgagagagcataattaagggcaaatggagcagcagtatattgataaaatgttaataagttgtttattatctcagcagttgcaggtctacgagatatatatggccggtcaacacccgcaagctcgatcgttgagtgatgcatatacttatgttataggtgctgtccacgtacgcataaacatattttttattatattgtatttgcgtgaaaactatatttgcattgactgtctgttagtaccataacatcaccttaatccattaattagtagctagtattattaaagtttgccttctattgaggataaggaaaacacgcaatgaagtgaagaaagctgagtgtgcacttacttgccatccaagttaccaaccgaatatcaaacttaccgtggacttggcgtcaattaattaacagcgaccattattatgcaaagttatcctcgcctcatttttaatgtagttataattttttattcaatatttgaccatccaacttatttaatttttttataattagtatttttatttattattattagctaataaaactagaataatattttatgcatgatttattgttattgttattttttatatattttttaactgacggttaaatattagacaaaaaatcacatgtgcacttaaaataaaataaataggggggggtataaagtatctacttgaccgcctccagcccgagacctccgcgtaaaaccattgtccggccggcctccgcgtagtcttccctagcttcggtgtcccaacgtcgccgtccttcaccattaatgcttcaacgctctgtctttggtgactcctgtcaccacgtcagccatctcatcactactctatccctcttatcttcgggtgtgtttagttcacgctaaaattaaaagtttaattgaaattggaacgatgtgatggaaaaattagaagtttatttgtatatgaaagttttgatgtgataaaaaagttgaaagttttttttaaaaaagttgagaactaaaccgggtcttctttggctgtgccgctgcggtgccaatatatgtaccattgttattctctatcttcagtggctccacgcaaaactcccacaccctcatgatgtgtaatttcgttgagctccaaaactttagtatttttcgaatgttttaaaattggaaattaattctgaccaaattttaattaaactcataaaagaaaattaaaaaaaatcatgaaaataacggatgaaatagtgtcgtgctgggtggtgatttgtgtaccatagctaccttgccccacagccatcgatccaacatcgttacggtcatttctctaagctaaggaacacctcctattcccctaccccttaactcttcttctttccctacctaaccatttaatttaccaagattaaattgcaaggttaaaaatctatgtgatcccctaaccccaatcccctcctcttcacctacccaaaaaaaaagtgttgagtgatgatgtataatatcaggaaatatttctatcaaaacttttgagggaatgtcccatcctttcttgcatgtcatgcaaacatttatgaaaaaaataggaaaagttagatcaatactctccaaacatgcaaacttaaattcaacctctacaaattataataaaaaggacaaatatcaaactctagctagtatgtgtatattcacaccaaactttttttatttgtgtccttgtagaaattaaatttgaatttgcatgtttgtaaagtgatgtcacatatggatcgaattttcgaaatttctttatagttatctagataatatgtaagaaacaagagaaacatccactccgtgagtttaaaatccattcccatataacatctcaatatctcgacagttttgcatatatattattacacaccattgcaaacttgcactccaatcacacaggtgacaattaacaaaacatatatagatatataatagtacgtagtaagtagcacacagactgagtgtagccagcacactgcatgcacccagcacacagggttacacaatctagctacacaacacaggtggtagtacaagtttacaacaatacactctctctagtctctaatacctcgctaattactatagctatagtacttcatctccttgaagaagaaaaaccagtacttcttctaggacgtacggccatccatgaaaaatacatgacgtttaatttacacaaacactgtacaaccatgaacattattacatatttagcatcacatccgatcgatcgaagaactaaactgacgaactaattaaagttgtgtagatcgaactgtagataattttcgttcttggacacacgcattcattcatatagcatagctttcagagattcagagatgcagctgatgaacacacggacgagacgataatatggagcaaaacagagagcatgagtagagtgtcatcatcagtctttgtccagcccgaacttacggtcgatgtagccgccgacggcgtggaacgctgggccgaagaacccgccgccgccgccgccgctgttgcttcctgatccggatccagcgccgccgctcctcctcctgtcgccctcgctctcgtacttcggcgacggcgagtacgacgacgacgatgagccgtggccgggcggcgtgtggtggtagatgaccttcacctcctccgcgcggatgaacaccggcgccgccccggacccgccgtcctgcggcggcggcggaaccggccagccggttccgccgccgccgaagttgttgtggggaataggtgcggctccgcttatgatgatgctgctgccgccgccgtagggagagttgctgccgccgtagccgccgtctttaccgtaggacaatgatccgccgtaggaagtgttgccgccgccatagccgccgccgccgccgtagtaggagcctgaacctgcaacgactcccgtgctgctgccgtagtaattgttggggttgccgctgttaccgccatagctgtccttgttgtaattgctgctgttgccgccgccatggctgtccttgctgtggttgttccggtctttctcgtcgtccttgtgcttgtggctgctggtgatcttgtgcttgttcttgtctttgtcgtcgtcgctgccattgttgttgttgttgcttgtgtagctctggtaatccttcgtcttggtctccttcttgtcgccggcgccgcgcggcggcgacgacgaccgcctgccgccgccgccgccgcctcctgatccggcgccgtaggaagaggtgtcgtagtacgggctgttccacgacgacatcgtctcgatctctagcttgatccccaacttaatcactcaagatcgagctagggttcgtctagatatatatccctggatgataataagttcatgtatcagcatgtatgctttggttgaaatgaaaagtgctcgattagatgcctaggaatatacacatcgatcaactagaattttcagtaacaaactaactcttgatgatgatatgagctgtatgtatcagtatcaactagctcgaacagtgattaaagagtgaaaagaatgagaaatttaaacactcatatatgcatgctaagcatgaacgcataccagatcgacaggggaagcagatagctagctagtgtgataatcggcaagatggctctacagtgtgtggccaagtatatgttcacaacttatagaagcccctgcagagacgtcaacgccctagatagaaaagtcttcgtcttcttccccaaaaatacaccttttttaattatcacagacaaccttccaaccacagttaagattaatatacgtaaccctatggcttataattgctgattagtgattcggattgaaatccatggaccaaaaataattaaactacgagtagctaccccacttatagtacgtcgtcaacctgtaaacttgcgtattcaaacacttcagctaaatcaactgatacctgcacacttcgatccattatacactgcgtatatttcgtggccagtgtaccgaattcgcaatcagagaaagagagaggttagaacttagaacaagactgtgtcagaggaaatatctctgaaattgcgcgcatgcatatgccgacgttagcattcatacaaattgcaatagcgataaaattgattaatcctagtttgactgaatatcatccagaattgaatcacattttcataaagatttttcgtgggccggaacgccggccgaatcctatatacttatatagttcatccccactaaatatagttaatgctatttctctcttctctcgttaagccacatcactctaattatttctagcttttaaataaaagatctatgatccaaattgtctcttctttcttctctctttaaaaacatacaatcttaattatttttaggctcaaaattatttcaaattgttttagttttgataattaaattacatcttatttgcacatattatgtaacttaatttttcgcagcaacgcgacggggtattcatttagttctattaagaatcaagagagcaaattaatatcatagtgatatacaggtctagatatatattgattgatctctctcccccagttagcaactaccggccgaatggcaggcagtacagcgacatttgcagtttaatttacatgcacgtacatttgcgccaatgtggtaaatacaatatgattaatctctcaacaacattcaaattgttacattgtaagcatggtcatttttcgattgggctggaaacctggaaggcagcaaaaattaaactccccatcttaacaaacttgaaccggatattagtaaaaaaaaaagttacagaaacgtttgtggtttaattaaatgaattgtggtcattcttcgtctgattggaccggatggtctacagcaaaatttaattacataggtagatagataagttgtaatcagattagtattaattcaactgtgatgtatgcacctagctcatgatcgagtcatgtcatattggacggatttctacggctcaaaggcatacgtaatttctgttactgatatgtggtactccctccggttgtaaaaattaaaattgacgccgtcgatcgacttttaacatgatattcaaacgtaactatttgatttttatgaccagtaaaataaatagtaattaccataaatagtaattacctttttttaacaagatgcatgatcaaaacgtaatgactaaagttaactgtgtcaaatatgtatgaacagaagaaacacttactaaatacagtagtatggaagcatattgagtagctagccagcagcacactgaacatacacacagcatacagatagctagagtacaacacaaaaaacagtctccggctagtacaattatacaacacaatactagctagctagctacccacatgtgtatatactatatagtacattagcaacttcatttttccttgaagcaggaaagccggtactactggtttacacttcttcggcagttgaaaaaaaaataacaaaactatagaatcacgagcactcattaccacaaattatttggcggccttccgtgattatttcttctgaataataacttaacttaactgaaccaacgaacgcttgtagaatttgagtacgtacgaattaagtatgtgccaacatgcatgcatgcgtgcacatgcagagttgcagtagatatcgatggagtcgatcgagatgcagaacggagaggagacatcgacgaattgaattgaagcaatttaggaatctatcaggctcagtcgaatccgaacctacggtccatatagccgccgacggcttggaacgtcggaccgaagagcccgtttcgtcctcctccgccgccgccgttgtctctcctctcgccggagttctcgttctgcgacgacgacgaccctggctgcgtcatgtagatgacgttgaggtacgtcggcgccgaccctgagccaccctcctgccgcggcggcgccggcgcaccccagccggaattagagccatagccataggaggcaggggcgctgccgccgccgcctccggctacgatggcgccgccgttaccataggaagagccgccgtagccgccgccgttgccgtaggtagagccgccgtagccgccgccgttgccgtaggaagggccgccgtagccgccgccgttgttgtaggggttgtagccgctgggggcgctgctgctgtagccctcgttgttgccgtagccgccgtagttgctgtagctccggtctctctcgccgccgtcgtcgtcgtacttgtagctgctgctgctgctgctgctcttcttcttgttgctcttctttcccctgcgcctgttccggtcgccgtggtcgtcgtcgtcgtcgctgccgctgccgctgcggttgtcgtcgtcgctggtgtacctcgggtactcctcggacgtcgtccacggcgagcggccgttgccgctgccggctcgtccgtaccggtcgtctcctcctcctccggcgaacgacgagctgtcagagccagcgtagtactggctgctgctgctgctgcttttgccgctggatttcttccaccaggacatcgcctctcgacttcttgattgaacttaacttaaattaattatggtcccagctactgatcgagctagctagcatgtaattaacgatttactgattagcagcaagatatgatgcagtaaataaactcgaatgagaaattttttttgaataactcaagctgaattagcatgcatgcatactaacccgacagtagatgatcagatgataggccagataagcgcagatactcacaagagagatgcctctaaaaacttgatcttatagaagctcaaagacatcgatcagatcaaagtctcgtcaacttcaatataaaatagggcactttttaatttaatcatcacctaatgagacctaaacttcccaccaacagcagttacgcgtggatatatcagagataaaatgagacccaaggcggctgtgccctgattatgatccaaatctagggttccaaaattattagactacgagtccacttgcgaagtatggcatcacatctgacgtgtagacttgcatatgcaaaacacttgagctaaaccaaccaatccctacacgcttaattgcactgcgcactgcgtagatttttggtggtcagggcaacgaattttcgcaatcagaaaagcgaaacgaattaaagagttaactaatacaaatttagaagtagactttgtcacaggaaacatctatgaaagttcatatatatgaaataatgaaaacgttatgcatgcgacaaagagtttaacttagtctgactgaatactgtatatatccagaattgaatttgaatcacatcttttgataaagatatatatgtcgctatagcttgagagataatccccagttagcagtagcaattagcaattactagacggaaggcagtacagcgacacacacacacacacacatacatatatacataatatatatatatatatatatatatatatatatatatatatatacatacatatatatatatatatatatatatatatatatatatatatatatatatgcagttttaatttacatgcacgttcactgttgtgtcaatctggtaaaagtgattaatctcagctagctggatccaagtaattaattgttacatatgcaaggtcatttttcaacagggtataaaaaacggtggcatttggctgttaattttggccggaaacctggaaggtagcagacactatccttaattaacaaacttgatctagctgcaagtagtaaaaaaaaatgcagatatgtactgtagtcaatgagttgtagtcaatatcttagtctgattaattaattggaatggcccatatatatgggacaattacgttcttccttttttttaaaaaaaaagaaatttcggtcatgattttaatttaccactggttttttaattttatgattttcctatcatttttaactaataatttcacacatgcccttgcattttatcatgacttttgcccctttttttaatatgaattcaatttttaaatgaaaatgtgaggacaagctagcataagcttgaaatgaattttaacaccattaagtcattttaatgaaatgacaggaacaagcttcagtcaaaaaatgagagcaaagttacaaagttggaaaagtgggtaaaatcataattggaagtctcaacagaggtaaccataaatgcctattaaatatacactgattgtctagaacgaaaacactatgtaagatgtaattagttttagcattaatatatagtttgtggttttttttatcacatgtatatagtttgtggttgatgtaatgtgatgataatcatactagcttaaattaggttgtataaaaaaatttcaagcgctgcttgcacttggcctcatcaatcatatctaacattggacgaaataatactataaccgttgtccttggtaaaactacaaatcactggacggcatattcaagcagagacaaaatttggcatatagcaaggtgtgctttaacagcataggatcggactaaaagtccatttatgatcagaacttatgaagaaaattaaaaattgcaggcttggctgcgctcggccctgcagtcccccattttatgatctggagtaacttttagtgtatatttaaattagaagaaattacacttgaatttaattacaaactgattaattacaatatgatgcaatcacacatacatacattaactgagcacaaacatacgtatatatatatacgcatgccgtacacacatacttatgcacacagtgtcacatatatatctcacacagtacatgaatatatacagagtacagtacatgaaacaaaccgacactgcagtcggaaaaaaagaaagaaaaaataaataaaaataaagccaattaaccacaaacacatacatacacgttgcggccgtatgcagatgcaaagaagaaatacttattagaagcgagcaattaataattacgtatacgcacgtaaatacggtcgtacgtatactagagctcgcagacggtacgtacgtacgtatactgatagtctgatgtacgtatatatgcatgtgataatagtacaagtttcgtgttaattacgcgcgtcaccgattaattagtataattaattaattagtcgctgctgtggaagccgaaccttctgtcgaagaaatggccgacggcctcgaacgccgggcggaagaacccgccgctgcgccgcctctcgccgctgccgccgccgccgccgtagccgtcgccgccgtcgtacggcccatgcggccccccgtacacgtggacctcgcgagtgttgatgtacagcggcgacctcgcgccgttctggggagtccagtacccggccggcacgccgccgccgccgccgtacggcacggatccaccaccggtgtaacctccgccgccgccaccgccgtagtacggagtaccgacgccggcgccgtagagggtgacgctgccggcgttgtagccgccgttgtaaccgtaaccaccaccaccaccgtagttagcgccggcgttggccttggtgctgccgccgtagccgccgccggatgctgcgtagccgacgacggcggcggtggcggcgtcgtcgttcctgccgctggtcttcttcaggcgcgacggcggcggcggctggcgcttcgccgacgtcttgtcgccggcggcggccgcttcatactgctgctgctgctgctgctgctgccgtcctcctgatccgtaggtgtcagtggaggaattggagtagctgctgccgctgaaggatctaccgctgctgttccacatacctatccagcggtcgatcgaacaaattaagctaataaaattgcacgtacatgtcaagaatattcagagattcgatcgttgcgttgttttatatatagtatatatatttggtggctgcagctaatacatgtaattagtatgtgatatattgcattcagctgacggtatacatgaacggatttgcaaacgaattaaagaaccaattatcatatactcctataacggatacttcagatatattcagaagtattcttgaattattgatcagctagagtttaatgaactgtgtctgacgaatttgattatgtcgatctggttagctagtggttgatggatgaactgtgcctgatatggtagttcttcaagcttgcatggatgaacataatccgctagaacagtaaaaagtgaaaaagaaacataaaacaaagtaaaaggaggatcatagataagatacctttaatttgtggaggagatgacacttaattggatccggtataaggcaccctctgcagttgccaaggggcgttctatatagagctagtacactcaagtcaaccacacttcgagtctccggttttgcaataaaaaaaagaagacacttgtcgtcttagctatagagaaaaagcttcaaattatctgcgtcatatttgaatgccacccacaatgattaccatattttgtgttaatgtaaccgggggcgaatttactgttggggctccaattgaacaggtaacaatgtgttagagcaagcaggaacaacagtttgcagtagaggagcaagtaagaaagaaactgaccaactggtttgctacgatgaagccggccaagcttcatagcttcagattttatccaatcaggtctggtagcatatagggtataggcgatagtaaaatatgaatatcaataatttaggctttaggtataaacttacaactaatttattctttattattaacactacaaatcattttactttcatttttggtgtttcagtactaatttgaaattttatgagcgttaaatttgtgttatggattgcgacctaagagccccaactcgattttcattctacattcgccactgaatataactaaagttaaaattaattaacacatattaattctgccaatgaatgattgatcttcttaattatatgatcatttaacagttaatattcgccactaacaatgatcaagtaatgatagattcatgatttgtgcgtgtgtgtactgacactgttcacccagctagctaattaattactctcaccagaaaaaaaaattaaccctcgtggtaattaatctctgcaccaagcgagaacctttgatcagaaattaatgaaaccaacaacggtcagatcaagctaggtctcatactgtacttagaaagtagaaaatgtgtcacgatctagtatacgcaaggctgacttctagggatatacgtgtgcttgcgagttgcaagcagccaagaggacgtatgaactgtatcatttcatgaaacagccaatccctaactagtcactgcattaattaattaaataattacagacagtagtctgcactagtgcagagagctcagatcaattgcgattatactccctcagtactcattaaaaaaatcgtttagaacaacgtttaagtcaaaccttaaaaatataaattatgaataactcttaagttgttgagtttgaaaatataaaaaatatataaatagatttgtcttgaaaaataatttcataaaaatataaatatatcattttttttaataaatatttttatataaataaaaagtcaaaattatattttggagaccgtatcactatccaaaacaatttcctttaccggagggatcgagtacagcgagagctgtggacttctcagacacgcatgcattaaaccgtgtgcacgtacgcaatttcggcagcctctctctctctctctctctgtagagtaagctaaacagtgacactgaaagagccatcaaaattaaatccatgccacatcagtctgatctggattactttagaggttagagctacattttcacaaccatatatttcatgatcgatcagatcgaccggtctagctaatgaacgcccatagctcacttaagtacctaacctggcttaatttgtagctttaattaattaacgtgcacttgcatgtactgtctgaatttaacaattaatgtggtaaatgatttcaattggcatgcaggcagctcgaatggtgtgtatgataataaaatgttgacaggaacagatactatagtgttaattaacccatgatcttgagcgtgaagttagtagcaaatcctggcttgtctctacaacctcttgcatctagctaacttggttcacacgtcaaaccaagtcgatagatccatgctcgattgacccttgacttgaaccaaattttattcagaaaagtagatgaaattacctgctagcgattgctacgtgccaaaatgacaattttagtatagtagcgacatttatattattatcgcaacctttctataaaattaaacgtaatctctccgttctttcattcgttaaaccctggtcaaagttggattatcgtcatgatacgttaagctaagtagatgaccataaccatttcattaaaacccaactaattgatattattgatctctccgatataagcaagtttaaaacgtttctaaactgtacgattacttgtttctttatttctagctagaaagttcgatggatcaactacctaatattgggatattcatggccactgtatattatattcaga

SEQ ID NO: 5216 - DNA, 12927 bp, Oryza sativa
ttacattgtgaaacggagggagtaggctatatcaaaaaacactcccaagacaactgtatggagtgtaggatcataacatgcgtgattgtgtgcaatatattttggcatgacaattttttttgaggggaaatatgggaataacaaagtctttgatgacaaaattaattatttactatcgctttttatccactttcaatcattttcttcaggctcactcaataccaccaattaaaagtctgaaaaatatcctcaatctaaaaacttcgaccaagtcctagtagttaatcttggaatataaatccaaatcagaacttcagaagtataccttggcttcaagtggctcgcgacgaggtggcaccgtggcaccggccaccgggagcttggcgccacgacttgtaaccccgtgagggccgccgtcttcccccctcagccggctgccgtggcgtccgccgctacttctccaaatgcttcagccgagagcgattccccctaggctggcaaacttcctgtcgatgccgtctgctccctcgcgtggcagcacccgcgttgacgccacccgacgcgggctcgccggccatggccatggccgcagccactcgctctcctcccgccgcgcggcgccgctcccgtgccgccggcggccgccgccgcacgggattgggtcaaatcaggccgcatgtacgggagactcctggtccaatgggctagtgggccgtactgagttattgaggcccataaatacgaggccccagacggctcaaggcctaccaggtcggcacataaaacgagaaagtcattagtttaagattagtcaagttttaattactagtatgaattagaaaattaaatttatttgtggttttagaaaaacctttgtatagaaagttttctcataaaacatatccttaagcagtttcgaaacgtaatagtgaaaatcgagatagaatctacatcttaatcggaaaataacagggttcacgcgggctttttgaatgaggcgagatgttaatcagatgatcactacgctccttgcttttctgcgcgatatgattctgaaccacttaagtacagtagtactagcatttagcacgacttcacggatctttagctaggtcaaacgaagtttaataaagctatcgtcactttaccagcagttttcaacagcacgactatgatagggatgtgttgtggacttatcactttgatgaattatggtttccttttcttggggtcgagggcaacagtatccctcacttatgtttccattcatctctcttttgaccattgccatgaagatgctttaccctggctatcacgacggagagtacaccatgcatgttatatgcagtcacgaatcatccatgattccatggacagccaatcttctttgcagtttgcattaccatgcaactcacccatatggattcatctagctagtcaatcatgggatattactgtactacctccgtctcagaaagatcatagtttcacgttatttatgttcaacgtttcaccgttcgtattatttaaaaaattaaaatttttaaataagatagtcaaacgttagagacgagaatccacggctgcatttaaactggtacggagggacggaggtggcaggaagtaggaacgcacttgcagtcttcctatgcggcggggcactactagttcctagattccgtatatggctatgtttagttcagcgtaaagtttatattttggttaaaattagagatgatatgactgaaaagttatgtgtgtatgacaggttgatgtgatggaaaagtactgaagtttggatccaaaatttagattaagcacagcctatgtatggtgctcgtgagtcgtgagacactgaggccggccggcgtacgtgctccctgcacagcggccgtgaacaattttccaaggagatgcaaggaaaaaaagaatcaacagttatggaagcagcaaccaccaacattttctaccgtcccgtcatcttcttctccgtgctcctttgtttccaataccgtgccgccggcgttgcatcggacacgctcagcaatggccgcaacctcactgatggcgacacgctcgtgtcagccaatggctccttcactctggggttcttctcacccggcttgccaagcaggagatacctcgcgatatggttctccgagtcggcggacgccgtctgggtggccaaccgcgacagcccactgaacgacaccgccggcgtagtggttatcgatggcacgggcgggctcgtcctgctcgacggcgccgccggccaggccgcctggtcgtcgaacacgactggctcgtctccatcggtggcggtgcagctgctcgagtctgggaacctcgtcgtgcgcgaccagggcagcggcgacgtgctgtggcagtcgttcgacaacccgtcgaacaccctgatcgccggcatgaggctcggcaggaacccacggaccggcgccgagtggtccctcacgtcgtggcgcgcgcccgacgacccggcgacggggggctgccgccgcgtgatggacacgagagggctagcggactgcgtctcgtggtgcggcgccggcaagaagtaccgcacggggccatggaacgggctgtggttcagcggtgtcccggagatggcatcgtactcgtccatgttcgcgaaccaggtggtggtcaagcccgacgagatcgcctacgtcttcaccgccgccaccgccgcggcccccttctcccgcctcgtgctgagtgaggccggcgtgatccagcgcctcgtgtgggatcccagcagcaaggggtggaacacgttcgcgcaggcgccgcgcgacgtatgcgacgactacgccaagtgcggcgcgttcgggctgtgcaacgtgaacaccgcgtcgacgctcttctgcagctgcatggcggggttcagcccgatgttcccctcccagtggtccatgagggagacctccggtggttgccggaggaacgcgccgctggagtgcggcaacgggagcaccacggacgggttcgtgccggtgcgcggcgtgaagctccccgacacggacaacgccacggtggacacgggcgccacgcttgacgagtgcagggcgaggtgcttcgccaactgttcctgcgtcgcctacgccgccgcggacatccgaggcgccggcggcggcagcggatgcgtgatgtggacgggtgacgtcattgacgttcggtatgtcgacaaagggcaggatctctatttgaggctggcaaagcctgaactaggtacaacactgaaactaatgtgttcgagctaatgtgttcttgaggaggtaccataaggtaccactttttctattgtaaatttggtaccttttggtaactaggtactataaggtaccaaattttacactaaatttttgatacctcatgataccttcttaaggaccgtagaattgctcaatgtgtttggcaatggttaattacatatatatttccttcgctgtaaaatatcctagtactcggttaaacatcgcctagtactcgattagagtctataatatttgtgatgtctgattgagtactacgttactatattttagcgtggaggaagtactaattattttggtgaaatatttcttttcgcagttaacaataagaagaggactgtgataaaagttctgctcccagttacagcagcatgtttgcttctgctgatgagcatgttccttgtgtggttacgcaagtgcagaggtagataccgagccacctcacttctcagttctcacagcttatctaattaagaataatactactattaatattaaaatacacgatattgatattcctgtcaggcaaacgtcagaataaggttgtccagaaaaggatgctaggatacttgagtgcattaaatgaacttggtgatgaaaatttagaactcccgtttgtcagttttggagacattgctgctgcaacaaataatttttctgacgacaacatgctcggacaaggtggcttcggaaaggtttataaggtagcccacaaaaactgtattgaaaactacagtaggacaaaactatcgcacaatattcttcaattttagagcatattttttaggagtattacagaagaagtgccacaattagtactccctccgtccaaaaatataagagattttgggtgtcacatctacccaaaatcccttataccataggacggagggagtagtttactactgaaaagtgaaaacagtgataccatatgaaaatcccaattatggatgatgaactttatttttaaaaaagggagaaccgacaagaaacatggtgttaaataattaagaagaatgtgtgagcgtgttaagaatcgaataaggaaccttggggtcgaaaccacgtcccttatattgcggtaaaaagtgcatctcgagatgaactttcttaataaaaaaattaattgattaaattgtgtagggcatgctgggtgataacaaagaagtggcaattaaaaggcttagcaagggttctggacaaggagtagaagagttcagaaatgaagttgttctaattgccaaattgcagcacaggaacctcgttaaacttcttggctgttgcatacatggagatgagaagctgctaatttatgaatacttgccaaacaaaagcttggaagctttcattttcggtactgttcaaaaacataccatgcgatccaataaacttcactccatgcttactgatagagaaattttattgttcttgaaaaagtatctcaagatacctaaattttacactaaaatttttggtaccttgagatatttagtatctgaaggtaccaaaatttacaataaacaatgtgatacttaccagtactttctcaaagatgataaaattatccttactataagaacattgtataccattcttgatagatcctgcaagtaagtatgctcttgattggccaacaaggtttaagataatcaaaggagtagctagaggacttctttatctccaccaagactcaaggttgacaataattcatagagatctcaaatcaagcaacatcttgttggatgtggatatgagccctaagatatctgattttggtatggcaagaatcttcggtggcaaccagcaagaagccaatactaaccgagttgttggaacatagtgagtgatccaggaatttgttttttactattacattgatttcctgaaaaatcctttgttacttattactaaaactgttaagcagtggttacatgtctcctgaatatgcaatggatggcgccttttcagtcaagtccgacacatatagctatggtgttatactcttggagattgtaagtggtctgaagattagcttacctcggctgatggactttcccaacctattagcttatgtaagtaccatggaatgctctatgtccataaaaattcaaaataactataccgcttttatatggactgatctatttcactgtttaggcatggagcttatggaaggatgacaaggccatggatttggtggattcatccattgctgagagttgctcaaaaatggaagttttactatgtatccacatagggctgttgtgcgtgcaagataatccaaataataggccacccatgtcttctgttgttttcatgttagagaatgaagctgcagcgcttccagctccaatacaacctgtgtattttgcacatagggcctctggagccaaacaatcaggaggaaataccagcagctctaataataacatgagcctcacggtattagaaggacggtagatttactttttgcacgcaaaggcacaaagcgtttcctttggacaagtcctgtaatcggattgtggatttccataaaattaatagaaacaagagacatatactccctccatcccaaaacatttgacgccgttgacttttttaaaaatgtttgaccgttcgtcttattcaaaaaaattaagtaattattaattcttttcatatcatttgatttattattaaatatactattatgtatacatatagttttatacatttcacaaaagtttttgaataagacgaacggtcaaacatgtttagaaaagtcaacggcgtcaaacatttagggaaggagagagtattaacattacactaactagaatatgtggaatatgtggttctcccaagattgtgtgttgtacaaaagaatatttcaacatcctttcaggatcagtttcgtcaaataactgctagtaagttggatgttttagtgtttcaagaagtcggaagttctacaccaggttatacgtaccaaaaaggaggaatgcacggtgaacatgcataggagtaattaatcttaaggagctagagtaggatcataacatatatgccatataattatattctacaaaatttattattctaagtttctaacaaatcttaacaaattccttagtacacaaactttgatcccattgtactggaaacgagtttccttttttattttcccaaagattatagctgatcttgaaatagaattcgaaatcgaaattagcaatacctggcttggatggggctcgcgacgtcgcgtcgtgtcgaggtggcaccgcgaacttgtgtcaccgccgcacaagcatgtgacacccgtgagcggccggaacagtgcaggttaggctcgccgtgtcttccgcctcatcagccggctgccatggccgctaatccgtccccctccctactgcctcagccgagcgcttcttctgtcctctccctaggcggcaatggcatgatgcaacccctccggcctccatctcgcgcgcgctgcattgggagcggcggacgccgggcgtcggggcacttggacgtgcgggccgagccgccctccgccggttcactgcccctgttcgacggatggctccgcggcacccgcgcccgctcgccggttgacgtggcgcctccgtgccggggcagccgacgtcacttgggtcttccaccggccaccgcctcagccctcatccaagcgcttccctctcctgatctcctccgctacctcgccgagcgggagtgcgggacaatggggttggacgcggcgacccaacgctgggtcaccggctcactgcccgaccctactcagctcggctcaccgctctgccggtctccagcactcacggctcatcgaattttttttatttataattttttttattaaaagttttacaaaaataattttccattttgaaaattaacggaaatagtcgcctaccgccctctgggagggcgatttttaaaaatcgccctcccagagggcggcgaaaatgacgtggcagacggccgtcaacgaaatttgcaggcggcccccttgccgccctccgcgagggcgattttctactgtgcggggggccgcctgcaaatgggcggcgaggggggcatggaattttgcaggcggcccccttgccgccctccgctagggcgattttgcactgtgcggggggccgcctgcaaatgggcggcgagggggcatggaattttgcaggcggcccccttgccgccctgggggagggcgattttgtactgtgctctatatttttttatataaatatcaatagttatcaaatctttttatattgaaaactatacaagattaaaatctccaagactggtaaaatacaattttattattttttagggcatatttggaatgttaccgtacaaatattttgttaatgccaaaatataagcaagttttggcactaccaaatatttggtaaggtaaaattgcatttgatcatatttggtttgctgccaaaatgtaaaattgtagtgaagaatgttgtacataatctcaattctagattacgtattaccaattaataggcttccattttcgtgtgtggtgtggtagtgggaaagaagatatgaagaggttgccttcagattgtcaattatatagcgtcgttttcactgcaatacatgtgaactcaatgagatacattattcattagatgtgacaagacgatcacgcgtgggcgtgattcactttatgtcaacaggcagcgccgaaagttgatagtgataactcgagctgccgcttttcatgtgtgctgttgtggactgtgcgcgctactggatatggcactaccgtgaagcgccgaaagtgtgttgttgtgagcataagttgttcaagcaccatacgaatgaaaagaactacgtagacgagacaaacacaagtagtactgcagtagtaatagcaaaagtagtactgctttacaagtttgtaagccaaaagaaacggtcacataaggactgaagaggtagaacactactgacgaggcctcttacccctgtccctcctaccctgcgccctaatgtgcccctgggagtacgtgagtcggtccgggggtacggcacggccaacccgtcctgcctgtacaggtgtgacctctggctgctcctgagtgtgcgcctctggagctcctccaagctgagaggagcctagtacgtcctggtggtctgcaccgtgcaagtcgtcgtcgtagaactggctagtaggaccagtcctaccggcgtgagacgaagaggccccagtaccgaagatcccggctgcaaatcctgctggacaaggaccatcagtttcgtacaggtatttaacagtattaataaaaagtaaagtaccgtgtgggcgagggaacgacgctccgtgagaggaagagctggcgaacgcgcccgaagaggtggcgaacgcccctgcggagctcgcggaagcgccggtcgtgcctgcgaacgcgctcgaaggcatacgaggtcctgcgatgaggaaacgtgcagttaaaacatggtgacacattcgtgcaaaagctgaaacaaaaatgaactaatatctgggctgaactgtaccgtgcgaaaccggtgctgtaggtcgcactgctccgaagctaggggcgctcgaagacaacgaggtcctgctccgacggtaggaccgcgaggccgtgggtgtaccggaccagcagaaggtacgacgtccacggcgctgcgacaggagaagacgcgcatgaccgcacgcatcttctcctgcatccggtcgaaggtcgacctctgctcaacgtcagtcaagtgcaaacctctgctcaacctcacctggactgcggtgatatcggcactgatatcccgtgccgcatcagcctatgcaagatggaaataaaaaattcagtagttgtcctatattatgcaagataaatgacataattgttggaagtaatacaaattggacgtaccgccacgaagtagtctcggtcacggtgcgtgggatacgcgtccgtgacagcggcaacgtgcggctctggggcgtctggagtgaaggtcacacgcgcacgagtgcgaggaaggtaccagcgaaggtagtcacggtagttctcctccgtgtgtgggaagagctcgttgatcacctcctctgtagctaacacccagtcgtcaacgtactgctgtacacgtggagcccaaagtgcgcctgctagctgtccccgtcgagtcaacctgtgaagagaggtaaattgtatggctcgatgatgtaattatcataaaaatttagaaatgaacaatccgaactcacgagtggtcggcaggggggacggtcggctgcacgttgcccggaaacacctgcctaagtccgaactgtcgcatcacacgctgcgggcagtgaggctcaacgaaaatgtcgaacaccatcggcaggatggtgagccagtaagcctggtcgcgtgtgcacaaggacgaaagtcctagcggtgctctcgcagcgacggcctcttctgtgtacggctcccagatgacgtcgctcggctggagacggtcaaactcgaacacgaagtccgggtaaccacgtctcacctggacgtgagcgtaacgacgctgcaataaacatgatcggaattagacatgttatgtgaaggaaaaaaaaagaagaggactgataaacttataacgcagcgaagttgcactaaccccacgtcgacaccagtaagtccccatcgtgggaccgtcctctggccactgcgcgctgcgaccaaccccgtagggtgcgctgtccaccactggtcgccctatggcaaacctctcggctgcccaaagctgaagcaacataggacagccagcgatgatcgctcccgcgtcagtcttcgtgcacgcctcacagagggcacggtacgtggctgctagcacggcagaaccccagctccactgcggcacgtcctgtggctgagcatccgcgatggaccgtgcgtagtggaccagccggaagtccacagcgtgcccgtgggtgctagtgaacatcacccacccgaacaaccacaacaggtacgcctcaagggagcgtcggaccgagtaatcatcagcgtcagggtgcagaaggtccgcctacagttaagaatgaaatgttagtacaaaacactcatccggtcgcaaataagcatgtatgataataacaacttatttacttacagtgaactggagcaaccaagccttgctaggcccgactgtagagtacggaggaagggtggtggtcggtcctaggtgtggaaggcgcatcacctgctcgaagcgcgcagtgatatcctccttccacccaaaaacaccgtcgacgggaccaactggtgctcccgccagcggtagcccgagcaggtacgacacgtcctgcagtgtcggagccatctccccacagggaaggtggaacgtgtgcgtctcaggtctccagcggtctacaagagcggcaaggagtgaccggtctgcatcccaccgcttcgctgggtcacggtcgtccgccgccgcctcaacaagcctacaaagtggtagaaggcctgccgcacgcaacctgtatagagcaaacttcaaacataagtgcaaaacaaagcaaagttgagttcaaatgtgaacatacgcgtaccaaggaacgtgacgggggtcgacacgcaaccactcgcgcgacgtgcgtggacggaaggtgccgagctgtgcaccctcgactgctgacaggaacgagcggtggttcctgtcaatcccacagttcaacagcgccggtgtgtcgtacgccatacctgcatcaaataggttgatcagaaacatataaataattagttcaacataagtaataaatgttcataagcgaattactaacacatattaaacaagagtacaaacaaacaaaagtgtttagtccgaacactcatcacgataacattacgatacaacaccgaatagttcgcaatactactagtacaacaatagtcggaggtactcattacaacaagattgaattgaaattacacgatagaagtatttagtccgaacactcattacatcattttatttcctaaatcgaaagcattgttacaccatggaatcgcctgctgcgcgacgacgccttggccttgcgcgcctgcttgttgttccttcaccaggtggtcgcctaccatcacttgcctgtccagatggactagcatcagcgccgcttggaacttctgcattcttcgggcatttcttgtaagtatggccgcgcagatcacacttgctgcagcgtaaagtcctcccacctgcttctgactcatccatatcatttctgatgcgtctagtttggcgtcgaccctttttcacccttaacttagatggatctggaatataaaaaacttgggcactcagcgttgtgtaagatcctgagatcccgaacccatatatctcctcactccatgtatgaaagattgcttctttcctgaaataatttgagacgtacacattgggagatatgccacaatcaccggcagcagcaagaacgtgtgagcaaggaaggtgatgaagcttcggcttcatacaactgcaggtacatccaccatccgccttcaagacacattcctgcacggcttgcttgcgatagataccacgcctgctcctatcaacacacattatttcataccgatgaacttgtgtgccttgagcaacaactctatgtctccgtgcctttttgattttatcttccatgtactttgtcactacgttgccaaacactatgttgttatcggccatggacggaccaattttcttgtatcgatccctaaagtaggcttgcgtgccgtgaaggatgaattcaacaatagcaaccaatggaagtacccgaactcctcgcattacccagttgtacacctctgccaaattggttgtcattatgccataccgagatccatcggtgtcgaacaatagagcccacttctccttaggctcattctcaatccactgagagaaatttctgatggccgaccctgacctccttctcattgttggtgggtcatcatgtaatgcaccaagaggtatgggaggctcgtcaccttcaacttgtggtctgcgagattgctcatctgtttgcttcgttgtcaactcatccaacttgtcccacaactcattaaatttcttctcttggttctgtgcacagagcctcttaaagagatccataagatgcttgttcttgaattgcttgtagaaatttgcacccatgtgacgcatgcaccaccgactccgaacatcaggccacttagctggaagtcccttctcatcccaaccgttctgcaagtagtcaatagcccgcaacatacccgcatgacgatcatgtataaggcaaacgttgggcctcatacgcaccactgcaatgtgcactctctctaggaaccagtaccagctttcagtgttctcactctctacaaatgcgaaagccataggtagaacctggttgttcccatcacacccaattgctgtcaatatctgacctcggtatttacctgtcataaaagttccatctatgcatagaacaggtcgacaatgcacaaaagcattgatgcaagcacccaatgagaaaaaggctctttgcagcaccctctttgttcgatcttcaaccgatgtaaatgtatgtaggtcatagtaagtattattattcctctgggggctgcag

SEQ ID NO: 5217 - DNA, 24371 bp, Oryza sativa
tctcccctcgtctcgtgcaaccacccggtgtgctcgctttgctggtatccccgtggttcgctcggcggctcgccgctgtcgaccaccgtccgttccggccggcgtcgtcgtctacctcccgccggcccgcgtgggagccacgtaggcgccacgtcggcaccagctcagccgaggtcgggacgggccgaccccggtcagccccttcccgtgcgcgcgttccaccgcgagccgtgaggctgcgcgtgggcccccccgcacccgcgtccaccgcgaaccgcgcgcgtgcaccgagtccttccccccaccctagcgccgcgtcgcgtgctccctccgcacggtgagccaagccgctgacaagcgggtcccacctgagaccgcgcgtggtgagcccggtccaccggctctctctctcctccctcccgcgcgcgcgcgtcttgggccgttctgggccgccttcttgggccggccggcccgttaagctcggccgagccgccccttttctctcgggccgcgccctagccgcccgagaaaagtctataatccctccctcttttcttttcttttctttttcttttccaaaaaggatttaattaaatccttttcctttagaccaaaaatccaataatcttagaaattcaatatcttcccatccgtaaatccgtttgacaccgttcaacttccaaaattcctcaaaactcgagatctatctaatggcacgcttagaggtcattaatagggctttattttcgccgtttgttgagttgtcccgtttcgcgtgtagtttcggagcccgaagacccgcagtgcgaggatttcgaggatcaagcttcagatctcgagcaaggcaagccacctttgaacatcttgagcctatatttgaaatttaattatattgcttgcaaaatattatgcattgataggatcgcacttgatctgcttgtcccgtctgcaaggcagattggcggacctacctaattttgttgcatttgatcctccctttgttaattgcgataccatgtccccttgtaaccatctagttgcgtctcgatattcgtgcaccctgcgcgagtatcgacggacgccttcaaacttaaaatctgagtaacaacttgggtaaaaacttgggttttgcaaaagacttggaaaacccgacacctgggtcggtgcttgcgaactaaatgaatttccaaaaccgcggaccggggaacataccgggtgtacggtttcccgttcttgcacttaaggaccgtttccttggaatttcatccaaacataagacaagtacgaccatatgggtggaatgggacacccctggctgagtaactagcttatcaggggtgccttgatgccgagagacatgtggattcgccggggtggtgtcggggaggacccctgggctttctggcacagtatggtctgggacctaacctgttggtggtctgggacccctctcgacggcatatgggaaacctgtgtcagctttggaaataccttgtcatgaaagcttggaggtctcccgacgtggctgatccccaccggctgggtgatccgggttagtaatgtcgtgtgggtaaagtgtaccccctctgcagaggttaacaaactgttcgaacagccgtgcccacggtcatgggcggatgtgaggtgattcctagcgtagttttgtttgactactgcttgtgaaattgctgttggggaaaggagttcgatgtttgaaaaatctgcagctgatgggatcagctaagcggatcctgctgatgaggagttcttccaggagcaagccggctacgatgagttttagggtttcggcctagttcccaagtcgcgcctgtgatgtttggtccaagtcctggcttccgtttcccttttgtaatgcagttgtgagctcgggatctgttcgcagcccaacatgactgtacctctactctataataaagagacctctgttgctgtgatattctgtcttcctgtgataccagcactgtatcctgggactggtatcgattaacaggttaatttggagcgtcacgggctagttccggtcggggctagttcggggcgtgacagattggaaggcacatatgtgcgtatatttagttgcagcagttttagtgggccatgcgcatagaagtccagcttgtcccacgatgccacgtccttgtcctaggtggaacagccacatcatctcgcgtgtgaattcattcattgatagtgtagttttgtgaaactacactatcaaaatatatgtacttaagtgccaaatgtcaaagtgtgtgtagttttctgcaacttggaccacaaaacgtgtagttttgtgaaatttactctttattttaacgtaactccagggtctttgactctgtgctctcttcggtcttagtggttctagagtccatcctttcggagggccggctgtggtcgttagcggccgtcgcttcctttggggaattgttgggagcgtagagtggctctgccctctcccgctgtttggagtagagttaccgttgtatcgagttcttttttcctttccttccttgttttttttatctttgtttttcttccttccttggcataggccgatctggctgagtgcgtcgtgtaacaaaaactctattcttctaatatattgacgtgcaatccttttgtgcgttcgtggaaaaattaacctttattttggtttgttcaaattagcagttcttgtctgaattacattatcaaattcggaatctaatagttggtttttatctccagacgaattgggcacatctgcaaaaataattgacgcaccaccgcgacgaggtgatatttctactggcataatgcgagaactcccgctcgataaacttccagaggtatggattgctaagaatgttttgattactatcgttgaaacttctatgtcttcgtgtgcttggatcgtaggatttatttttcctcgagggattgattgtaggaatttggtggtgaacacatatttaaacaacaaatcaacaatgtttgggcaaactatctaccactcaatgatcctgaattatcattgttacaacctttacagtactactagcagaacaaactgcatttctttgcaccacacatccttttatccggttgatttaaactagtcatcgtcttatctgagttgggtgaactattactgatcttcctgtgcagccatgtggtttgctcatgttgattcattaatactcactgttgagtgtaggcgtgtgtatttcagcccaatagggcccattccaccaatgtatatgtatagtagatgagaaaggaaatgaagtgaagcttctagaggaaaaatcacaaaactacatggtatcagagctgggtcaccggcgacctcgccgacgcgaaccctagtcggcggcggcgctgtgaccagagcggttctgcggcgacgtcgacagctgaggcggagcggcgacgtcggacagcggaggcggagcggcagtgtcgacggcggaggcggcgacggctgctgcagaggttctcgacgcgagcagcgtgaaggaggagcagggcgcacgctcgctggttgagctgcgcaaggatttggtgcagcacaagctgtagggagcacagcggctgagagacgcgcagctgttggatgtaggatcaacagagaaggatttggtgctattggctattgttgtccgttccagtggtggtgactttggtggtgctgttgctggtgctgctgctacttgagaaggtgaggatttggaggtgaagtggaagcttggtttgctgttgctgttgttctgatttggggaagaaactgtgtacgagagcttggcttgctgctgctgttgtgctgatttgggggaaactgaaaagtagtgctgctgggaggaagtagtgctactgctgctgttctgtttttggtgagaaactgaggagtagtgttgttactcctattaattgatttggctagtatcctagaagatttggttgatctgccatgggggaaattcaaggaattgagcaaatacttgagaaattggctgaagaagttgaagaaataaggggaagaattcagaaagtgaaggagaaaacaacagtgcttggcaactttgttaatctcgcacatcctatgcaggtacctaactcaacttggatattagactccggagcatctagacatgttacaggaatgtcgagtgagtttacatcatatactccatttcagtcatcatttaaagaaacaattcaaactgccgacggaactttacgacatgtgaggggagtgggaacagtcaaatgtactccatcaattacattgtcgtcagttttatatgctccctcttttcctgttaacctagtatccgtaagctcgttggttgatcatatggattgtcgaattactattgaccgagagaattgtctaattgaggagagaagaactggaagaaagcttggaaccggcgttaggcataatgggttgtggtatctggatagaagagggacggacaaagcactatgtagtgctttgttagctagcacaagtgaagaggaggctaaattgattctaaaacattgtcaattgggacatatgtcctttgatactatgtctaaggtatttcctgatgagatgagtaaggtggacaaaagcaaattaatgtgtgatgcatgcgagtatggaaaacatacacgaaccacatacataagcagaggacttcgaagcattttgccatttgtgttggttcactctgatgtatggacttctcctattgcttcggtaagtggagcaaagtactttgtcacctttattgattgccactcacgaatgacttggatatatctcatgagacacaagagtgaagtattgaaatgtttcaagaatttctatgcttgggttaggaatcaattaaacacttgtgttaaagttattaggagcgataatgggggagaatatgtgaatgatgaatttaggagttttctctcagcagaaggaatagtacatcaaacttcttgtgctgacacacctccacagaacggagtagctgagaggaaaaatcgacatattctggaggtaactcgttcactcatgtatacgatgaatgtaccaaagtttctatggagtgaggcagtcatgacagcaacatatctcatcaatcgcatgccatcacgaatacttgggatgaagactccatatgaaatggtgtttgggaagaatgaattcattgttcctccaaaagtgtttgggtgtacttgttttgtcagagatcatagaccatccgttggaaaattggatcctcgagccgtcaagtgtatttttataggttactcttctgggcaaaagggatataaatgttggagtccatctgagcggcgaacttttgttagtatggatgttacttttagagagtctgttccgttctatggagaaagaacagatttgagttccttgtttgttgatcttgacaatccaattattgatgaggatggacaagagggggagaatggatcatcaggtactgaagaagacacataatcaagaagcatgaaatttgtggttggctcaatcccatatcctgttagtgaacccattcatgagcaaaattggagaaggccatgtgaagaagaaaatctacaagtttatactaggaggaaaacaaggtctttggaggcgcaaacaatagggcaacatgagtctcctatggatgggatggagcagcaacaatcttcaattgttgctgaagtaggtgataaaccatctgatcagtgtgatactatacagatttcatcggatacggaaggagaggagtttgaaacagggggagaagaaactaatcttcctattgctataagaaagggggtaagaagcaatgcaggtaaacctccacaaaagtatggttttgaagctcaaggtgtgaatgatgatgagaataacatagccaattatgtctcttatgcttctttgtcatccacatataaggcctttgtgacatcactaaattcagtggaaattccaaatgattggagggaaaaaaagcaagacccaaggtggcatcaagctatgctagaggagctagaggctcttgaaaagaacaaaacatgggaccttgtaccattccctaaagggaagaaagtggttaactgtaaatgggtttatacagtaaagcaaaatcctgatggaaatgtggaaagatacaaggcaaggcttgtggctaagggatatagtcaaacatatggaattgattatgatgaaacttttgcaccagtagcaaagatgagcacggtaagaactcttatctcttgtgcagctaattttgattggccattgcatcagttagatgtcaagaatgcattcttacatggagatcttcaagaggaggtgtatatggaaattccacctggatttgctacctcacaaactgaaggtaaagtgttgagactgaaaaaatctttatatggccttaaacaatcaccaagagcatggtttgatcgctttagacgtgcaatgtgtggtatgggttataaacagtgcaatggagaccacacagttttctatcgccataatagaggtcttaaaactattcttgttgtgtatgttgatgacatgattatcactggagatgattgcttggagatatctaggttgaaacaaaatctaagcaaggagtttgaggtcaaagatctgggccaattaaaatattttttgggtattgaaattgcaagatctccttgaggaatagttctttcacagcgaaagtatgtattggatctgctcagtgatacaggtatgcttggatgtcggccagcttctacaccaattgaacaaaatcataagttatgtgctgaatctggagatccagttaataaagagagatatcaaagacttgtgggaaggttgatatatttgtgtcacacaagacctgatataacttatgctgtgagtgtggtgagccgatacatgcatgatcctagaagtggtcacatggatgttgtgtatagaattttgagatatttgaaggcaagcccaggtaaaggcatatggttcaagaagaatggacacctagatgtggagggatattgtgatgcagattggggcagttgtcttgatgatatgaggtcaacatcaggctactgtgtatttattggtggcaatttggtatcttggaggagcaagaaacaatcagttgtgtctcgctcgactgctgaggcggaatacaggtcaatgtcgatgagcttgagtgaattgttatggttgaaaaatcttttggctgaattgaagctgtcgacaagcacttccatgaagttgtggtgtgacaacaaatcagccataaatattgctaacaatccagtccagcatgatcgaacgaagcatgtggaaatagatcgcttctttattaaagagagaatggatgagggaaccttaaacttaggctttgtaaactctggtgaacaagtagctgatagtttaacgaaggcattaggtgctagagagtgcacttcttcgtgtagcaagatgggcatgatagatatttatcgcccatcttgagggggagtgttgagtgtaggcgtgtgtatttcagcccaatagggcccattccaccaatgtatatgtatagtagatgagaaaggaaatgaagtgaagcttctagaggaaaaatcacaaaactacactcactaggatatcataatgaaaaggagaaaaaaatgtttatgccactacccaatagtagagattagtgaatgcacacttttcatatgtaccataatttttgcaacctctcatatttgccactaacaagtaacaagtgcatggctttttggggcaaattcacacatggtaatggataagagattgtaaaagttagttgtgtatgtgagaagtgtgtccaagttattgacatacacaaattttttttgtttgattaaatacaatttctttgtctcgcttgttcttggcacagaaacttatggattctccttttgatcataacaatgcaatttaaggagcactaggtgtccacctagctggtatggttaggtgcagtgattcaaagggccctagttgtagcatatagcacaaaatgatcacaataatgcccgatgttgatagtggattctagtactctttatataaaatcaccagagttggtgtttagtagccaaatggcaattaaccatttggttcgtatttagtagtggccactatccactagtacagtttaaatatagatactaagcagctggttcttctatctgttccaagtttggttaaatgtcctgatgagtgttgattttgtatctcaaacatgtttttttccaggacatcttgcatcatgtatattctcttatgccattgaaagatgctgctcgtgctgcttgtgtgtcacatggatttctacgttgctggagacgctatccaatccttatattaaataacaaaacgataggtttgattaagagaaaactcagtttggatgacatggaaagctatgctgtcagtaaaattgaccatattattaagagccattctggcattggggtgaaagtgcttaaacttcaactgttcgcctgtccgaatataagtgcagctgttcttgacaaatggtttgtaaccgttatcaaacctgggatcgaagaactctccttggagatgtctttcattgaaaaaacggacagaatacaacttcccatgttccgttctatccaataaggcagagggatggacaattcagtcacttttcctctcctcctgtgcttttcatcctacggtgactcttggttgcaacataagcttgacaagcttgcatctatgtaaagtcgatatttgtggggaggagttagggcagttcctttccaattcattctctttggagcgattggtaatttctgaatgcagtgatatagtccagtttaaggtaccttgcctgatgcaacagctcaagtacctcgaggttacaaaatgtcaaatgctacaagtgatagagatagatgctcccaaactctccacttttatctatggggatgttggagttaaaatctctcttggagatccactgcaggtcaaggacatacgtctgatgggttacaatgaagccgacaccgtctgttatgctcgtaccaagcttccatccattttgccaaatattgaatcacttgtcgtgtcatctcctaatgaggtatgcattattgttttctttgtgccatccagttgctttataactacaattaattacatgctggtgatatgcatgtcacacgtgcacatgaaacacgactaaaattcctgaggcatctcttcttcttctctttcagatgaccagtacgccagtggtgcccagcaagttcctccacctcaagttcttggagatttatcttaaagaattatttgcctcacttcccagctatgatttcttttctctggtttctttcttggatgcttcccctgccttggagactttcatcttgcacgtatgccactttctcaatgttgcataccgcaaatcataaaagttcagttaatgcttgcagtttgggcctttgggggcttctactcttagcaaatttggcaggataattaattcggtatagttcgttgtagatatttttaatatagtttctcacaatatataatagatagtagaaatagtttagtacttaaatacgcactagtaagacaaccaaatagagaacatctgtggtgcttcacaagccaacagcagcaattcagtttgggcttttctcatgataaaatattttaagcttctataatcattattagtgactgtacttgatgaggagtatgtgaccaagttttaatgagtaactactactattcctatgcaggtagagcagcagttcgaaaggcatgattcgattcttgatggagaacctacggatttgaggcgaattctgcacgacggacatgccaacctccagaatgtgacgatcaccggcttcaattctacaaagagcatgattgagctaacaactcacattcttgagaatgcaccatcgctcaagtgcattacgctggatacagccaacttctctggcaagaaccatttggcgatgggcgaatgctctcctatgatgagaggagggatcttggaagcacgaagagctttcgaggcagccagaagacacatcgcggggaaaataccctcctttgtcgagtataagtttctggaaccctgcaggcattgtcattttgggtactgacacaatacatctcaagaagtccagatagcgtttcttcagaggagaaattcaagtgtagaaatctatattgacgctcaatcctttttgcttgttcgcaaaaaagaaaaatcgaatgtagaaatgtaaaaatgcacagcagtacagcacaaccaagtaaagaacaagtatggtattttgggggacattcttgcattcagaagccaagagcaatatttttgtgctagaattgtttttagtttagtgtcaaaagcagtagctttatctggttttattagtataacataaaagaaatgaaattagtgactaaaggtcatacagattacagagtagctgccatcgctcatcgctggttgcaatcgcaaagcttcgacaaagccatggccgtcgaccgtcgtatcgctgagttcgtctctgacgagtgagttactgggccgaatagagagcccattgaaaagcaaggcccacattgcattctggttatatcatagattttaaatagaaaatttttgcacagaacatattatataacggtttgaaaatgtgctgttggaaactttaaaacaagaaagttatagtttgaaagtaaagtttaaactcgtccaataagtattcaaagttattttggtagtcgagaattgtgatgttatttcattcttttattctattattactttcgttctaaaatattattattattttatttttattggatgataacatataaatacttctgtaactatttttttaataaaattttcaaataaaacgaagaaccaaacattaagtaaagaaaataaaaataaatttattttgtaacaaatgtactttctctgtttcacaatgtaagccattctagcattttccatatttatattgatactaattaatctagataaaaaaatattaattttatttagatttattagtattactataaatatgaaaaataaatgacttacgttttgaaacgggggagtaactgagaaagtagccatcgaactgtgagtctgaggtgtcctcaccaacttccttcatcatccccttcccatcgccgcggttctccacgctccactgcggtggactgcgccgcatgtagcgccggggagctccacagtccaccccggcccgcgcccgcgccctctcgagttcccacacgagctccgccgccgacggctctcgaggcaggcaggcaggcagcgccgccgatctcggttgccgccgtgtggagcgccccccgggattttcattctcagcagtacaagaggcggccggattcgccgccgtttgaggtaatctcgcgcgccggcgacgtccggatcgcctttcctggctggcgtctggagtatgtagactgcaagggggaatcggaagcggccgggcggagccatggagacccgtgccaccgagtgcaggacgatgcagctcctccgtgagcttcaaacaagtatatgcttcccccgccccctcagctttcgatccaccttcctatacagagatcgtcgttggattctaccgctatcgtttattgcatacttattactacctccatattttaatattttaatgtatgacgcagttgactttttatccaacgtttgaccattcgtcttatttaaaaaaattatgtaattattatttattttattgtgacttgattcatcatcaaatgttctttaagcatgacataaatatttttatatttgtacaaaaattttgaataaaacgaatggtcaaacgttggtcaaaaagttaacagcgtcatacattaaaaaatacggagggattatgttttagaagaaaaactgctcttaggctcctccttaacctgattggttcttcagctagcttataataaagtgcaatttagacaggggaatttttaactcttatctggtctagtgctcaaatcttcaccttattttggtttatgcaaattagtggttcttgtctgtaagccttgaattgcattagcaaattcattctctaaccttttgtttctatctctatctctagacaaattggacacatcttcaaagataatttacgctccacggcagcaagatgatatttatgcgggcataatgccagaactcccgctcgataaacttccggaggtatggattgctaataatgtcatagtctgttaactactacagtatcattgaaactgctatgttttggtgtgcttggattgtaatattttttttctcaaggggtagattgtaggaatcggtgttaaacaacaatgttttagcaaactatctcaatgaggtttcagaatgttgtgcataaattgaattcgaatgcactgttactttttaatgtttggctttctctgcacattgtctactactccatgctccaaaattatcattgttgtggtcttttcaaaactactagcagaacaattaactattaccagattacttctgtagcattagctaatttgttatctcccgatatgagctttacctatcatgaagatgacctgtgatgctattttttgtggattgatgacatataaggactaaggagtaccgtgtgttatgaagtttggttaaatgtcccaatgagaaaaatgtatatccacttataagtcttttggtaccgcatatagggaaatttaagaaaaagcacttgacctgttggccactgtccactagtaacaatttaagtatattttactaagcagctggtccttctgtttgttctaagtgaagtgtgcattgctagtactctctgaatgctgaattattcaaacatgtttttttccaggatatcttgcatcatgtatattctctaatgccattgaaagatgccgctcgtgctgcttgtgtgtcgcatggatttctacgttgctggagacgctatccaatccttgtattaaatagcaaaacaataggtttggctaagagaaaacttagtttgtatgcggaagatgtgccattgtatgagccagcgcttaaagtggatgacatggaaagctatgccatcagtaaaattgaccatattattaataaccactctggcattggggtcaaagtgtttaaacttcaactgtttgcctgtccgaacatagatgcagctgttcttgacaaatggtttgtacatgttatcaaagctgggatcaaagaactctccttggagatgtctttatgcaaaaaaaggacagaatacaacttcccatgttccattctatcaagtaaggcaggtggagggacaattcagtcacttttcctctcctcttgttcttttcatcctacagtggctctaggttgcaacataagcttgacaagcttacatttatatgaagttcatatttctggggaggagatagggcagttcctttccaattcattcgctttggagagattggtaatttctgattgcaatgacataatccagtttaaggtaccttgcctgatgcagcagctcaagtacctccaggtgacaaaatgtgaaatgctagaggtgatatcgatagatgctcccaaactctcctcttttatctatggggatgtcggaatacaaatctctcttggagatccactgcaagtcaaagacatacgtctgatgggttacaaccaacccaacacagtctgttttgctcgtactgagcttccatccattatgccaaatgttgaatcacttattgtgtcatctactgatgaggtatgcattattgttttctatgcactatccagttgctttgtaactacaattaattacaggctggtcatatgcatgtcataggtgcacatgaaacatatgattaatcctaagtcatctcttcttttctttcagatgatcagtacaccaatggtgcccatcaagttcctccacctcaagttattggaaatttatcttgctgaattactggcttttcctcccaactatgatttcttttctctggtttctttcttggatggttcccctgccttggagactttcatcttgcatgtatgtcactttggcataaaaattcagttgatgcttgtagtttggggacttctgcaaatttggcaggataaattggtttagtttgctgtagttattcttcatatggtttctctcaacagattatagataggggctgaatcagcagtttagcacttaaatacgcactaaggcaaccaattagaaaagccctgtggtgcttcatgggtattattgcactagaagccaacagcaccaattcagtgtgggcttatcatgataaattgttttaagcttatatattcatcactagtgatcgcacttgctgaggaggatatgaccaaggtttactgagcaactattatcctttgcaggtaaagcagcgatgtgaaaggcgtgattcgattcttgatggagaacatacaaatttgaggcaaattctgcaccccagacatgccaacctccagaatgtgacaatcactggctttaactctacaaagagcatgattgagctaacaagtcacattcttgagaatgcaccatcgcttaagtgcattacgctggatacagccaacttctatgataagaaccttttgacgatgggtgaatgcttgcctatgaggaaaggaggaatcttggaagcacggaaagcttttgatgcagccaaaagatacatcgcggggaaagtaccggcgcatgttgagtataagtttctggaaccctgcaggaaatgtcatattgggtattgaaacaaaacggtagatctcaagataccgtctttttgggaaggagaaactgtgagataaaattggttgtgtagcagtatatcgccgaaatttagtgatttcgctactttctgtgaaaaggatgtgtttaagtgccaagacaagtaatttaactttatatagtttgtaattataaatgtataatataacataaatttgtggccagagttgtatggagtataaatgtataatataacagaaacccgcacttgtttcagttgtttggttcatccgttcatgtataagtttaccatgtcattgctaaacgctccactactgccgcctgccacagtttattagcattgtgtcacaagccagacttttacctactgtcacttgagtgcattgcactggatacagccaaattttatggtggttaccttctgaaaattggcaaatgtctgcgtatgagcaaagaagctctcatagaagcccataaagctcatgaggctgttagaagatgcattgaggaagaggccccctcatccgttaagttgaaggttcaggagccctgcagggaatgtaattcttattactgacatttttgactgtgcgaaagctccaagttgaatcagtagtccacatatgattatcatcttggctctgttttcagctttccttttggtaggtggtgttactgttagtcagtagttttttccttgctgtactggggatgaagtatatgtcaagctggtttccccagcggttgaagtagtatgtaaagaaagaaaagtagggccatttggcctttcctcttatgaaaatgattgtcatggagatgctatcagtacaagtgtagatggaggctgggaatctgggatcgcgattattgttaacggtccaaatttctaaagcctaaataatgcaaaactacctccaacgatgaaatgggactgctaagttatgctggaatcagatcagatatagtcaatgagactgctaagttttgaagacaaggatgattatttcaagaggtagttaatcaacgtttggaacctttttattcatatatgaagcacaagcaactaataatgtttagttacattcaagagctgattcagatattactttattacagaaaagaatacttagaacggctgacagataacttttcccattatcgaaagaacataaagaatacttgtacatgtttgaatgcagtgaaaatgggtgctcaagtgagaagtcattatactctgttctactttttgagagaaaaatcttggaaaactattacaaaaggaaatgtgagaagaagaatggcaagaagcaaaacaagaacccatggttcatctgagactgatcacttcagtgtacaggaatcatgccatggattcttaaggatggcttcaacttcagtatgaactcgacatgaatctaactggcatgaaaaacttcctatgttagagtttgtgtcgaatatgagtttaggacttggagttgtactaggtgtaggactagagtatgagtcggactttatcctaggatctctcataaatagagggacgtgcctgttgtaactgcatggcgacttagcatagcgagagggagcggttgccgacgtcgaccggccgtgagtcgttgtaactctgatacgttgtatatgctggatcggggaggagcgcccgtaatcagtgccccggagatgtaggctacggctgaactccgttaccaaatatcatgtctcagtgtcgtcatcgttttggatcttctatggcgttttcttccgcgtttagctaccgatgtcgattttggggctggttttataacaagtggtatcagagcctgcaggagatccatggtagaggtgcgagggaggtgctccacgccgcgacaactacacaggatgtccagggacggacatggacgcaaggtggagcacggcggcgatcaacgaaatttgatcggtggaatcggacacttcaggcggcggtctgaaccgtttgatggctgcaatcaacagggagatgaccagacgtggtgctcaggttgatggcggcggaagcgattggcgattcaatcggtgggtcggacacttcaggcgggtggctcgaactttctggtgagctactttcaacagggagatgtgaggcctcacgggggttgattgaagctggaggcgatcggcgttctcgatcggcggaatcaaacactctgggcagggtggctcgggcctttcgatgagctgcgttcgacggggagatggctagacgtggcactcgggtcgttcggtggttgggaagacggtatgcgacttgtcggcttcggctctcgactagattgatggtgttcaatcggaagtcagagcgggtggatccttggtactgttataggcacaagtcagatcgatgtcgtttgttgtcgatggaattgactggaggtgttggacaacagtgaaatttgtggtgggagtacgtgaagctcgtggagatcaggaccacggcggtgtgcgtgatttcacgttgaggccgagccggaggtgcagactagagcggtgttgttggtagctggcttgggaaaagccgtgttcgtgcaggactcagatctggaagggctgcaacataggacatggactcgggcacgtagtctgtttctattttggtcgtgattgtggcagcggagaagagtcaaggaggacaccatgtcggacacaggaagggaaaacgaagaggattccgtactggacacggatcggactcatattttccaagcaaaatcagcaaaggagagccacgggatcaaaccaaccaaagcaatgaagagatcggacatgatttcttgggcagtggtggtttaggcgacgaactgcgagcggtaggagcacggcttggtgtagttgtcgtgcaggtgccggcgagttcgacgcgggccagctccaggaggaggtggcggataccggcggaaggggtgggctgctcctgcgtcggggggcggctccgtgggcgtcggcatcctcaccagcgggaaacccacggcggcagcggtagcggcgttttcatcggcggtggtcccagggaggtggcgcaaggggagaccagctcctgtgcgtggcagcatcttctagacgggcagcggcgtcgggaaccgaagcggcatctttggtggcggcgcggaggagaggtgaggcgcggcggctctggtgctcgcagtcagcagggaggagcggcggtagcgaagcgtctttaggcgctgggtggcggcgcgcttgagccgaggatgaggcgagcagaaggagcgacaagggccgggatcgttctggtccttgtgtgttgactgggtcttaatcgagagaaaaaaaaaacgattttttttaagaaaaagaccggtcggtccgctggttaggctgttgatggttgagtctgctgtggctttgcacgtgaagaggctatgagctgcatggaacgttaattcattcgtgcattgatttggtcggtacaagattggtggacatgtgagggatggacacgtgtatgtccagtgcacatgcttggatcttgtgagcaatggcatatgcaaagaaggaaattgatgcatgcagcaagaaagtgacgtgttaagttttggtatgacttagtaaagacagtcttgagctggtgaaaactcccgggcaacagcgggtgaaaatcgttgagggcgtcaacgggctgtttggcagtacaggatatgtagcgcccgttctgtcgtggcgcctagcaggaaaactatctcttaaaaactctatttgcgaaatctgtttctttgcttgttgcctagtgtccgtgccatctcagatctcaatccctgatctatcgtcgagttcaatcccgaacccaatccttcccaaatcgatccctccgcaaaagtctattttgcctcccccggggtcgatgggccgaatctttctcggctcatctccccctccctccccggcgccctctctctctctcgcgctctccccctccgctctgcccgcgcgcgtgcgcgtgagccgctcgcgccgagcgccctcccttcccctcgctctccttctccccgcctccatccctggcgagctccctgcccgcgaaatcggccccgcgcggcgttgttcgcgcgcgcgcccgcgtggttgccgcccatgccgcgcctgcgccgtccgcgtcacccggccccgctgccctgccgcgcctgcagccgcgcagccgctcggccccgcgagccagcacgcgtgcccgagccgcgccgctcaaatcgtcgcgccgcccgttgcttcccgcgcgcgcgtgccgtggtggccgaccgcctggtcgccgccgccgtcacgctctgccgcgcctgcccgcgcatgtcgcccgtgtcgtcgcgccgctccaaaccgccccgccgtcatcgccgtcgtcatcgcccggcccccgccactccgcgcgcaagctgccaagggacggaggcaaagctcctcctccatctgccgcgtcgcttccgctccctcctccttttcccgaagcggcaaggaggcaagccctcttttctctccctcttttccttttcccctccccgccggcgtcatccgcctctgtcaccgttttggccgcgagcgctgagctccagctcgcgccttgaccgcccaaggtcggtttccaaaccgacatcgtcgtcctataaaccaaggcgccctcccatcgattccccccccccgtttcgcttgccgccaccgcgcctttgccgccgccttccgtgctctgtcccgcctccgccgttcatcgccaagcaccgggagagccggtgcgttcgtggacgcagaaggggacttcgggcgcgccctctccttcctcttccccggcccgaggccggagagattactcccgcgccgttggcctctcgtcactgcgcctcgtcccgcatggtagtgcatctccccgttctccctcctcgctccatctcctccccttagactcgggtagtagcacgagtagcctccccgtagctagccggcgccggcccgaccgttgccgccgctcgccgtgtgctcaccgccgtcgccgcccgagctcggaagcgccgctcgtcgccggcctcgctcggcgcagctccgcccaatccggcgcaagggacggattcccgtagccccgtagatgctctcgccgccaggaatcggcccctcgtgacctcgtcgccgtttccccttccctcgccgccggttgccgccgccgcaattcgccgccgtcaagctccctccggcgaatccgagccgttggctcgtctcccctcgtctcgtgcaaccacccggtgtgctcgcttttgcctgtatcgccgtggttcgctccgccgctcgccgctgtcgtccgccgtccgttccggccggcgtcgtcgtctacctcccgccggcccgcatggctgccacgtaggcgccacgtcggcgccacctcggccgcgaccggcagccgctccctccgttttcccccgtgcgcatggtccaccgcgagccgtgaggctgcgcgtgggcccgccgcatccgcgtcctccgcgaaccgcacgcgtgcaccgcgtctttcccccatcctagcgccacgccgcgtgctccctccgcacggtgagccgagtcgttgacaagcgggtcccacccgggaccacgcgggatggacccggtccaccggccctctctctcctcccctcccgcgcgcgcgtgccttgggccgccttgggccggccggcccatttagctcggccaagccgccccttttctctcgggccgcgccctagccgcccgagggaagtctaatttccctccctcttttcttttcttttcttttctttttcaaaaaggatttaattaaatccttttcctttagaccaaaaatccaataatcttagaaattcaatatcttcccaaccgtaaatccgtttgactccgttcaacttccaaaattcctcaaatctcgagatctatctaatggcacgcttagaggtcattaatagggctttattttcgccgtttgttgagttgtcccgttttgcgcgtagttttggagcccgaagacccgcagtgcgaggatttcgaggatcaagctcaagatctcgagcaaggcaagccacctttgaacatcttgagcctatatttgaatttaattatgttgcttgaaaaatattatgcattgataggatcgcacttgatctgcttgtcccgtctgcaaggcagattggcagacctacctaatttgttgcatctgatccttcctttgttaattgttataccatgttcccttatagccacccagtcacgcttcggtattcgtgcactctgtgcgagtatcgacggtcgccttcaaacttaaaatatgataaacatcttgggtaaaacttgggttttacaaaaggcttggaaaacccgacacctggggtcggtgcttgcgaactaaatgaatttccaaaaccgcggaccggggaacgtaccgggtgtacggtttcccgctcttgcacttaaggaccgttcccttggaatttcatccgaacataagacaagtacgaccacatgggtggaatgggacacccctggctgagtaactagcttatcaggggagccttgatgccgagagacatgtggattcgccggggtggtgttggggaggacccctgggcttcctggcacagtatggtctgggacctaacctgttgttggtctgggacccctctcgtcggcatatggtaaacctgtgtcggctttggaaatgccttgtcatgaaagcttggaggtctcccgacgtggctgatccccacgggctgggtgatccgggttagtaatgtcgtgtgggtaaagtgtaccccctctgcagaggttaactaactgttcgaacagccgtacccacggttatgggcggatgtgaggtgattcctagtgtagttttatttgactactgtttgtgaaattgctgttgtggaaaggagatcgatgtttggaaaatctgcagctgatgggatcagctaggcccgggtgaccgtttgaaagttgttggcccgggtggccgtttgaaagctgttggccgggtgccaatcttgatctattttaaagattgatacattgcacatactccgaccggacgaaacgcactgtctcaaccgtgtcgtttgagaagcactcacttagttgtttcagaaaagagttcaaataaaatcaattgcaaaacaacagcctttccttgaagccagcattaaacacttatttcccatggcttgctgagtactcccgtactcacccttgctctatataaataatccccccctcagttgctgaagaagatgaagcggatcctgctgatgaggagttcttccaggagcaagccagctacgatgagttttagggtttcggcctagttcccaagtcgcgcctgtgttgtttggtccaagtcttggcttccgtttcccttttgtaatgcagttgtgagctcgggatctgtccgcagcccaacatgactgtacttctactctataataaagagacctctgttgctgtgatattctgtcttcctgtgataccagcactgtttcctgggactggtatcgatcaacaggttaatttggagcgtcacgggctagttccggtcgggactagttcggggcgtgacaggatatatccaggatctgcgtggattgcatgatggcgatatatggaaactgcgtcactgaaggagaagagcaatcgctatggtggtaatttcttcgggtgattcaaggcaaccgtgaattttctcagattatcaggaattcagtctacagatgcggtaaagcgtggatgttggatttgctagctttgttcataagacgataaggaagaaaaggttctattcaagtctggtgagtttgatttatctatttggtgatgacgtcagttaacgggccatggattagatcaagtcaaatttaagacggtagatgaagttgaacttggttttcggggagtctatgatatgacagctaggaaggaattcaatttcgcttggcaagacgactgtggtgatatgagagaaggtggagcactgttgcaggtggagtcaagaggaggaagttacagggatagcagagtctcttgttacggtgagcctggtggaggcttattggggtagctcggtgtgagcggcgaaaaaggatcaactcaagtcttggtacatggaggttcgagcaagtaatgaattcaggttggcgtggcatattcgccaaggtggagtttgttagagtttgtgtcgaatatgtgtacgtagtcggttacagtttaggacttggagttgtactaagtgtaggactagagtatgagtcggattttatcctaggatctctcataaatagaggggcgtgcctgttgtaaccgcatggcgacttagcatagcgagagggagcggttgccgacgtcgaccggccgtgagtcgttgtaactctgatacgttgtatatgctggatcggggaggagcgcccgtaatcagtgccccggagatgtaggctacggctgaactccgttaccaaatatcatgtctcggtgtcgtcatcgttttggatcttctatggcgttttcttccgcgtttagctaccgatgtcgatttcggggctggttttataacattcgagccggataagtagcactgctttctattgatgaaaacttgcttgcacttatccatatttttttttgactgaaaaggtagagaggctctaccttataaccattgtattaatggtggtcaaaaaagatataacaaaaatacattcaagcagaaaggcaagaaaaagaagaggtagaaaagaaggaagaaagggattagagagaaccacaaacaaacagaaaaacaacatctatgctagtagagctgcccaactacatattggcggctgacattgtggtttaactcggtttttccataagtgtaggcagtccttgatttgatgcgtcacattagttacggagagttcttcttctctgaaggttctatgattgcgtgcttttcataagctgtgtgaacaggcagcgaagcatattggccatcccagtttaagttgagtcggtagaattcccaggacatgctcggtgaactgtagaatgtcagcactctgaattgcctgatcaaggaggttgagtttgttccagatttcagtggctaacttgcagcgtagaatgatgtgattagctgtttctatagccgggcaaaccgcacaatgtggatcagatgcccagcatttcttcaccctgttatcatttgtgtttagccttccccgaaaggctagccaaaggaagattttgcaggtgtttggtattgctttaatccagatgaagtgtgccgggcgccataggatgccatgatatgttattagctcatagtatgctgttgtcgtaaatccaaccgggctcagtgtacagcttctgttatctggtctttcaggatgtatctgctgggattgtaaagtcgtcataagcatatctaattcaagttgagcttgggtggagatcaccgggtggagatc

SEQ ID NO: 5218 - DNA, 18392 bp, Oryza sativa
tccctgcataagggatgaacagaatgcacatcaagtcattgacgataccacaagcaagggattttggggtgcagaggatgcaaacaagactttaagttcatagggaacaagggaactcactacatattatgcaacatgtggttcaaaaattacatctggcattggcacattagcgccttgaacagattaagctgcatcccttggacagtaccgatttcatgtagttggtgtcaatagaagatttacctaaaccaatacaccttttgtcagctcatatgaggattccatgtagttgggcaggatgtaaatattcggaagagatggacatttcaaaaatctaaccagtttatcatggaaagcaatgagaagaaaaatacataacagcacaacttgatatgaagaataaaaaacaatgcccttcaaacattatcaatttaaatgtttagaaaacgtagaagttctgaagccttaagatcaacaaagttggattgggaaagaaaaatatttcccaatggtaattccaatactagattgaaggaaagaacatggcatacttaataaggaagttttcatgaatagcacaaagaactgacacatgagaatcaaatggtaatctatttgtagctcaaacaatgaaaatataagttctcctgcaaacttgtactggtgtgctatggagtgcaggtcagttgaataactaagcagtaacatggaagcattcttttttgccgggtcggccaaaggttggccgaccaatttcattaagattggggaggaaaacaaaggaatgttacagcgacattacaatgtcgcgctagtccgggagagatcccagacacatcgtgaacaaacgaaggagaaagagacaatacaacaacgattactcgccgaattgggagaagatcccagctaccctccacatcgcgatttcttcttttatatacatggaagcattcacatccattaaagtgcaaatcgtgttcaggagtcaagatggcaaaatagtttaaaatatttggagattatggaagctataccttcaagcatattactactgcattgttggttccaaaagctgggtcatatatcgatacatatcaagcaatccaacaatcatagttatgaatctgaaagttaaaaaccatacatatcttcatattactactttttcgtgagtagaacataaaacagctaaagacgtacctctcatattaacgcgttccatataatattaacctgagatctgaagggactccacaatgaactaatatgatgtaatggctattcttgtgagtgttctgtacaccagtaaatttcgttaagcaacataactataagaatgaaggattctagtacaccttgtatgtgtcagaaatatagcactggagcaagagaactgcaaaccttaatccaagtagcaaaacactgaacactcattgttttccacagttgttatgccatgactagccaaacactactaattcctcataagtgacaacctgccgaaaaaaccccaaaacaatagtgtgtaatctcaatgagaagttactatgaaatgacaataactgtggatcaaattagtatttgcaaactttgagaaaaaatgtcaaataatgatttaggatacctgtttggaagttcgctgcaacaattcccggtaatagagtgcaaacagtctaatctaaggcgctttggttcactgcataaatggatgaacaaaatgaagagcaagtcattgaggatagcacaagggaagagatttgtagcttgcagaggctgcaaccaagacatcaaggtcctaggagattcagaactgattttacaacctgtggtccaaaaattacgtctaccattgacacattagcattttgaacagataaagttgcatccaccagaaagtaccattttcatgcctctgtcagtagaagaagactgcctgaaccaatcacactttttgtgaggacatggggattccaaggagatgatatacagaactgaagtatcattgtaataatataatttgacattaacttccaacagtatgcatctaattgtaaaggaagaagattaatagtagtgaggcacttacaatgttaccattctgtcactagttaagcgagattgcaagtatgaagttgggcagcacgttaaatactgtgcatcctgatttagtggacataacaaaaaaaatgaattactttgacatggacatcagtgagaaggcaattaagtaaccgtacaactcaatatgaagaagccgacagaccggagttacagaggttcaattgcgcttcaagagtgtgctaggcacactagtttttcttctcttcttttgaccatcgtgtcgttcacttgtcttgccattgtacagtttgttcccttgtttgtaatattcatccagtgataagagggtggaatgtttccaaaaaatagataaaaaatacacaattttacttcaaatatcagtactgtacatgttcagaaattggagatgttctgaagttttaagataaaacaacatgaactaaaggaggaaaacattttccaacggtgtttactagatcgaccatcaaggaaacaaaatgacatacttaacaactcccaggaatggtataaattagcgtcacaggtggatcaaatagtagtctatttatagctcaaacatgaaaaataaatactcctgaaatctgttctgctttgctggaatatctggttagctaaatacctaagcagtaacacagaagcatacccatcttccgaaatgcaaatgttcaagactgcataccatttgagaacactgagagtatgggaactaaaaccttcaagcatgtaactgccagtttgccacactgttggtttccaaagctgtgccgctgccgcactatctagcaatccaataatcgtagttctgaatctgaaagtttggaaccatacgtcagttcatattactactttttcacaaggagaacataaaaatagttatacaactactgtttcatgagaacatgttgagcataatactagccagagtctgaagggactccatgatgcactgatatgatttgattgggttttcttgtgacggtccggtacgccattaaatttcactaagaaatggtaactaataaattaaacaatgttagaacaccttttatagtagcaaacgtaccactggagtgaaaaacaatatcagttgcagagcactggaatttaccatgttccaccattattatgccgtgatgatattttgatccataatgtatgtcagtgcaactagctgaacaccactggttcttcaggagtgatgaccaaaatataatacaaccgaagtattaagaagcctactggaactcacaaaagaacacctgcacaacaaactcccaaaacaatggtgagtaatctgattgcaacataactctgaaatggcattaactatggattaaattagtatttgaatcttatgagaaaaaaatctccaaaatgatttaagttacctgttctcactaattccactactaaagagtaaaaattggaaactggtcaacttagtgcatctgtttgatatagtgtttggaacatcttacagcacaagtgaatttacaggattatgcaactaaccatgaacattttttcacataacagaaatggtttacatcaactaaccataacgattccctaaatacactgatggtactgaaaaaccatgcaaccttaaagcataagattaagatatattcgtttttaatcaaaggcaagtgtacaacaacagcaacaattcatgacaggtgggatacctatatggcatattggcatctctttcttcagtatggattttaaaaatgtttgttgtgcatgcatggaaatggtacatcaggagtgaagttccattctacatctacttacataatatatgtacaggaagaggatattgcacaagatcaacagatgatgccatggaacttaggtatggggaacagggaagcatttgttacctttattagtctagtatgatttctgggatggttccctttagcttcctgcaccgctgtttgaacttctcgttccagctagctctgacatctagttcttgcagtgaactggggaggccacccttgggcagcgaccggatggatggacagccgatgatctctaatctcttgaggctggtaagtctatgtagccccgcagggaggcactgcagattagtgcatccccaaaaatggaggtcctggagggagatgagaagctgaagtgcctcctcttgctccttcgtgaaacgctccacctcgtcgttccatccaaggactagcttggtgagggaggaagagaggagtctgcagatgggcttcacgtggacacctgcgaagtcatccgtatgaagctcctgcagcttggaggaacactgaagaggagaaagctgctgctcttgtccgtcctgcagccccccgagtatgggatccaaaccagcaaagaatctgggtgttccaaagactcctaatacaaaattgaacgttgtgatgcaaagcaatgagaaacaattaagtagccacataacccgatataaagataagaataatacaatgatacttgtaacatgaataagtagtcctcctaacctgtacaacgctgcagcggaaaattatggtctgttcaataacatgaaagcattcatataatttgaagtgcaaatagtgtccaggactacttggcacttgaacacacattgagtctatggcagctatcaggcctgtttattgccacgctattcactttcaaagctgtgctagcgtactacagcgcacaactagcaagcaattcaaaagtcatacttatgaatctgaaagtttgggaaccacatatcagttcatatttctacttctctgcaaatggaacataaaacaattacaaaagtaccttccataagaacctattgagcataataatagactgaaatctgaagggactccatgatacactgacatgataagatggttattcttgtgaaggccctgttcaccattaaattatgttaagcaacaatagctatgactaatgctcaaaaccttgtatgggtggcaaaaattaaagccaaaagcaaatatcaaaacgctggaaattcatcgtaatcaaaacactgaggttgcaagtgggcagcttgttgaatactggcatccttatttagtggacagaacaaaaatcaaattacttttacatggaaagcaatgagaaggccattaagtaatcacataactcaatgttcagaaaatggagatgaggagaagaacattttccaacggtgtttactagatcgagcaaagaaaatgatatacacattttccaggaatggtataaaattagcaacacagggggatcaaatggtagtctatttatagtccaaacatgaaaaataagatctcctgacatatgttatgttgtgctctggaatgctctggtcaactcaaagcagtagcatcgaagcattgccatcatttgaaatgcaaatgttcaagactgcgtaccattcgagatgagactatgggagttataccttcaagcatgtaactgccacattgttggtttccaaagatgtgtttctgccacatctgtcttgcaatccaataatcagatctaaatctgaaagtttggaaccgtacatcagttcatattaatcttcataggaacatgttgagcagaatattagcctgagtctgaagggactccatgatggactaatgtgatttgatgctattattgtgatgccattaaatttctctaagaaatggtaagtaagaacttaaatgctgctagaacacattttatggtagcaaatatagagctggagcaaaaataaatgcaaaccttaatatcagttgcagaacactgcaaacttatcattttccacagttattaagccaataagccatgatggtattttgatccataatgtatgccaattcaactagctaaacaccactaaagtcttcaggagtgacgaccagaaatatgcacccaaagtattaagaagtctactggaactcacataagaacacctgcgcaacaaaccccaaaacaccggtgagtaatctgattgccacataactctgaaatggcattaactgtggattaaattagtatttgcaacttataagaaaatctcaaaaatgattttaaatatctattcttattacttccattactacggaggaaaaattggaaacatccattactaaagaggaaaaattagaaacaggtcgtcttagtgcatctgtttgataggaattaaaatatttgggacatctcactgcttaagtaaatttacaagattatgcaactatgtaataccattttttagataatggaaatagtttgcatcaactaattaaccataaccattccctaaatacacagcccgtaagaaaaacactatgctaccttgaagcataagatatattcatgtttaatcaaagacaagcttacaacaagcagcaacttgttcatgacagggatcagacctatatgacagctgtttcttatatatgggttttaaaaagttttctgggaatatctaggcaaggatatggtacatcaggagtcaagttccattcaacgtttacttacaagatctatgtacaggtagaggatatcacatgagatccacatgttggggaacagtgcatggatagattgtgaagttctacaaggctacaggaatgtacaacttgaaggcagtgccctgcatgacagattgcaaaaaacaaacatttaatcagattgtgtagtaagtactacatcaaaaccccaacagatgatgccatgggacttactaggtagagggaacaaggaagcatttgttacctttgttagtctagtatgatttttgggatggttccctttagcttcctgcaccgctgtttgagcttctcgttgttgcagtatccgacatctagttcttgcagtgaactggggaggccacccttgggcagcgaccggatggatggacagccgatgatctttaatctcttgaggctggtaagtctatgtagccccgcagggaggcactgcaacttactgcatctcaaaaattggaggtcccggagagaggtgaggagctgaagggcctcctcttgctccttcatgaagcgctccacctcgtcgttccatccaaggcgtagttcggtgagggaggaagagaggagcaagcagatgggcttcacgaggacacctgcgaagtcatccgtcctgagctcctgcagcttggaggaacactgaagaggaggaggaagctgctgctcttgtccgtcctgcagccccccgagtatgggatccaaaccagcaaagaatctgggtgttccaaagacatctaattcgctgagctgaccctgggtgaggagaggccacagaccctcgcatctcaaatcctccccacaatcatcgatgtgtagttctgtgaggaagttgaggtttgagatgaaatccagggtctgcacgccctccttacagccagcaatcttgaggcattgcagggaggacgggaaagggcagcctggggcctcgtaggcggagagaaacttggggcattttgtgatttgtagggcgtgtttggttgctgccctggcgagtatttgcctggcctggagctagccagagcagtaagtagtagtgtttggttgcttccctgaacggtgtctatgctccggcaagggtgccggactcaggccaccaaaaatgaacgcctgagtcaggcgtgggtatgtgtctaatcctcccccattgattcttcattgatatgactgttatcaacacttgtcaacatcttactcaagtaaacaaaatgtttatatataatatattcactcaggcgtaggttttcaaccaaacaacaaaacatcacacatgcctaatcaggcacaataaaacacagcttttctaccacacaggcatggatttttctcagacaagtcagtcaggtcaccaaccaaacaagcccgtagtctctggagggagcgcagggattggagcccccatcctcctgtctcatcctcgtggctggtgggaagagcaggacgagcaacatctaagataagctccgggcatctgtagagaattagttgttgtagagagttggagaggtgtgctgggaagatcagcatcccatcgtcatcttcttgatccatggctagctggggtaccactccctcttcctccaccagatcctctgctacttgctgctgctgaatagattcgactgcttgtgtatcctccagctcaacagcagttgtttgctgctgttctacagctatacacatccgtgtaatcttgttgcagttcataagatacaactctgagagctttgggagatgagagagaagctgtgacaatgctttcccacttccatggtagctagaaatagataggtactcaactggaacttgccacttatagtcactcaaactttctgacagatggaacacgacacttgaactatcaagtctgagtatcttcagtgaagtcaacatttgaaggtaacaccccgccaaaggtgggcaattattgatcatcaactcttgtagttgggttaaattatagaaagccagaatcttgtcatctaagccatttagatctgtctttcctacaatcctcaagctgtatgtgctcatgtagtgtaattttttcaaccttgtccctacatcctttatgtatacaaagcacaaggtttgcgtgtaaggcataggaggcattcttagttgtggacaattctcaatttcaacctctcttagcctaggaaacaaattctcatatccttctgatgggcaataagtacaatatgaaaatggtaattctattacctcattgcaattctttacgatgagcacttctataagtgagaacatcgggacttcttttgccgtccactttctcaaattaggcaacccgacaagttctagccttttcaagttctgaaagctttgtcctgtgttgcagctaacaaattgatcttcaccaagtccgtttaccaaacacacctcccctatcggcggtaagtttttccatgttacattggaaagatgaagagtctccaaggatttcacagagagctctgcacctagccatgatgggcaagtagatcctccatgttcaatgatgaatagctctttgaggttgttacatggtcgaaggttctcaagtacttgatcttctttgtcaggatacctacttgcttggcatttgtcccaacttaatgccaacttcagtaagtggttcttatcaaaaagttttgcttctgccgctgcttcttttgtgtctattctctcaaggttataaataccaagtcttcttagctccatcaaatgacctagttgctttagttcaaaacttttttcctctttattgacttcaaatctttctaactcttgtaaaaactgtagttttcccacatcgcaaatagcaaagtgaagcttatcatgtttcgtaagaaaatggcataactttgaaagattgctaaagtctctaggcaaatcgagacaaccatcccatgcttctagatctagaatcctcaaatgataaaatctagaaagggcacttgttaaatgagttttacttcgacgtggtgcccctagccttatgtagcgtagatggactagtgtcgagaatttattaaaaatgaaccccacaggaaatgacattttgggcaaatgtagaacacggagagcacttgcttccttgaacaaatcatgaaaactttcagcaaaactttcatctagttccccaaatatcatcacagtttgcaagttttcaacctttactcttgtctttagtttttgtaatatgttcctaaagctttcattgttcattccatcactatcatccacaccatctgtattgatagacaagtgacgaatggaaggccaaatttccactgatctcacattagaataatgtaaactaacacactcacgagatgcaaccttcgctgctaaattatgtagcaggtcatgaataatatagcatggatgcccatcggtttcatcttttttgaaaaatccatggctgaccaaatcatttaaattgttcaaagctatatcatcatttgttttattctgatattcagaatgtaaaatatctagtcctatccaaaagcaagtaagttcttttgtgtcaaacttgtaatcttcaggaaacaaagcacaatagaaaaaacattgttgcagatgaaaaggtagataatcataactaagctgcaatgcaggcataatgtcatgattgctggtttccatttcccattctctactttctaggactctgttccaatgatattgatcaaagtggttcctcaatagtcgacctactgtttttgctgcaagaggggaaccttttagttttcctgcaatcttatctccgatcacaagtaagtctttatggacgtctcttggtagcttatcaccaaatacatatgctaggaataaatccctaaacgctccagggtccaaaccttccaaatctactgagttatccattgttttaaccatttctgctacaaccggaaaccgagttgtgactagaattatgttaccctttgtctgtccttttgttagtggaagtaaaagctttttccaatcatcactttgacacttccaaatatcatccaatatcaataaaaatcttttagacttcaatctttgttcaattagctcttctggtctaccatctttttcaccatccactttagggacatattgtttgatctcttctatgagcttatcaacactgaaattttgagaaacacatatccagaccttgacctggaaatggttttgcacttcaaggcttttatatatgtattgtatgagagttgtcttccctatgcctcctgggccaacaatcggcaagacagtcaagtccttgccgcagtctgtaccttgggttatataatctattatgctcttcgctgtatcatccctcccatacagtttaggctctatacttgtaggtgtggtgatgggacgattgctcgcagtactggaatcagtgctacggatagaatggtgtatctctagattaagaatagtggtgacctttgcacacacgagctgcagttggtcgacaacatccttcattcttatagacagacccactctgtcaatcttcaactttggcgtttctttgatcacatcctttctctgttgtggtggcttgtgcatgcaagcaccacaacagattgaaacgctagaatcatcatcaacaacagctggaaaagatgagcaatggaggcgtttaccgacagcatggatggtgttgcgagcaccggaagcaagcttgcggatgccgccgccggtggcctcctcctcctcctcactgtcatggtcgttgtatgaccaaccacagcagaggccacgtccttgcgcaccttgttctgatcttggataggtgtgactaccattatcagcagcagcagcacaggagcatttagagaatcccagccgtttgctggcagctttggcagtgtgggtgacattgaggaagaggttgcgggcgcaaccgccggcgtgctcatcggcggcgtggtaggtgccgtcgagctcgtcctggatgcggaagtagtcgagctcgtccagcacgtcgtcagcgtcgaacgccaggtctcgcagcttctggaggagctccttgagcgcagggctgcgtatgtctttgccctgcgcgttgtcgagcaccccctgcgcgtagagcagctccatcttgagggcgtccacgttgggtccgagctcccggctggccgcccacgcctccaccaagccgtccgagacggggccgagggccttgcccaccacccaccgcgccgcgctcacggcggaatccatcgatccgatgcgcgcggttgcgcttcagtccaagatgctgcatgcaaaatcgagaagacgaaccattaattctcactcaaatgcaatcgaatgaacagtaatatgacagtggtattcagctattgttgattcgtggctgctgttagaggagagtggatacgtacgttacgacttacccaaggccgtacgtgcttctgcggcgtcggcagtcgggggcacgaaggtggagcgctcaggtattgggggtgaatgcttgagagaaccgtgcaaagagggtcgagttgtggcgcttgctttggagacgggagtccggagggaagatgctggatggaggctgctaaattactccactaaccttgtctgtttttctttttttctaaaaaaatatatttcctcggttttcacaatgctagatgttttgcttttaaataaatttatacatagacatatgtatatgctctatatatgtgtttagatttatatatgagtttttagtaaatttagaaaagagataaagaagctaaaatgtcattttgtggaacggaaggagtagctatttagatgacaagcggaacaaaggtacatcacattaacaggatgaaaaacaacattgagctcgcttccttcgtcggcgggtttgcccagcttgtttgaaactttcgcacggaacaccaccgtttagtagtttgaaaaatgtgctaacgaaaaccgaggtaaaaatctgaatcttaataaaaaaaatctaggtcctttttttttctaattaagatgcagatttcacctcgatttctgttaccacatttttataaagtgctaaatttctggtaagaagttgctttaaaatatcaaataaaaaataaacctccgtgttcacctgcagataacatgtgagataacatgtcaagttaaaaaaaaaggacagataacatgtgagattgagaccgtcttcacgtggataccacacgtcaatttactctctccgtcctagtttatgaaaaaaataaacctagcatggatccggaaaggagtcatattcatatttataggttgcagcgatcaaaccgaaaaagtgttcacctgcgtggacgcattagtccaaacaaagtgtccttgtacgtagattttataaacgttaccaggttggaaacagattcgacccacataaatgagctcttgacccacagaaatgagctctccgcgcgctcctcgctggcagatctcaagaagaggtcccgtgcagagatactaacaacaatgcagtatagaacttttttaaggtacacttggaaaaaaaaaactccacacttcaacaatgcaatatataattactagaagagcgtgactattggcacgcttacaattttataacctgcacaatatgcttaatgagtatgtaggtttaatagactaacatcataccatttaatatattgatggtattaaaatggaaggggttggatattggctaccggaaattatttttctagcagaaaaaaagctgcgatatctaatccatttttttggccggtgaagcagctagaaaccctgcttcacgatgcccaacaatttttatcaatggaaaagtcgacaatagttatccaagagttctgtgtaaaaggattatcatgcaacggatcaaaggtacatcatggatagcacactatgacaccacggagatagccacttctgtcaacgacagcccctgaattcacccttccttgagttggttcgatttggagaaggagattatttttttttttaaaagaaactacatttattttgagatggagaagttaactctagtatgcatatgcactaaaattaacattgcattcacgagtgctcgtcggttttaagtaagaataggtaatttttgacactttatttttttttaaaaaaaacaactttaaagcaagcacttccaatttcaattctagtgattcttaaaaaaaagaatacaaacccaagaaataagtttgatatgaaaattgttgaaaatggagtttttttaaaaaagtttgttgaaaatagaattattatttttgtttgaaaataaaatctagagtaaatttgttcccttttgaaatagcccgggctctatgggcgcagagtagctcatgctttgtgcaaggaaaaagtacaccgaaggtccctcaacttgtcatcgagttaaaaatcgtcctcaaaccgcaaaaccagatatccgacgtcccttaactaatcaaaatcggttacaataggtccctcggtagttttgatcccggttttatcctatgtggcgctttgaccacatgtcagcgcgtccacattagcctcatctctctctctctctctctttcccctcttctctcccttcctcctctctctctctctctcactcttctctcttgggctctgggcaggccgaccaccaggtagggaggagaccgatggggcgaggcgggagaggaggtccggtggccggcgacgacacgggagcaggggagcaaggcatcggcggcggcggcggtagtggcgctctggcgagctcctcgccagcgcggccgatctcgttgtgtatccaaaagagaaaaggtatcctattcaaatgcaaacccgacggtacccttctgcgagttgcatggtcggccttgaagaggatggcgaagaggttggcagccttgaagaggaggagggcgaaccagtcgttggcgaggcggtggaggagatggcgttgggcgtgggtgcagggggcggcggagtcgaaggcggagtcgtcggagtcgatgtgggagaagagggcgtgggagatggcgatgtggacgaggaagaggaggaagagcgggaggacgaaggcggcggcgatgcgggcggtgggtgcggaggatggacgccgcctccccgtagatccctaccacgcccaggaattgcaactcctcccctgctagttgcgccaagctcctcccccatcggccgcgcccgcctctcgagccttttcgacggtgcaaccctgaggtcgcacgcgcgatgatgctctcccttctcctgccaccgccatgtcgtcggcagccgccgcgagccgcctcccttctccagtgtcgcaaccaccgccgcgagcctctcccacctcaccctaatgacctcctccccacccgccgttgccctgcagagaggagaggagagagagaggagaaaggtagagaattggggaaagagaaagggtgctaaggcggacaccctgacatgtggggcccacatgcgtcccacgctgactcagccgccacgtcagacaaaaccggggtcaaaacaaccgaaagacctaaagtgaacggttttgtaagttgaaggatgttctatatctgtttttgcagctgggggacgattttgtaactcaatgacaagttgagggaccttcggtgtactttttccctttgtgcaaggccctggcccagctaacggcccgcaggtgatacagggagattgcccacgtgggcgcctcccattggacggcactggatgcgcttctgcctctgcccagaatcatcggtctccagcaattcggctcctctctctctctcccgcacctgcagacatcgaaagccaaaaaccactcaagaagctgcaaccgcgtaatctcgagaaaacggtttactcggcctaagacagtgggagacgacggcgacggcggcggcgggaggaagccatggttctcgctctgctgttgggctcctcctcttcttctcttgcggcgccacaccctgcttgctcttccaggtaacaagcgccagtggcagcaacacgcagttgatttttcttggatcaaagttgtataaggctagatcaggtgctgttctattgtattcactgttcgaagcaggcatgtattttgggtaacattcttgatgtcaaagtcatattccacattcagtgatggcacgtaggaggagtcaggttagtacagtacctggatgaaaatgctgataagtaatcttcttattggtaggagaaaatgcagacccgctggacgaaataatttcagatgctctctgcatgacaaggtgccactgaatgctcatggagtattatccacaaaattgctctcatgccttgctgcttcgcttgttttcatctctccaccttgtcaggtacctataaatgttaacttattgtcagatgtatatacactaaggctgtgtttagttcacaccaaaattggaagtttggttgaaattggaacgatgtgacggaaaagttggaagtttgtgtgtgtaggaaagttttgatgtgatggaaaagttggtagtttgaagaaaaactttggaactaaacacggcgtaattcaaagagataacctcgggatcactaagcaagaacagttttttttaagaaaagatatttttactgttgaggattgagagaattttactgctgcaattttgattggatacataaaacttgttaatttcaattaagagaagagggaaaatggagtgagattaccagttcaggcttgtaacatggtatcgatgtactcttaatctctcatagttgaccaggctatccctgcagagacctttgtacagccaaaattgtgccaggttgctgtggtagcagccatcgacaaggctgcggttcctctgaaattcgatagcccttctgatgatggcggcacaggtttgatgatgaagggtatgactgccaagaactttgacccaattcgctactctggtagatggttcgaagtagcatcgctgaaacgtggctttgctggtcagggacaagaggactgtcactgtactcaggtattgtagtgccagaatcctcacacacaaatactagtagatcttaatctgtatgatgccccagcaatatgtacctctgaatcctgattcctgaaaacaccgatatctgacatctttgtatcaaactgatttggaataggttatcacaggcatgctattttttctatgccatttgcaccatataatgtgtaagaagattgttacagaaatttgttggtactgcagggggtgtattcatttgatgagaaatcacgctcaatccaggtggacacattctgtgttcatggtggacctgatggttacatcaccggtattcggggaagggtgcaatgcctgtccgaagaggacatggcgagtgctgagacagatcttgaaaggcaggagatgatcaaggggaaatgctttctccgtttccccacactaccattcatacccaaggaaccttatgatgtgcttgcaaccgattatgacaattacgccgttgtgtctggtgctaaagacacaagctttatccaggtcagaaactgatctctgaactgcaaatgaccactatttcttagccctctgcatgcttattctgcatattgaaagatcaatctagttacgtaagctgttccatgaaccaaatatagtgtcaaatagagacaacatagggttaagcaaggacttgaacactgagaaatcaagccaatattccttaccttcatatgcctattctgacgcattttgtaaactgaaatatcataacattgtgtcgtctctcggcaatgcatcagatatactcaagaacacctaatcctggaccagaattcatcgagaagtacaagtcctacgctgccaacttcggttatgatccgagcaagatcaaggacaccccacaggattgcgaggtgatgtccacggaccagcttggtctgatgatgtcaatgcctgggatgactgaggctttgacgaatcagttcccagacctgaagctgagtgcacctgttgcattcaacccattcacaagtgtgtttgacaccctgaagaaacttgtagaactgtacttcaagtaaactccatattgtaaaacttgtgatcaatgttccctccacatgaagatgcagttgaataaaattctcacacacagatgtctctagtgatttatgttttttcatgcgccttatcagaggaagagtttagcaaaaatcataaaatataaaatgaactgtttagcatctggaaaccttagttcatatcagtatgtactaactaaatagagattagcttatgaagagtcagctcttaaacagtgaccaagaacactgtggctggtaagcagaacgcacaatgagacagattcagggcattatgggacatgttgtgctgttattcgactccattctcgtgtgctcaagcagagagagggaggtgatggcaacacttttttctgtgcgagtctcgcggcatccaagcttggaaatccatgttccaacaggacaaaaacatcatacgctaagactcatgagttcatcaatgtctcaatgcctgcatcaaatcccagcaagaacgctaaagagaaaaccgagaagagaactcaaaaccaagaacacatcaacgaaagaacaagccaaccaacctcgcccgcgtgtctacccacacggcggcgccgagtggaaccctagaaagccgctgatataggcgttttagctgcaggccaagcccacatggtgatgggccttgggccccacctatctcgagggccgggcccatgtac

SEQ ID NO: 5219 - DNA, 34434 bp, Oryza sativa
  unsure (1)..(34434): unsure at all n locations
gtgggaaatgctagaatgacttacattatgaaacggaggtagtagtacgtagctgatgtactgtactaatgtctgatcactattagcaatatgtttatttttttctgtagtgctcataaatatgcgtcataattttattattactattattattttgtcaatcttcaacagcagtggcttgccaagatcaaatgagggcatgaggctcctattctcagcagttattggtgttatgctaggttacttgtttgggatttcatttcctactgtcaatgtaaccaaggtaaatatggatcatttgcttctcttgttttcttctaccagccgcttttgttcagggaaaaaagaactgattgtatcttgcagctccacttcccttccagtattatctcatatattgaagacaaagactctggtatcacaacccaaacattgttgaatcatgcatggacatctgcaaatagtaaaaagaggaacaattctgagtctaactctgacgaaattcctaaggtactttgccaaactgtgatttatgccatcattattttagttttgtgagtaaaggctgattctattacattctgcattattatttcctggtcaatgtcttttatattactcaacttatgtattccactatttctcatgcatggtgtgtgaagtttcaactttcaagatatgaggttgcatgaaggatgtaaatataggaatttatgcctatgttaagtttggcactgtatattaggtcctcatttacctgtgtactttgatatctcctttactggagtgtatgccatcatgtgctaaatcaacgttgttgctaatgatttctttcttcatttctattatttctgtattactgttctggttaatctacataattctttgctcaagatttatgtgccaacaaaccctaaaggtgctgaaggccttgcacctggcattgttgtgcctgaaacagacctttatcttcgaagattgtggggtgaacctagtgaggttagttaccatttcactttttcagtacttgtatcaaccaatacctttgaatggtgggtcttttaacctcttctgttttgtatgtggacgtgtggtttatgatctgaaccatatgaaccatcaggatcttactagccagccaagataccttattaccttcacagttggatactctcaaaaggcaaatattgatgcagcagtcaaaaaggtaattacttagacaactagcatgtgtaaactgattgcattgaataagcatacaattgctttgttcaaaatagtcttcagaatagaaaaaaaaaacttatgttcaactataaggcatctatcatgcttaaacagttaactgagacatctatcattcacttcaaatttacatgccttattatatagttttcagaaaacttcacaattatgttgttccactatgatggtcggactaatgactgggatgaatttgagtggtcaaaaagggccattcatgtgagtgtcagaaggcagactaaatggtaaattattgtaacagatcctgttgtgttttttcatcttctagtttagcactatgtatttgacaaccaaaggctaagtgttttactctttttttttatacaaggtggtatgccaagagatttttacatcctgatattgttgccccgtatgactacatatttatctgggatgaggatctaagtgtacaacatttcaatgcagaggcgtaagcatacaccaccttccccccttgtttgtttattttcggtctgctaaggaagagtatttcaacatgaatttttaggtacattaagcttgttaggaagcatgggttggagatctctcagcctggtttggaacctgataaaggtctgacatggcaaatgaccaaacggctaggagatcaagaagttcacaagtgagctgatgaatctacaatgcttcattgttgcttgatcatcacctacttgtattagtttcttgagtgatacttctctatgtacagagtaaccgaagagaggccaggctggtgcactgatccacatctaccaccatgtgcagcgtaatggctcagtcatttatcatgatgttttcttttctttttttttctttttttttttgaaacgatcgcggcaagaaccttgccgaatatattagaagagtgaaataaacagttttacattagacgattacaaaccagacggataagcgacatgaaggaaaaacagcaacggcataacaaaacggaaggaggatcagatgttttctttttcttaaaactatccgtcttcacattctgtttcacatgcagatttgttgaaattatggcaactgtgttctctagggatgcatggcgctgtgtatggcatatgattcaggtggagtggcatctgcactgttcttagctttgcttgaagctgtatgcttatgcccggctttttgcagaatgacttagtccatggatggggcctcgatttcgctcttagaagatgtgttgaggtatctttttttttttacattaataagactctgccctactgcattgttatatagtcctaaccagcagaaggtctaggttttcttaattttaagattctttttaaatttaattatcttggggactagtggtgtgccaatctattaagagcaaggaaaatgtgggggctaagtgattcatgtagcgaactaatacagatgacagggcagtaggtttttctcgataaacggagggcatgttaactgttttattcatgctcctagcaagctagcacaatctattatgtactggttgccaactttgttatgacagttatctggttttctccactccacatttatttatttcaaatcagtcatgttttattgagtcagaactttggtttgacagccagctcacgagaaaatcggagttgttgattctcagtgggttattcatcaggttattccgtcactggggaaccaggtatatgcactgcttatctcacttctcactccatacaattatatgatgttgtaagttgtaacattatctcctggtactggtagggcacggctgagaatggaagaacaccatgggaaggggtaagctagctctgatgtattcctcgcttctcatctgggcatttccgatgcatgaattctagacttaacaacatcctatatgaatcgcaaccatccgcaatgcggatttgctcttacgattttatttgataatgtgccataggtgcaccgaataaaaccgtatgagcaaagacccagagtcttaccggctagcaccataagttggtgggctagcccgccttggtttgagcctcaccaccgagaaacgctcaggggttttccggctagttccacaagatggtgggctagacgacctgagttcgaagcctcacccccttctaattatttgatattaggtcattccctaatattcgcgtttgagcctcaccacctcttaatatacaactttttttcacaggtgagagctcgctgtagaaaagaatgggggatgttccaaaaaaggttggctgatgctgagaaggcatattacttaggaaaagggatcacaccgccaaattgaacagcagtttagatgaaaatacacgcacatcaggagtaacaagtcttagcaagttttccatttcggaaatctgcctcttgcgtataggaatagagatgttcatcaaagcattgtcgccaaaataagaagagaaagaaagcagctgccttctgcaaatttcagggcaagttttgtacatgagaatcgccagttctcgcctttttttcacttggttttattattattctttggtagtgagattagctatgttgttagtacagtagccgctgtaacaggggattctatgctctgcttccttgttcatacacattttttgtattattggccagacggccagacctgatgcaaaatctatgctactgacaataatacacattttgttatagtcaattaagtcgagcgtattagtaatcatcaaacctttataaaaccttatacattatcatcatttaccacatagtggatgcagagcatctataataagacatacaatttattttctgatacattagagatcttagtagtaatagtaacttcttaagccaagcgtcgaacagtttattttaagcgcatcagcaacgcaattgatattttttttttacttacgcgcggttaattagtttgggattaggccatgattcggaaacatggcttggcattgccacgcacgcatccgccgttgccgccgccgccgccggcgtagcccacctgggtggagctctcgtacttctggtagcgttgcgcgccgccgccgtgctcctcgtggcgctcgtatgcatggtagtggttgcggccgccggcgtgctgcttctcctcgtgctggtacgccgcctggtggtagctgtggacgctgccttggcggctaggtgggcagtggccgtcgtcgtcgtcgtcgtcgctctcgtcgtcgtcgtcgtcctcgcagtcgtcctcgtcggaatcttcctcctcgcattcgtaggattggtggtggtattgggtatggccgccgctgctgtggtggccggcggcggcggcagtgaagtgctgcttgttggaggcgttgccatacgcggcggcagtggcgccaccgtagtggtgctgcccgccgccagccacggcgacggcttggtggcggttgtagttgtacccgccggcgccgcagccgttgacaccctcgatggcctggtgctgcttgtaggtggcgtgctgcttcacggcgccgccgccggcgccgtggtggcggccgtaccctcctccggctgcggcgtcgcactcctcttcgtcgcggcggtaggaggagtactgcttctgcacgccgccgccgttgtggcgagcgtacccaccggcgtcgtactcctcttcctcgcggtaggagtactgcttcttcacgccgccggcgccggcgccgttgtggcgagcggcggcgtacccaccgccggcgctctcgtaccctttcaacacctcgtgctggtacgtggcgtgcttctgcccaccgccggcgccgtgctggcgagcgtagccgccgcagccgccgccgcctccgccatggttgctctcctcgtacacctcctcctccttcttctcctcgtaggtgtgcttctgcacggcgcctgcagcagcgccgccattgcggcacacctgcacgtcgccgccggcgccgccctgctgctcgtacaccttctcctcccggaacgacgacgacatcttctgcacggcgttctcgtggacgctcatctcgtccatcttcgtcacgacggtggtgacgctctcggagctctggctgtggtagttcacctgcggcttgctgtagccgtagccgtagctgtaggcgccgtactggtagccgccattgccgcgcctagccatcgccattttttcttttggcaaatctctctagcttgttgctgggcagtagtgctagctagctgcttgtgttgttgtgttgcgttgcgttgcaagggttgtgtttttataggcggggagatgggcgcgcgcgcgggacgggagcatttgtgctcgatcggtttttcttcgtggcacatatgggcggtgcatctaatcggtaagatatgataaacttttttaatcgagtcggcatccgctgtatgctgcatgtcaagtataaaaaattaaaaatactaataaatatagggtgtatttagtttttttgggggtaaagtttttttttaaaatatactagtattaaacatagactaataacaaaacaaattacatattccgtccgtaaattacagattctgcccgtaaactgtgagatgaatttattaagcctaattaatatgtcattagcaaatgtttactgtagcatcacattgtcaatcatggcgtaattaggctcaaaacattcgtctcgcaatttacatgcaaactgtgcaattagtttttttccccacatttaatgcctcatgcatgtgtccaaacatttaatgtgatgttttcggccaaaaattttggatataaaaaaggccatagattaatagataataaatcatgaaaattcaaagttaactcttaccggttataacataaagtttatttctaaaaaaataatataactaattggttacatgtaataaatactaataggatgttccttgagctattagaatctctctccggtgagatatactccctccttctctaaatgtttgatgacattaacttttttaaatatgtttgaccgtttgtcttattcaaaaatttttgtgaaatatgtaaaaatatatgtatacataaaagtatatttaacaataaagtaaataatagaaaaagaattaataattacttaaattttttgaataagacgaacggtcaaatattttttaaaaagttaacagcgtcaaatattttggaattgagggagtatgttgtgcaactttttatcttgataggcatctctcgtcattcgagcctgcagccagggaggcgccatacatatcttcaatttggtctatgtgttcatcgggcatcttgtaatttggcgcatatactcaggccgacggcctttggttgaatgatgataaagcgaatcaaaagatcctatgcgcctgccatgttagatggtctgtgttttttccttcactagctatcatgccgtagctagcgcttatcctggcatatcacagccaaaaaattgatcatggtttactgaaagtccgcaactgatggaattttcatcttgcagtgattttatgagaacacacattgaaacatagatatggcatgggagatgttttttttcttttttggatatggattgtctgcagtcacatgtattattgaccgtcagtactgcaaataattctcgtcgattctttgcactttaaatcaatcaattcttgcatgacattcaaacaactatgaaatatttaaatttttttttgataagatcaatatatgatattcataaatatgtaagtttaaatataacttctacaaattacaatgaaagagaataaactaaactcttaaccattaagtgcattattcagccatactttctttttcaacttatataggttgaattaaatttatatgtttgtacagtgatatcgacgtaccacatattaatttatttaattatttttttattactatttagattacatgtagaacaccaggagacagctccttgaggagaaaatgacttttcccctggcatactgaagtagctagcagaacaaaactactccactatatttgtttcgtacatgtcgttcaaaaagttatcaaaaaaaattaaaaaaaaatcaagatagatcaatatatgatatatcttttcgtaaacaagtgagttaaaattcgacatatataattcaaaacaaaaataataaatttgaccatgaattacgtgttttgttcatagtcaaatttgttatttttatttctacttgcataatttgaatttaaatttgcatgtttgcgaagtgacgtatcacatattgatctatcatactaatttttttcaattttttatgactttttaagtgacatgtaaaaatgatcttagggatgaattgcgttttcccactatactctattttttaagagaaaaactcaatgacattccatggatttattaggcatcttgtaatttggtgtatatatactccggtcattgattgaacgataaagcagagatcctattcgcctgccatgttagatggcttctttttttccttgcctgccttggtacttatcctaacttgttagagcatgtataatagcagaatataagttagctataaatatattttaaaaaaattaaagaaaagataaaaaagcagtggactacaaatctgtagccagctgtaacacggactccaaaacataatgtgtgtatgacatgtgggatcagatattaatagtatagtaagcaactattgtatgaattgactattatattggttacagataatttaaaattagtagttgactacactattaaacttgctcttacagtgcaaaatgatcatctttttttttgagaggcaaaatgatcatctcgctgtgctttcactagtaacaaactgaaactgatggaagaattcccatcttgctgtgccttcatgagtacacactaaaacatacgtagtacatcgacacatagacatgagtgacatgctgaaggctgaagcagctagcagaataaaaaactccatgatatattgatattccattgctcataattcgtccacttttgggaaagcttggaataaccaacaccttgcctcaagttgatctcactgacctttcggctactactagaaaagatcaacgtacgcgatgcttgtgactgtgggtgagggcattcccaaccaagaaactaatatagattccataaacttaacagcataaaaaaaaaaactagtactatagacactattcttctaatacaaacactactattccatacttaaatttaatactacttatctcatataatgtcttagatgttgtatagaaactatgtctcatgcaagatattgtttccttctcttttcttatttatttacttaccacatcattttttatcttaggtggtagcttatttaatgctaaagacgcatcctagccctgatacggcgcctgcacccagacctgcacacgaccgtgacacactgacatgcaggtggttttgcgtttcagcgtggtgttgcgtactgtcgcctgatcgtccgtcgtgcggtcgtgccgttggtgttgacagttgagcgtgggatgtttctctcctttgaatattagcagccgcgtagcaagttatgacttactgtatatatgcatatcagagttggaatatatgaataccaataaatgaagaagattcttattttttttaagactgataactggggggcaaagtgcccacctttacatattacttggaaccaaatggcaggtttagccgcgtaagcacatgagccctgtagaataaagtgaaggaatacacgggagacttaaaaaaaattatgttattattttctcttcttttgggggtgggtgggtgggggggggattttatgttgctttttgttgttagctacaacctccgtcctaaagacgtcgttgattttttatcacatgtttgaccattcgtcttattcaaagaatttacgtaattataatttattttgttatgagttgttttataactcatagtattttatgtgtgatttatatcttatatatttgcataaaatttttgaataagacgaatggtcaaacatgtgagaaaaagtcaacagtgtcatctattaaaaaacggaggtagtagcaatttttagctatgagatatacagctaaaaatacttacattttggaacggagggagtatatcatcggtttgttggtagccataacgaaatttttaattttaattagagttgattttagaaagaagctgtgagttttgcatgctaacgctggtccaaatattctcgtgtacaatataataccacaataaaacggtaggtgcatatatgtcgagcatcaaaaaatcggccgggagtactacacgatttatttagacatcgtcgacacatcgtaagatcgtcgaaataattttgtctcactccctcaacagatcaacctcgtctcccgcacgcgcgttaacaaagactataataaggctgtgtttgagggagaggagattgagaagattgggaagatacggaaaacgagatgagccattagcgcatgattaattgagtattaactattttaaactttaaaaatagattaatatgattttttaaagtaacttttatatagaatttttttgcaaaatacgcaccgtttagtagtttgggaagcgtgcgcgcggaaaacgaaacaaacattcccccatttgttctccaaacgaacgcagcctaagtgacgcgcgatttatgccatcagaagcgcttgctcgggcgcgcaaccctcgatgcagccgagcgcccggccaccgacacggaagcagatctctcacgctattgcacaccatgacatactgttaggtggtcttcttttctcctgaagacttgaagataaaaattaagttttttacgtaaaatgagatggtattaggtggtcttcttttctcctgaagatttgaagataaaaattaagttttttacgtaaaatgagatggtattaatgtatgattgattgagttttaattattacaaacttaaaaaatagattaatatgatattttaaaacaactttcatatagaaagttttcccacgaaatataccatttagtagtttgaaaaatgtgtcacacaaattttaatcttcatcgttggagaaaagaacaggaccttaagctcataaataattctcgggtccacatgtcaaccaccacatcaaaattaaggaaattacacgatgaggatctcaatcccaccagcacgacttcctcctccgatccttgcacaactcgtactctcgtagcggcgtggctgctggtggagacggagagtacgtagtcctccttgcggcggctgacgtacgtcgtgctcctcctccccctcgccgatggtagtgttctcgatcgtatgcgcctcgtagcgcggtagcgctgcacccgttgcacactgctgctttcttcttgtcatggtggcggcgaccggcgatggtacgtgcctcaagacaacaaccaccccgagtgcctcgttgcggacggcgtgacgtgctgcatggcgccgccagcgctgtggcagagacgtggtggcggtggttcagatgagcgtgggccggcggcggcgaaatatcggcatgccctgcttactctgtttccttgtcttatctgtgtacgtgcaggtgtagattgtgtttgctactgtatggcgtggtaagtgctagcaatgagacgcaggcagtatatgcgaccgatccattgatctagtttacggcttgcatttagtatttgttttaagaaacacagtagatctacggcggcataatgttcttttctttttcaagattaccggcgcatgcataatgttctatgttctcccactctcaactcccaagccacggttgtggccttttgtcggctggtgggctggtttctattcttacctgctggcgcaggcacagcaagcgggcgaggacacacaggtggcagcccaatatcccagcccatatgggtgttaccactaggctcggcttgcaacatcggaactccctagtcccaacaaacgttggccgtagtttgatggctccattccagttcgtccgctataataagagagattttaaataaatataacatattctaatatgattaatagtattaagatgtgttatattttattaaaattttttatattttgagacagagcaagtattaaacttgaatacaaccgggaagccgtgttccgccgttccgcgcgacgcgcgcgcccacctcgcgtgtgtgtatactgtcgtgtcggcttgccgcgtggtcgcgccggccgccactcgagtctcgccagggcttgcgcgaccgtcgtgtcgtgacattgataaccggcgcacgaccgcctagtgcgcgcgcaaaaggaaatatggaatcctgcaactgcttgcatgcatttgtgggtttgtgctctggctagcgcgatctcgctaaaattgtgcgtgcgctagccactataaaaagcatttttgcagacgacaaaaagcaatttttacaggcggaggggaggaccgcctgcaaacagacaacggtgaaaatcatccatcttcacaagcaggcaaatggcccgcctgcgaaaatccaataaaaaaacaaaaaaaaatcgcctcgccgccgccgccgcaccgggagagggccgccgccgaaggggagccgcccacgtcgccgccgccgccgctgccctcccccggtctccctccccgccgtcgccgcaccgggtcgccgccgtgtccgcgcgcgccgctgccaccgcgttcacgcaccgccgccgctgccctctcccccggcctccctccggccagatctaggaggggaggccggggaaccacgtcgcggcagccgccgccgcgctcccctggcctccctccggccggatctgggaaggaggggagggagccgagccggccccgagcgtcgccaccgccaatccacgcctcgccgttgccgccattgacccgcatcttgccgctgccgccataggtcctcccccttacccctcggccagatatgggacgaaggggagggagtcgagccggccccgagtgtcgccgccgccgaccagcgcgacctgtgccttaccgttgccgccgccgaccccgcgcctcgccgttgccgccgccgacctcgctggtgccgccgccgaccctgcgcctcgccatcgcgcgcggatcctcacctcgctggagagaaaggtgagggagaggataagtgagggagataatgggacttagaaaaaatctactctagcctggtctatttatattgctccttattttcgcagtcggaccatataaggagcgcttgcgaaaataattttcgcaggcgccgcttaagtggtccaaatatcaccccaatttatatttttgtagacggtcatttggcaccaaaagtcatgtccgactacaaaaaataaaaccccaacgttggggaaaatgttttatctagtagagagcccgtccatccccccgtatgatctttaccacaacagagaacacgtacgcatgaatgaaaaggagtactgtaacaaacgtgcatatatagaagcacgtcgaagctcttatttattcatgtaccacggtctcatttattctcgtacgtacagaccatagataagatgctgcatgtgcgcgtagacacacgctcgtacgtgcgtcagagcgcgcacacacacaccatgtacacgaccgtgcacacacacacacacacactcacacatagtcatacagaaactgcagcctcgcgtacgtcgtccggtgcgaccgaacgtgctcagccgtagtactggccggtgcaggagtcgtactggcgcccgccgccgtggccgtggcggtgctcgtcaccgtggacgaggtgctcctcccggtggccgcccagatgggcatcaccgtggcggctgccgctgtagcccaggtggccgccgccgccgccgttgccgtggtggtgccccctgccggcgcgcgccatctcgtccacctcctcgtacgactccctcctgacggcgtagtgctcgccgccggcgtgcggcggcctgttcatctcctccgcgcagtggtccacctccgagtagtactgcgccatggtgcaaacaactagctgcaaattaattactacgagtgtttctgtgatgtgcaatgcagggttacaatgttgggtttgttaatgtttggttctgctatttatagtgtgcctgcaacaccagcagcccccaaaggtgtgcgtgcgtgtgtgcaagggaatttgttctgagatagatgcctttgtgcattgctgtctgccgagacgtgccagatggccgtttcgacgggaaggtaggagagaaatctagacacatttctacctatcaatatgcccgcgaatttctgactgagctgaaagtttcaggcaagctagggcctagggaaggcagacagttacacagatcatatggattgaagcaaagaagaatgtagatggaataaaagaagagcttggatgcttggtaaatggagtatatatatcctgcaaactagaagagatgagaataacaaagaattaatgtaatgttttgttggaaaaagaagcatgcgtatattgtgaacgtttagcctcagttcgaaggagttgtggggcttgcttaattattagcggtatgcaaaacgagataaatcattagcgtatgattagtcaagtattaattatataaactttaaaatgaatttatttgatttttttaaagagacttctgtatagaaaacgtttacaataaatacaccatttcgagttgttctttagaattcggcctttagcatgaatgggcataccggcatactgtatgaaggaaaccattgtctgatttatgcatggttttatcggagaaagtaaatttcagtccctttccagaatttgatgagtatgttactctgtactgaactttgtttcaattaatatccgggtgaaatcttcttatgtttgcaatgctagaaaatcttataatatgaaacggagggagtactttgatttgggttgtgatggcatggatgtgacaaatacagtatattaagatttacatatttatatatgcggagcaatcctataagtatatgaccatatcatatgtaagaagtattaaaataaaaacttgcaaaagaacaaacgataatcctgtacatgcggaagaatatttggaatctgtaaactaatatgaacaaatagtgcaaaattgcattatatatccattttcacaagaagctcgttttcattctacacctaccaaactgacatcctttagtatggtttatgaaacctcaccaaaaaaaaggtacagtttataaaagaaccaattgataggaacaatttgtgtttgagctgttctgctactcacactgtttttttcttgtgaatgtatgtcctttcattattgttcttgtcctgcttggtagttgtcatcaatgaattgcactgcctgaacaaaaggcagaaagatggcatcctgatatattgtggattacagatgggatcgataacagagatgtacagagatgtgcaatctgcaatgtttccaccattttgaagttcttcctgatcgagcacaacttaacaacgagtaaagatagatggaccccgtgcatatataataggtgttagaaagggggtggccgggtggggaactatatacatgggctgcaggaagaaaatgtgttaaatcaatctacagtctcattaggagattggaaaagaattgaaggtaaagactacaagagtgtcctgaaatgacgagagcccgcgattgagtgcatcatgcatcgattggatcaaacagggatcatgattcatgagcatgagaggcaggaggagcacgaggatttggcgagttcgctgccaacgcacaaccatgtttagatggtgcttgttcgtaaggcgttttactaccagtttaaatcatgctgaattttcctttttgccttctgttcttctgttcttctgtaattggctttaaattttgttatcagctacacgatgttaattatcagtccttatcttttcctaaaaatttactagctagaattctgataagaaagatggttcaatacaaggaccattgtatattccatctgtcttgaaatacttttctgtggatgttattcacctcttaacttggttgtttttttatttgaagaaaatgtttaattacttagaagtatatttcctaacaaaatatattacattctaatataatcataaaatgttattatattttcctataaacttgatcaaacttaaagaaatttaacttgtaaaaagtcaaaatgacttataatatgaaatggaggtagtagtcaataggcatcattatttggaacgtgagagagtatgtaaagaataatttttaaagataataccattttaatagaaaattgtaaaatagaagttggttggctgaaagtttgtaaaaacagtattactttaacaaaattcagtatgtaaaaaagtaattacttacaaatgacaacgccgtaatagtatagtaggagtaaaatttagcatatatgttaaaattaaggaccttctaatttagcgtgttacaattaggcaccgttattggctctcataccctagcttccatacgattggcgaagagccatatatagttgcaatgagatcatcacgatcattcacgatatataactaacctgatggttcttccttgtaagttaccggcaggcagcgacgatcgatatagctaaacctttttctgggcgtctggctgcttcttgcttaattaatgttgcatacgaactgaaactttatactccagactaatcactatcacactatcagagagattcagaacagtaatcgaccggtgataattaggacaagctttattatattcaggtcacgaatttatttttcatacaccccccctctccgttcgtagtgatcgcacagagaagaaggtgctaattagctaagctccgtgtacgcacgtacacacgcacgcacgatatacacgtagagctaagccaccacatgaccaccacgactacgtacgggcacacatatacgtacgtacgtacacgggtacacacagcaggttcgatcagtcggacttgagcaggaagctctgcttgcgctcgcggaactcgccggtgcaggtgttgaagtcctcctccaccttggtctcgcgcaccatcaggtagtcgttgccgtggttgtggttgtggtggtggcggccggagccggacctgtcgatctcctggaacgtctccttgacgacgtgctgctgctgcacgccgccgcggccgaggaagccgccggtgggggtcaccgacctcacctcctccgagcagtagtccacctcctggtagtgagccattgttttttagttggggagtgaggtgaggtggtgttgtgatgagcgagaaatggttaattagggtttcggtggtgtacgggatggtagggttagtgtagggggcggttttatagtgtggaggtgtggttagggaatctggttcgtgagagaggtgcatgtgtgcacactgcacaggctcacacaggctttgtgcttttcgggctttcagcttcgctttttggtgttcatctggaagtatttggaatattattgatttatcggccaggatgatacctctgcggcggctgggtgaactgtaattggacaagagagagataagatggactaaatagtattaatctgccgttaatgaggatgtttttcatgaggaatggtgggtgattttgagttttaaccagccaatcatggatctgtgcaagcaagtgttctgtacttctgtcgtgtacatatgttcagatttcagagtatcaactcacgagaaggcgcgcctgaagattcgtgctaaaatagaggaaatggagaaagccaatcttgaacatggtacatggaccatgcaggcagaggtaatatataatatgtttattcattcattagtttctaaaacaaaacatacttttattagggttttttttgggaagtatattagttaggtttgataataaaggtacaatggatgaattgttagagaacaataaaatattccatcgaaaccaattggtccaattaatcataatacaacgggcatctctgtttggttctcaaaatagctgaaatagaaccctggtgtttaattaacccttttgttactagctaaaaaactattgtcatgtaagcattttccatttcatgtggcttagctaagctgccttttaacctgatgcaaaattgcatttccatgttaccgctggtaaatgaacttatcgagatttgcaggtcacattcgaaataagtcaccggtcgggtaagaagaatatactcatcctttgtactacctttgtgttagtgggaatatatacttgcgttccgccctgcaccgcattattactgcacttgggatggtgacctcaagatgctcgcaggtgtgatgggagaaaagaggaaccaaagtttggaaatggtgaacacatccagacgtgtatgtgatcagttatgcgatgcatcgcccatttcagattccttccagcatccataaaaaaggaagaagaaatcattcacagcagtcattttctgaccagccgccgttggttttaaaccaagcggttattcaagaatgtggtacaggaggattccggaaacactatctggcaattggcatgatcatgagtcacaggattacaaacaaaatcataacgacagattaccaattgacttaagtatcgacgatcaatatcttttaaccgcgtactgaagaacaagttgacagatagatgcacaaaacctgctgattctaaccaacatggctctcatgccgaagaaaatcactcatttatactactcaattcgcacagatcaaaattttggttttgaatgtgacattgctgtgtgaaacgccatctgtgggttcactaatgcctcttcctcttgcctttatggtgttttctccgacctccgctcttgaaatggggttcggttgaaccgacatcattatccttgtctccatcgacgaacatgttaattccaagatcgaatccatctgttaggccccgtagcctgttttgtttttcaaaataagatcagttacatacacaggttgggtatattggaaatcccaacggacaacctcagctttaagctatacttgcacataattttacgtattttataatggatagtagcagaagatcagctccacatacccgtgaagctcttttctcatccacttctccgtctgcttatcacgttttgtcagcggagctcgagtgaacagctcctcttcttgtttctcttgcaactctctctgccgcatataccttgtaaattccctgctttcatcacctgctgtttcctttaactgcaaaataatacagatgattattcaggtggacatagaacactaatcatataactatacatctaatcaaattgctagtgcatcaaatgaaataactggcaaacctcttcaggtctatcagcagcgtcatcaataatctctttgaagtaagagctttctgtagccattcgcgctaatgttttgtctttccttgaagcttgtttatggcgcttatcctcatcatccatggtagcagcaataaattttggtggacgatagatgccatcgttgtcctgaagtcagggatgtacatcagcaaaaataattgtatgaacatgtcaaactaactaaaaaatgatcaataatgctctaacaaacagataaacagttcagtgtcaacggatatagtgcactcatatattctcaagtaattccaaatatgaaagaaataagaaaatatttaactgcgattagtatgtccatagaagcaagcattagaattaagccaacgctgatataaaaaacaagataaataaatcaccattttataaattaagtcaagaaatactacatcataagtatccatatatcataattctaccaaggtgtggactaatagtagttaattttaattccagacgaggactatactacaaaaacacacgaaagaagcatggccaggcttagcctagctgacaattacttaagaactattggttcatcgttgggctaaagtaccagctagatgtcaagtttgatttaatgatatccaaaaaaagaaaaaaaaatcaacgaatacaatttctacaatttcgagaaggtaggtaatttcaggtgcacacaagaacaaatctgaccacttagcaagtgaaaattaaaaaataaacagtgaaattgtttgtggagtggaaggggagatgaacaacctgccccgcaggatcgatcttagagtccatcatatcagggttcggccgatacttcagtaggtcttcatcatccttaggctgatccttactctttgcttctgcatttagcaccttctcctgggcagctccgctatccgcggcgttggtgagcttctggatttggtactccatcttcttgtctatgggacgaatctaaaatccatccaattcaacacagcaccctccaatgttagccaacaaaaattgagccatgaaacttaaaaatcagtacaggagggctctggcacaccttctccaagaacagcctgatctcgacaaggctccgcacgacggggtgaccttccaccgagagccccttcgccttgcggaggagatagtagacgatgtcctggcagtagctcagcagcaggtggtgctttgcctccaggtacccaatcccatccgccgtcggcagctggttcttcttgacctacccacacatcaaacgcggaatgaagctcgctgtcatcttgccaagaagcgggagagatggggcaactcacgaggaggaggggaaagtgggagtaccttgcgggtgagcgccttgaccttgccggtgacgaggtcgagcccttctttcatctccttcaacgcggcgagcagcttcggcgcgtcatctccgcggaagaccgaaccccggccaccagcgccgtcgccggcgacgccggcaggactggcagtgccgccactgtccatcgggctcctgcaaccgccggacgccttcgccccgcgcggagtaggatggttaaggttggctccaccacgaaggggagagggtcgggttggcggagcgaccggcggccggagagcggagaggaggcggcggtgaggtcgtgtggacgacggcggcggcggcgggtgaggatgctcgcgcgcgctggacctgttaagaggctagggctttgccgttttgttgctattgggccacctaggcttcctgggctactttgtttagagctaccgaatgggcctgtaagcccagtaacccctcgatcatcctaggattgaaaaaaaaaatgtaagcgtaaatagtagaatttaaaaagcagaaatgatcgtttcaatagatcacatgaaaaatatataaattggataaaataatagatttaaaaaattcaaaagagtttagttgtcgctaaatttcctctaaaattgatgtttatttgtcagaaatttcatagggtttaaaagtttcagtccttcatttcaaagaatcgaataggacaaattttttataggatttaaatattaaagaagtcctccctgaattctttgaacgagcactcttactctgcagttctcttttactatagcagcagtttttcaaaaagaaaaaatcgtatattcatgtgttatgtttcgtctcgacatatccggttcagtttcctttagaaacatcaatccgtccactctaacacggtctccgagttactactttaaccaacaatatatatataaaagtaatatattttaaacaaaaaatagtataatagtttgtttaataacaaatccagtgatatcaattttacatgattaattttttttgtttttttcagttaaaaatgtttgatttgacactatactgaaaatgcttatattttaaaacagagaatgcttatattttgaaacagagaatgcatatattttgaaacgttgaaacggagaatgcatatattttgaaacggagagagtacgtttttaaaattgctatcgtacttttatcgttcaaagttaaccaaggacgttaataacttccaaattgtcaagcaaagagagaaaatggtatacatcttccccgctcctttttccacatgcaccactaacgttcacatctctcaaagttatatatcagtgtaaaggttgttgcatgaagcactaccgttgaatagcaccatagatcaactgaaacagcctccctatcattcgcaactcaagttgctccaaaaaatgaatagcaatagcacaaataataccggatactaaaaagataacaaatggagcaaactgttctttcaagtaacccaacaatagtaaacaataacccggatactaaaaagataacaaatggagcaaactgttctttcaagtaacccaacaatagtaaacaataaccagtaccgcacgaggacgttgcctcaatagtcaaaataacactggacaaaccattctccaagtcgaagctaaacttggaacacatatcctacgctgttggataagtatatttggccattcgtgtgacatgttccacctccaatcaatgaaaattgacttatgtcaatcaagcagtcgagggaatctcaaaggaaatttaccaaagaatgcatttaatacctatcggtatacagtaaaagttttaatctttttgccgccctcagtatggccttcttcctcttatgggaatgctatttgagccagatctgttaccaaacccaccacgcccccttgaccggaaattgcctcctaaacacagatacaaatcgattagaaaataaggaaataacataatactatccaaaagaaaaactgaaatagagaggcacctacctcccatagaactggcagatttagccatagattctagcgctggattcacaacctggccagcttccctcaagatcttaacaagattcctggagaattttgcattggagagtgtgaaaaaggtgaatgcagttccactagcaccagcgcggccagttcgacctattctgtgaatataatcttcaagagttgttggaaaatcaaaatttatcacacacttaatatccttgacatctgcaaaaataacaagaaaatgatgagtatgtaatcaagataatacttttgccctgaagaccacagcagaccaaactgggatatcaacattgtcgatctccatagaagtcagcgcatggcttgaaccagagccgaagaacaaaaactgcccatggatgcactttcaagttctacaactaatacaagtcgaaggggctgaaaaactgaactgggcatcaataactgttggatgtggatatgatggtgattgatctgtcagccttaactcacaatactgaaagttatccaataacataccagtatccataactatccaaatgaacccaatgaaaatctgtaaccaattccaacacaggctgcaatgcttaaggtgctgcatcagaggtcaatatgaggatcacacttcacactgtcaagaacaatacagtagtaggcaatagctctacaaacatcttgggaccagttggcagtgataagaccagggcacacgtttaaaatagcagcatataaacttctaaaaattcatggaaaacaagggaaagcataacagcgagatccacacttctaaattacttcatttgtaaatttagttgaatttacactagtgacttagacaaataataattagtagacattttcatgtatgcatgcatgcgagctgaaattgttgttaagccacacatagatctacgagatcacaagtccacagcaaaaagggaactaagtaacacatgaataataaataactaaagatgcaaaagaaagtaattccttgaggagagaatagattcatataaccatatgaattttagcgcaggaaaattaacaggcctgaaagcgaaagcacctagagctctaaattttcaaacataaaaatacaaaacaaatttagaggtcaacagatgaaaaaaaaaatagtgctaatgataatggccatagactctcatcgattctatatttctacctgaagataagttcccctaagagtgaaagaccaaaagccaagtaattttcaaataattcctaaccaagactaaatgtcaacattaggttgaagtgccctggtaacactgccatcgcttactctcgagggaaataaacaggagaaaagacgatctacctctgacatgatggcaccttgcatacaccatcaatccacaagttcagttcactcaaccaaaaacagctgacagccctccgacttatcatccttgagcacttggaactacaacctaattctaattttcaaacaagtcaccataccaagaccacgtgccgctacatctgtggcagccattataggacttttcccactcttgaactctgccagaacatagtccctttctgcttgagctttgtcaccatgaatagataatgctggccatccatccattctaagttgacgagtgaccttgtcacagtcctttttagtttggaaaaatatcaagattctgcttccatccattagatcagataaaagtttactgagtctgtaagaaacaagttaacattaacttaactcatggaaatttttagttggaggaacagctcatggtacaactttgtaaataatagtgttattagtagatacctgggatacttttcgtgttcagatatgacctcaataatttgctgtatggaatgattagctttcagatcaggtgatcctatgattacctgagttacgacatgtgcaaaatgttagtaccaagaaagaaaataatagaacacaaaaatacttttcaaaagatggcatggcgatggcacaagttattcgcaccttgtatgggttctgcagaaattgtctagccaaggattctacttctcttggccaagtggcactccaatacaaggtttgcctgtctggccggatctattaacaacaaaaacgtttagcacaatagaaaaaatggagagttagccaaaacaccagaactgatataagcattctaaaacaagccatgcctgtgccactattttacgaatctggggctcanaacccatnncaaccntccnnnncnnncttntnncancgagatatgttactcttcgcaggttagtgtgaccaccttccagcatatcgatcaaccgaccaggtgttgcaatgacaatctcaacccctggaagtagacgcaagagacttagcctacaaaaccttatgtccaaaattattttcggtaagatgggacaaatacctctcctaaggtcacgtatttgtggtcccttaggtgctccaccatagatacaagtgcttctagttcttgagtatgatccaaatttgccagattcttgttgtatttgaacagccagttctcttgtaggagcaaggatcagaacaattgggccatcaccttgttctgcacccgttacaatgcattcattcaattgacaatttaaaatagagagcacgtacatcaattccgtaacagaaacaaacctagtcgaggctgtgcaccaacatgaaccaacccagggagaaggtaagatagtgttttcccagagccagtttgtgcgataccgatcatgtccctgcccttcaaagccattggccaaccttgtgactgaataggcgtgggctctacgaatccactcttggctattgcttgcatacagtaatctgttaaaaaatgaaaaaaaaatagaacgattatttcatccaagacatgttgccgtattatccagagatacagattgctataacagttaacagaaccccgatttgaaatagcaaacctgggaagttggcctcctggaagtagcgaaccggcttgggcacgtcgtggccttcaacagtgatatcacgctggcgacgatactgcgacacatccatgtctgacatggcctgcacggcggggcactccacatagaagttcttctcgaagggtataaggctccggaagtcaggcttcggcaaggagagcgagtccagcgcgtcccttccacctcctctcccaccgccgcctcggtatccgccagcgccaccaccaccaccaccacctctaccccacccaccgccgcccgcgcctccaccacggcctctcccgccgaagcgcgagaagtcgccaccagcgggggccacgggagcagccggcgcgggcgcgtacgcggcggcgtaggggttggcggccgcgggggccgacgcggcgagcacgggagccccggcaaggtcgctgcacggaacaaccaaaccaatcgattcagtcccatctcaacgcagatccacatcgagccgtgagctaagctagggttagggttagggttagcgtacctgcgcctgtcgcggtaggaggaagggtcggcgtagcggaggtcgtagggattcatgtcgccggtacggtacgtctcggtgcgtgcgcgcgcgcgcgagggttcgccggagtccggtggcgccgccgccgtgggggtcgaggaggaggaggggaaggggagacgacgagggaggtttggatctgggaggaaggcggcgtgcggcggggtgaggaggcccgtggtttggttttgatgggtaaggatgcgaagcgtgtggggccgggctaggtcggttgctatggcccacgtgtcatggtccttgggggagggggggggagacgcgacgcggctcgtacgcatgagaagtccctcacgcaactttccccgcgtgtgattgggccatgtcgtaaactcgtaatgggccgcatctccctttcactgtaggaataagttcactttgcgaccctcaaaaggtatcgaaatcttatccgtggccctaaaccacaaaaccaaatatcttaacccccaaactcttaaaaccgattcaatttgactccctgggcggttttggagagcggtttcgctgacgtggcgcctacgtggcgatattgaccgagtcttcgttgtacgtggctttgacgtggcacttacgtggcagttgaattaaaaaatatgagtgggacccattagtcattcacacaaaaagaatgtgggcccactgacatgtggggcccacatgtcagtcctccttcctcctccctctctcccttctctctctccccccttcttccccttcggccaacgggcgggagggcagcgagagcgagcggcggcgggcggcgaggccggagctgcggcggcaggcgagggctccaaggtagagagagaaaatccaaggggagctcgagcaatccgccatccgtgtcgtcggcggcgaggtcgtcgtctccggcaaggggggagccaggtcgaggcgaggcgggggagcccggaatccgcagatgcatgaggtacaaagcttataaggcattactaatcgtacaaacggcggtgccggctacttctttgcaccgccggccttactcctgttgtccgtggaggtaccgccgccgccgcccgcggcctgcgccgccttcttggcggccttctcctcaagtgccttcttatccctgcgtcaaatccaaactcgaagatctaagaacccgcagattggaaccccgcgtcaggccggggacaagggagatcgaatcgggagacaccgagcaaacagacctctcgcggcgctgctccgaggtgagcccgtcctgggggtccttggcgttgggcttccgcgcctgcgcgcgctcgcggtcgcggttcctctggttgccgcgtgcacaccacgccgccggcgagaagtcaaggaagaaacagagggagaagaacggatcgccactagcaagaacaaaaacgagatcacgacaagcaaacaacacgaattcgagaggtagagcaaaggatacgaacaaacgagatcgcgacaaggaaacaactctggagctgcgctggtgttcgatccgcgtcgcctcgcctagccttcgtcgccgtcgagggcgccggagatggccaatcaccgcctgccctcgcccgccgccgcagctccggcctcgccgcccgccgccgctcgctctcgctgccctcctgcccggccgaaggggagagagagaagggagagaaggaggaggtagaaggaaggaggggccccacatgtcagtgggcccacattttttttgaatgactaatgggtcctactcatattttttaattcgactgccacgtaagtgccacgtcaacgccacgtactaacgaagactcggtcaatatcgccacgtaggcgccacgtcagtgtgaaactgccctctaaaaccaccgagagagtcaaattgcaccggtttcaagagtttggggtcaagatatccggttttgtggtttagggtcacggattaaatttcgatcacttttgagggttacgaagtgaacttattcctttcactgtacgcggccattgcttgggctctggatggcctggtagtcctcgagctacaaatactcggcatagtggcccaggagaatagtagacaagtttgaggtctcatcggaggcatttcacaagaatctcgaaggaaatatatagtttttctttgtataagatttctgcgtttcaaatgataaaaagctttcggatgaccttgaaattttttaataggttgttttatgtttaccgcaattgaaaataggggacaataaaggctaagagaattgaactttcacgctggctttggtccaacgtgagacatatgcgctaaactcgagtctcgaacatcacgcacacgaaagatgggattggcagcgctagtgaagttagcagaggaggctgtagccaacatacattttggatgagtaaatggcttcatatctgcatgctaagttgttgccccaacctccaataaccgttggcatgttactaggagatatgtgatggtatttttatttgaattgaagcagcgggtgctaggaacaaagatgtctagtatatagcacagatgcataaagtacacatcctcacttcctttgtgggtgtctgacctttagtttcatgatgcagctcgctagcagaagaaaccagtgtcgtttggatgtgtccgaatgccgagaagtggatggcaccctgcacggtggcaccacatcggtgaggggttaaataccagtctacaactcacgccaaaggcaccatctgtttcggcattgtcaacgtgaaccttaaatgcactctacgagatcatgttcactcttttgctccgagcatgattttgagctaggctggtagccaaaagcccatatcgctataccctggtccaagctgcaaacaagtgtaatcttatatgctgttaagtgaaaaacctagtagaaacatggtccatcacgtaacatgagtaataaaaactagctatagtgtaattcgctcgtataaataaaatgaaagatcaggaaaaacaaattgaaaatcatgcaaatggcagagactaacggacccttcgtttcgtttattcgcggaataagccaaacgatatatttacaaacgaatagtaatttgtgaataaaaattttatatacgtgttcttagtgatataaaagtaaatactaaaaagtaaactttaataaaataacctcaaaatttaatattgaaaattcaaattttgactaataaatataagcataagtgaaaagattggcccaaacaggagagcaagtttaatagtatagctaactgttggctccaaattatctatagctaatataatagcccatttatataatagttaactataaaaatatactacatcattaatactagcccatttatataatagttaactataaaaatatactacatcattaatacccggtcccacctctcatacacacgtaacgtcttggaatccgtgttgtagccggctacaaatctgtagtccgctttcttctctctcttctctcttcttctcgatatatgattatagctggtttataactctattgtacctgctctcaaagctaaaccagagcaccaatctcaaagcattctcctcctccccggaggccggagtccagacgtcgaggcggctgctgaccggggggcgagcgaaaatatttctagtcgtctccctccctcaacctctcatcagatctggccactcccacgcacccagtctcctaaaccctacacaccctccccccctctcctctcgccggccgcgccacccgccgccgccgcggccatggccgccgccgggggtctcccagcctcggccaccctcctcctcctcgtcatcgccgccgtggccgtcgctcccctcgcctccgccgtccgcccggtttccgacgcccacagatccgctgccgccgagctcttcgccgcttcccccgacggatccttcggcgagtaagtcgacagtgtcccgatctcgagtgcttgtcccacgccgggcgcagttgcgcgcgcgccaccgagctcagctccagatcgatccgaggcggggctccctgcttgagaattatggatgcttacttgcgttttggtctgttcattcgcgcagtttggagacgacgtatgaggcggtcaggacgttccagatactcggggtggagaaggacaagggcttgattggtaaggcgtgcaagttcgccgccgagaagctggcctcctcgtcatcgtcgcccgcgaaggatctgttccacgcggcccggatcagcggcgtcctcaagtgcagtgttgattccggagtttacgatgtgggtcttagcttagcttaacagatcttgttgatgccaatggggttttcttgtttgatggcatggtgacacttgtgttattggtgttaggatgtcgctacgaggcttaaggctgtgatcaaggacactaactcgctgctggaactctactattctgtgggagggttgctcagcatcaaggttactccgctgaattcactactagtttatacttgtttgtttgatttgctcatctccacttgttgatagttggttgatcttttctgtccattaatgaatttgcattgtttgcttcaggaacaaggccacaatgttgttttacctgatgcagataacacatttcacgcaattaaggtgacaacagttcattatagctttgcgtttttttctcttgtttacattctgcaatttacatcagaattttattttaaaattagagttgctgagatgtgtctttgttcgtttaggcacttagccaaagtgacggaagatggcgttatgacactaacagcgctgaatcgagcacgtttgctgctggtaacagttattattaaattgtaacacttaaaatatttctggcacctgtaaacataaatttaatgttgatctgaccttgtattagagggtgtgcttattgctgttcactgtttaatttcttgagactcatttaagttattatagggttgaatagtggattagtaatcagtgcctctatctctgtgaagctttctataccaccattcaccacttaatgggaagatctttactgcaattgggttgcatattttttgttactgatatttaacataatgtatttctacaggtatcgcactagaagcattgtctgcagttatttcactggcagattcggaagttgactcatccatggtgtgtgcatcctctctacttgagtatctagtatatatacttgatttgcaatagctatatgatttttcttcctttgacctaaataataaagtaccagtaatttcatatggtgtaaattatgttataaaaccatgaatagggaagtggctttgaatggatggagaacatatatagcactcatcttatagattatattacctctgtaactgataaagaagtatcgatgaccatagatagctaaatatcataatacaagttcattaaagtttgaagtgcttaatttcacaagaaaacaacaatctggtaatgttgtatctccccaactatcctcctttaggtgcgacaatctttcatctgaaaccttgaacatatatcaaccttgtctgtgattttaaaagagattcaaccatgccactatggcattctatgtaccatgactttcatagtttattttagtgattatgtgttatcttttgtgtagcactgcttcatacaatttgttggtgctcttcattcgtatgtgtcattgcctgttagcatggtgttgcaaatttgtactgattcctgtttcttctattaaaatatcatgacaacagatagctgtggtgaaaaatgacattgtgaagctatttgacacgatcaagagctatggtatgttctataaccttttgtttgtgctgcaaagttaccctgatggtatcagcttccaaattacaaaacctatgagatttagataagtgacagtagccagtacaatttatttttcatattttgattttatgcgtagtaagtgaggaaatttaccttgcctactttgaaagattagtaggaatcatcccacctacaaatacaaaatataatgaatgaatactttctaatggtatatttgcagatgatgggacattttactttgacgagaagcatgttgatgctgccgaatacaagggccctataacaacatctgcttcagtagtaaggggtgtcacctcttttgcagctgttgcttctgggaaattgaatgtgagctttcttgcatcaatcttgtaataatcattcaataaatttatgtgtaaaagcttttgttaagtagctgcacttaatctacagatccctggtgagaaaatactgggtttggcgaagttttttcttggtatagggctaccaggtagcgcaaaggattgctttaaccagattgagtcattatcattcttggaaaacaataggcaagtcattatttatttgttttcttcaattggcatgcatcttttattcttttttgtaatatattgagtgacacctctttctgcccttttcttaatatattttcaaaaatgtaaatgtttcttagtgcactgttagccttttgtgcttatttcttatctacaatttgcagggtatttgttcctctggtcctttcacttccttccaaagtattttcgctgacctccaaagaccagcttaaggtgattagtacttgctaatatattggattttgccagatgtataaaatttttactaggattgagtgtgaatctctgtatgaatgagcattcgattgatatgtgctgtgatgaattgacatttatatgaacactgcaaaagtgactgttatgatgggagaaatcccatattattcaacttgcaagcactgcatttaattgtaaaattttaattcctaactcatatcatattttaagtttgaaccagcaaagctgttatagtaactcacatgccattttcagttgtccttctagattatattctacacctagatttttcttattactcgattatgtctacagttagtataaagtataccttatctacaatagtttctcatcgatttcctttttttgtaatgttttagtccatataagttaactccagtttgtaaatacttggcattttcaggttgaagtcaccacagtatttggatctgctgcacctcctctcagagtgaatcttgtacaagtgctgggctctgactctaaggtcatcactactgaaaccaaggtagaatcaagattagtggctacctcttggaacttcctctatgcctgtctttttcccagctgccatcctctaaaacccttttacttctgatatcaggaacttcagtttgaccttgataacaatgttcattacctggatattgctccattgaaaatagatgttgggaagtactcgcttgtttttgaggtatgtgtaaagtgtattagtttgtttgtgttatgataatagtaattgacaagccttttttttttctcgccagatttctcttcaggaacaagaacatgaaactatttatgctactggagggacaaatactgaggcgatctttgtcacaggattgatcaaagttgataaggcagaaatcggaatttctgataatgatgctgggactgtggagtctgttcaaaagtaaattgtttaacgatgtgattcccttccatttttttttaaaaaaaaagaaagagagaaaaaaagttagagctacattaaaaaaagacaagctgccaaccttgtactgaagaaatttcatctgctttcttaagtatatagccactgaaagagttccattctcatctggaatagcagacaagtgctacaaaattacttagtttttatttttcatttccctgatatatgtctggagattttcctgctatttttaacttgtttacttttgttgttttgtgattgtgaatctatttaatattctgatttagttaatataaaattgcatgaaaattgtgaagcgggaaagcctgctttatatgtctcatatttcaagcttcttcatttcaggatagatctgcagaaagatactagtgtttctctttctgcaaaccatctgcagaagttgcggttatcttttcaactgagtacaccactcgggaagacatttaaacctcaccaggttgctctagaatttaaccctttttttcccagtggaacactatggttctttccctgacttcattgagcaaatcaattttcaggtgttcctcaagttaaagcatgatgaaagcaaggttgagcatttatttgttgtaccaggctctgcaaggcagtttaaaattgttctagttgagtaccccatcccccagttagttacactcatctttttcagcttgttctatgttttcgagtgctacgtcatcatcagtttcctgtccatgcattacattatccagagactagttatatacagagcagtttctcaatgtggaaaggaatagctaggctatgtagcttggtttgctttagaacacatggccaccagcaccatttgaatttgatgtcagccatatttatatgaacactgttggtgaaagttgagatttgaagaaaaagactaccatgtgcatagcatatacattgaaataaggcaaaatttgctataggacacccgaaaatcgtgtaattggctgtgagacaccgcaaaatcttggctttgcccacggacactacgaaatttgtgaaattggctgtgagacaccgaaggcaatattttataatttttgaggcaaaagaggtcagataattttttaaaagaccaatctacccctgctcccagctgtccatctccctccccaacccgatttcccagtcctgaaccctaaccctaggcgacggcggtgc

SEQ ID NO: 5220 - DNA, 20392 bp, Oryza sativa
cgccggcaccggcggaggcagtttcggcgccagcgacggtgttgaggacggcgacgacggcggccgctgaagctgtgatgatgacgcagtaaatcgatccctgtggcaaacccgacgagtcctgacggcaagtgcgcggtctggcggtttcaagccgatagcggcggacggcggatctcagttgccaaatgaagggcacgttctctgcacagtcgtcagttaatcaactaattaagttgtcctttggtgacaaatatttcctggtgccatagaccaattagcatctgagtggattataacagtaggtgcatcgtcaccgtgcaggatcaaggaggaagaagcagccaaaggcagtaatggagcgcaggcggagaagacgagcgagagattttctctgtatggaacgcgctaggcacggccctattcgcgtctgtgcgcggcgaggcgcggtgcgcacatgccatgccggcatgccaattgcgcaggggtagattggtcttttagaaaattatctgacctcttttatctcggaaattataaaatattgcctccagtgtctcacagccaatttcacaactttcatagtgtccgtgggcaaagcccagattttgcggtgtctcacagccaattacacgattttcgagtgtcctgtagcaaattttgccttgaaataaacaactgatttatttatatatgtttcaacataatatagcggggatggatcttcctgtatttttcttggattcagcctgtatttgctactatacaaagacattctcatgttaccacagattataatatcatgggatttgtcagtaacaagtgttcctacgtgtctgttcaatttgtcataggactttcttggtttggtggagaaattctactacctttctggaagatatgacctggagcttgcagttggtgatgctgcaatggtatgtaaccatgttactggactctcattcccgttttgttgcccttgctgatttctttttgttctcaggagaattcatttctacgagcccttggccatattgaattggacctgcctgaggccccagaaaaagccccaaagcctccggcccaggctgttgatccattctcaaaatttggtccgaagaaggaaatatcgcacatattccgttcaccagagaagaggccacccaaggaactctcatttgcgtttacgggcctcacgcttctgcctattgttgggttcttgattggggtgggtcaacaactcctatgtgtgtttcttcatttctcctttgcagttttttttgtttagtctaacgtgtcactcttatgttgtctatgcttgtggcattcgtttgcagcttatgcgtctcggggtaaacttgaagaacttcccgtccttgccagcacccgcagcatttgcctcacttttccatgctggaattggagcagtgctgctgctctacgttctcttctggattaaggttagtaccgttcattgttggtaaagcataattgcattaacaaaggtttctgctggcgctgacattcattcttgttgtaatagctggatcttttcacaaccctgaagtacctcagcttccttggtgtcttccttgtgtttgtgggccatagggctctatcttacctttcctccacgtcagcgaaacagaagactgcttgagaggacgatccaaagaggagtattccgaatcacaaaattttcaagcgtcacaagttgcttaggttccttattttagcaccttcgctttgatattctgaccatttttcttgagcaacttcgagttacgagggacgagtcgatttcagttttgtgggggttaagaatactggagctagaatgtaggacctcaccttcttgtatgatgatgccctgatgtgttctcaatagacgtatgtttgatgatagaattaataatatcttattctgcaaatgcatagtatgccttttgcaaaaattgagttccatatgcagaatatgaacactcttaatcccgaggcccatatgatatcacgaacggtgacttcagaatttagatatgattaaactttgcacgggggcattcgcgtgctccatttcatcagaccatatggttctggaaacacaccttcgctgcaacctgcaacttcgaaaaataatgtctgtttatcgtgacacggtcacacaggtatacaaattgtaagtatacaatttgagaaataagtatacagtgtaatgctctatgcaaattgtcaaaactggagtaaactttccctgcagagtatataagttatgatttccgatggtcttgactctgatcagaatgcctatacatttgtattacaggttgcgcctgatgacatgtataactatttgacttctgtaaagaatcatttgcagttacaggttcccggatcctccatactaccgacccgttttatggtgggaaacaacttcttagtttgattagttatcatcatttgtaaactatccagtttcacctgtttggccaccacggtcagggtcactcgtaaagaatacaccaattactaagaactctccttgcctgccgttccacttgaaaaaaaatggtgtggagtagaccaatctctgtgaattcaggactaatcgagggcgtcgttttgtcgcctagctaatctggaatacaaaccatcgtgcttattaataagctcgctgtggtttccatcctgcataccacacaaaagaactttaagaaatctgaatgacatcatatcatgtgtatagtaggatcagattagttctggtttgcgttttcagtgaagcaacagcggccgaaaacatacctccacaatattaccattttccatcacgataattctatcagccgcttgaattgtagatagtctacaagagaaatgattgtgtcaactaaaatcttaaaattcaaaataaacaactgcagtatgagcatacattacctgtgagctatgatgatcacggttcttctagccttaggatcagtactaaactttgtgattacattctagcaaagcaggagggagcgaatcagcaagccgcccataggcacattgtatttatatctaggtacataattggtcaaatatcttgatgaagaggttaccttcacataatgttcactctcagcatcaagtgcactagtggcttcatctaataccaagatggatgggtccctaagaagggccctcgcaatagcaacgcgttgcttttggcctccactaagaagagcatcatcgacaatggtgttataaccatcagggagagacattatgaaatcgtgagcatatgcctgctttgcagcccactccacttcttcattgctaacttctcttggacaaccatacctaatattagaactaatatccattcggaatagcctaggttcctgcacacaccaatatatgtggctatttaatacaacaaaagttctagtggtagcagagccttgagttagatctgaacctgtccaacaaaaccaatcctttccctgaaccatctgatgtcaagctcactgagtgggacaccatctactaatatctgcattgatcacaaaacataacttcagaccagccaactggtttgctttgaagcgactgcatgcggtcatgtggcacagacaatagtttgacgcagaaattatcttacttgcccatctgtaggttcatatagccgaagtagtaggttaactacagtactctttccacttccactaagaccaacctttaaaagtttcatataaatgcagccagtttgttagtcagaaatgagaattcagaagtatgaaataattaaatcaactgtgttcttctacacaacacacacacatagggagagaactagaaagcaactgtgttctctatctcttacaattgcaactacttcatttggatgaagtgttagattcaatccacccagaattggtacctgttaaaaaaaaggagatcaataatataaggacacaaggtaacagaagattcctcttatttacataacaaatatgataattatgaaattgttctgctttagggttcactctactggttttcagtcaaaagtcaaatgaatattatggttagatcagctggatcataaacaggtattctttttttccctttttggtgggtgacaacaggcactcctcaacagagaagtatccataaaagcactgtaatcataccgtaggtcttgatggatatgaaaatgatacatcggcatactgaatccggccttccaacttctgtaacctgtggcctgcaatggtgacgtactttagatcactaaacaattttacaaccacaagtaaaaaaaaatcaactagccattctaaatcagacatcaggttacaacagtatcttgtaacatgcaatttattttcttgccttcagaactaagctgtctgctaggaagtagatccatcaaacggaagaccttttcacttgctccaacagactgcatcagagaggaccagttgtctccaatccaccatgttgacaaaattagccactcagcatagagtatgaattttgtcagttgctcagcagttagcttcccagccatgatggatatccctccaatcaacactgcaatgacctacacaaagcttatttgcaagaatacatcatcaacggtacaacaaattcatatcagaaccaggcattttatattttacaaaattgctaatttaaatatgttctgattggagtatcattatgaattgaacagaaacatcaaactacctgagtagaatggtatagatagttcaaactcaagctccagcctccataagccattgtttgccgaaagcttacatcatatagcttatctagccactttgcatatctatcagagtacaaggcatcgtgagattttgtttttgtgtgtatgtatgagcgtgtttgagatagagagagagagagagggaggtagagattgccttttaaactcctgcttttctgttccataaacccgtactgtccgaaccaaacttatcacctcttgagcaacctgatttagtttaatgtgaaaactgagatgaaaactttgccttatgaaatgctaccttcatccaaaaatataagggatttttcccatgggacagaggaagtagcttattgtaaagagtacaaacttacattgttggcacttgcagtgaactcctgtgcaaatttggctgctcttttctgatacctattaatcacagtatcataatgatttctctcgcatggatcacaggtgttaagcaacaaaataaaaacgtggtggtgcttccttgaactttcactactcaggtaatgtaatatgaaagacagctaacacagaaaagggagagacaatatacaaggtaaataagagtaggtttttaccgtccatgaactagcataatggtcgacaatgtcgcacaaatcaacatagtgcacattccaagtggccaagataagactagcagataaattagtgcgcctacaccctgaaataaagtgacaaaatggtacgtgagtttttgaagctactggttacattttcatacaagactactaaacaaccttttcacctgaagcaaattgcgtgagataagattaagatcattgccaatgactcgtgacacttgctggcagtcagaaccaagcctacttgtcaaatcaccaacagtttcttcatcaaaaaaagcaatgtcctagcataatttaaaatacagttaaaagcttcatacttgggtcaaccaaagtaaaacaacagaaaactttatgtacattaatgaaatttctttcagcagtaatattttttattccttttgttttacctgagaaagaatagaatcaaacagcatttctctcattcgtttgacctacggaaaattttcagatgatgaaggttagagactggtcaaacaaaggggcaatcgtgaggaataaacttggaaagttacattaagaaatctaacatggttttaccaatatcatgtttgcaacaccaaaacagcagcttcgcacaccactgcaaaattggataccagctagtaagcaaccacaattgatttttcacaaaaaaaaaaaaaaacatgcagaagacaaacaattttggtttcaatgcagattacggagtatcttgctaaatgcctatagtgcatttgacaggacactggtaaatgtagaaatttgtatttatgctaccctatagtgccatgagctaccaaatcgattcatcagcataatagaagattttcaatattcagacccattgaagctcaaagcatttccattcctgccctagatttggactaccaacacattatatgatattacattgtcaaccacaccatccatggaagtgatcttatggacctaaacgtctaacgaccttttcagttttcaccacaacaacaatgtgatcaggtacagttgtattgtggacagaaatacagaatgcatgcttgaaaatgcaggattaccaacttctttggtttttccgatgaatgcagcatcacctacttgttggcttctctaatgatcgcgttcacgacttaagcacagttttaacaaagcaaagaagcaataactgacctaaacactccggaaatcaaacacagaacaaccagaagcttagcgttccggtagaacacagcccctccgttctgcgccgagaagatggacgctgcgaggagatggggtatcgcgatctccgcgagctgcaaccacaaccacacgtcaccgcgttttagacccatcaacgagaactctgcagcagcagaggtcaaacccagaaatcgccattaccgcagcgccgacgagggacgcgaatccgacgaagacaacccatcggtcggaggcgacgagcgcccacatccgcctgagcgcggaggcggccgtggcgccgctggcctcggcgcggccgcccccggcctcctcgccgtcctcgaggcgccaccagcttcccccgggcagcacgttccgcagccgctcgatgaactccccggcgagggcgcgccgctgggccagcccgccgaactctcccccgatcgccgccgcggcgcggatcctcgtcggcctcgcccgccccggggccctcctcgtggccgacgccgaccgcagaagcagcgacggcgccctgggccccaccgccgccacgcccaccgacagcgccgccgagccggtggccgcggtgaggagcagcgccgccggagtcggcattctccactctcgtcaaaccccctctatccctcccctccacccccaccgcccgattcagattccgattccgcgttcgccggtgagagagtccgccgcctcggcgagcaccggcgaggtttaaataggcgtaggccgctgcgtcctcgccggagttggttgctctgccgtgcgcggcaccggcgccgtaacgtctctaccttctccggctaaattgtattttttccgcggcttttttaatcctttttctcttccacttttcgcgtgtgcttcttttttttttctttttcctaacgtgttttttttttgcgattttttctacgagaagaaatggatggaatgaggcgatgtggtgtggtggtggtattttgggggatttaaaacaattttctggaggagaataatcgtcgttggattttaggattggacacggagaaggattgaaagaacggcttcgtgcgtggtcgtggcattggaacatgaggtcggtgacacactgacacgggatgttagagaacaggtggtggtgccgtggtggtaggccctatatagactccatcgtttgtcatggagttgaggtagtgtttgtaaagtgctcccggttttaagctttaaagtagtgctactgttgttgtaaaaggtcaactaaccacttataaacgttgcagtatgggttagtataaaatattatctcgatcacaaaatatgaaaatataaccacatttaaatagattggatctatcgtactatgaatctagataggggatttgtatgattcacccgttcaaaggttgctatattttgaacgaacgaagaagtaatttaacatagagcatgatgatatatgtcacaccacaaacatttcagttcaaattttatcttcacgaggaaaaacaagttctaaagaaaagctggaattgaatgagcatgggggcatggtacgatgcatgggattcgatcttcgtcaagagcattttcttacaacatattccattcgtttcaatttgatcgtcacccataatagccctactcctattgatcagccaatatataagcgtggaactcgagcatagtggttgaggttagctgttgtaagctacgagattagaggtagcttgtattgtgttatctctgtttcttattggtggttccccactcttctcttgggccttgtatttctacactcaggtgccatcttatccaagtagaagtgtagaactaggatgcaaggatggatacgatccgagtggtcttggtcgggtcaaagtacgattgtattttttttctttatcggggactcctttattttctactacggactctaatataacatacttgtttccgtatatataggacttggaacatggtgctcccaccgaggtatgtacacgtatgtagaatatcctatatttaagaacagtaaaaaatattatgttgacgggtgatacccgtagaccggatataaagggtattggggtacgttggtacaaggatctacgtagtacgacatcaagcaaacaaaagacaagaattatactggttcaagagacaagaattatccagttgatgtgggattatatggtagaaaacacaggttacaaagagaacaagggaacttgtcggatccggcgagattgtagtcgagttgattcaactagctctcggtgacttggctcctcgtaagctccggcttcgtaggctgtggagattgtgttggctctgagattcaatgcctaaaccctccccggggggccccttttatatcgcagatctggaggtctccacatagaactcggagatatcagaccctatacgatacgccaacgacccagttctgcctaagtaggattcttcccatctgtagattccgtaaaaggtttccttagaatatacaggaaatatctgcatgcgcgtgggtatgccatatcgatatgtaacgtatatcgaagggtaaagggtatgcctaacccgtaaccttgacagtagcccccgacttctgcttaaaatgaactcgtgcaaccatttgcgacttcgggtgtcgagactattgtcattcccggtgcgaggaccgcggagatagaccgtagtcgagcacgccatttgaagcccaacggtcacgagcgaattttaaactgaagtccaaaaaactgccgcgcgtaacgggaccagaaatttccggcgggcatctctctctgttccctggaattcgcaccgtcggtagtgcgcctatttaaaggaattttgggaatccattttgaagtccgccaaatctgttaaacacacaccacctgcaagcactctttgccttctccgccgccgcaagaaaccctagttcatcaacctaggctcgttttccggcgaccttcgatcagcaacggacctcggcaaatcggcttccaccagtgcaacgttgaagaaactccaggaggatggcgctcttcctggccgtggaaccatggagagtgaagcaggaggtactaatcctcagcccatcttgggtcgcatggttgcgatcgaagattatgttctctgcggttttctccctcctccttccgaatttcttctcctggttttgaatttctatggtctttctcttctccatttgaaccccaattccatcgccttccttagcatctttgtgcatctttgcgaggcgtacatcggggtagagcctttccttgatctttttcgcttttactacgaactgcgttggatggaatccaacagggtatctggttgcgtcgggttccgacttcgggatggcctgaagtcgcgttacattcccttccagtgcccttcttctcgcagcaagtggaggaataggtggttttatcttgagatcaaggactcgaaccctgtcttcgtggttcccggagatcaaccggacaagattccgtcttggaccgccaagccccccttgaccccctctcttcagtcgtttattgacatcatcgacgatctccgagtacgggggtttttcgggatatgaagtcgttgcagacttcgttggtaggtggatccagccgcttcaggctcgggcccatccagcttataactattccgggccaaaggacgtgacccgagtttctcctcggggtatctttctcgcattcatcttgacatacttgtgttcgcattcctcttgacttatcgtaggatggttctcgattaacaggtctgagcggcgaaaccgtggagcgtcgcgtcggccaagtgatgatcagcgacccgaccacggcgagtgacatccctgtgcccctttgtgaaaagggggcagcagaacgtgatgaagccatcaacgtaagtatattcgatgaatatcccgcattctcctttcgaaatcactttatgacttgattgagcgtaggcccttcctttgactgatatcatcggaccgctcacggaccatcaggtggcgtcatctctgaaagtgaaggtcgtcaaggaggtatctgatgctgccaccactagcggtggcaatgttccaacaaagccgaggaaattctcgtctgtaagcggacaatgtcgcaaggtgtcgaccccctcggtaatttattttgttgttaaatcatgcagcaagaaggatttttccttactttgcgttgattgtattccaggcctcagatgcgtctcccccacctccacgacgacaacgcattgtgacgatcggcgagaagtaagtagatgaattcttgaatccccgcgcttcttatttgattgttgtctgactcgtggtcgtcctgtagggaggcgcgggcaaaggctgcgcaagccaagtccggaggagcttccagtgcgtcgcccgtcgtggcctcgacggatgtcgtgcccgcagccgggagccgggaggcgacgcctagtggccccgtcagcgaccccgcggcaggtcgtgatctaccagttgcagtcctcacctgggaggagctccaagtcgagatggggcgcctcctcgaagccggtgctcgcagcatcggccgcgaaattgcggaggcgaggtcggaagcggcgacggtgaacgtgcgtgctgacagactggtgcgcgagttggctgaagcccgtgaagacctcacgaagatgagggagttggcggctggcaacgagcgacaacggaaggggcttgaggaccgaatgtcggaactcgggaacaacctatctgagatctggggctcgttgagggtcacctacaccggccttcaccagctcgctggggaatgcggcgtcacgtccacgatcccggcgaatcccgatgagttttcgctgacctcctctctcgcggaactggcgacggcaatgggggaaatcccctccaagcatgcggccaggattgcggaggagacgtcaaacggaatctacaccggggcgtgtcatgtcctcgcgtgtgtaaggctgtcgcgtcctgaactcgatctgcgcgagatcttggaccagggggcggccagcgacatgcgtaaggaggtgatggaagaagtcggtgatctgggggagtctgttctccccctttttgaagagtaggacttcttgtatttcctagataatgtgtaaaactcgaactctgaccgcctttgtgagtgcgattactatcccggcttactttggtatgctgacctcgggaacttttgtcctcttgtagagatattgatgacgaggatgtccagcagcgcgggcagcccgagtcactggcagtaattccggtactcgagtttgaaccacacgtctcgcctgaccatgtggatcaaccccttgatatagagggaaggatggcgacgacttcctcaggttagtagtcccttcaccccttaatgcccatctgactaggtcagccatgttcccgaaagagatgtacagctcgacttagtgattatcacgtttagcagatctcgagggtgcccttgctagccaagatcgtcgtatccaatactggaagcgaagtttgaagtggcggagctcgagagaaccatgctggccgtgaagaaagagcaggctgtggaaacgctccgaggccgtgaggtatggtttaactcgtacttgaagagttgctgcacatccatggccagagtatgcagggagcttcgagtagtccgcggagatcccgatgagtcggcggccaggtacatctcgtggcttaatggggcctgtgcccaactcgatggaatcggtaagcgtatcgacgaggccttgaagcaggagtgtcgtcgatcgagccgatatgccggggggcatgtgttggcttgcctacgagatcatcgcccgcacctggacctcgaacatcttcgtgagggttttgctcgttctcggagggctccggcggagatagaccatctggcaaggtcaatgtcgttctcccatcttagcgacgaatctgcttagtgctgccatgcatccggttagcttttgtacctccttgagtcttgtaggcgacttcatgttctcgattgccttgatcttctcggggtttgcttctatccctctgccagagacaaggaatctgagcagcttgcccgacggtactccgaacatgcacttctcaggattgagcatgaggcgatatcgtcggaggttgtcgaacgtttcccgcatatcgtcaatcaatgagttgcctgtcttggttttgacaacgatgtcgtcgacgtaagcctcgacattgttgccaagctggttgctaagtgcgccctggaccgtgcgctggaaagtattcccagctgttatcagtccgaacggcatcttaacatagcaaaataccccaaatggcgtgatgaatgctgtcttctcttcgtcctcttttgccatgctgatttggtggtagccagagtaagcgtcgatgaagctcaataactcgcaaccggctgttgaatccaccagttggtctattcgaggaagtggaaagtgatccttggggcacgccttgttgaggtcggtgaagtcgacactcattctccattttccgttggccttccgcaccatgactggattggctagccactctggatgaagtacttctctgatgaagccagctttgagaagtttgtcgagctcttctcgtatggcttgttttcggtctggtgcaaatctccgcagtctttgctttactggcttggcatcgggtcgcaccatgagtttgggctcaatcacctccctggggacccccggcatgtcggacggccgccaagcgaacacgtcggcattgtcgcggaggaaggtgatgagtgcgagttcctatttctcgtttagtgtcgccctgatcttgacggtcttatcggggttggcactggagagtggaacaatcttgatggcgccgtctggtttcggcgtcttgtttgtcttggtcactttcttgggtggctcagtcgtggcgggtggactgggcgtttgctcgaccatgtcgaggctccgcttgtcacattgcaccgccagctttgcgttcccctgaatagtgattgttcccttcggtcccggcatcttaagcacttgatatgcataatgagatgcggccatgaacttcgcaagtgtagttctcccgatgatggtgttgtaagctgtatcgaattcagcaacatcaaaggtgatctgttctgtttggaagttgttggcttggccgaaagtcacgggcaacgtaatcttgcccaaaggtctggacgatgattggggagtaattccatggaagggttgatcagttggtgtcaactcgttttgtggaattcccatcgcgtccaaagtgctggcgaaaagaagattgattgagctgccaccgtcaatgagaactcgcgctaccttgatgttccgaatagtaggttcgaccacgatcggatatcgtcctgggataacggcggtcttggggtggtcttcttccgagaactctatcttctgctcagaccacttcatcttgggtgtagccccctgtcatgtcgaacagacttcatgttccactttcttgtattctcgcttggaggagtacgttgtggaaccgctgaagatgtgtgagacgtggaggtcggagtctggatacgctaagtccggttcgtgaggagccgtctcttcgttcgtctcgacaacgcgtactcgcttgcctttttcaaatgccatgtgcttctcgagcgactttttgaaaacaaggcaatcttccagagaatgtctgtccgtcttgtgtatggggcaccatgatttcgttgtgtcactgctttgtgggtctgggcgtttgggagggttcgcgtattctgctgcgaggacttccgcttgagctttccttttcccgtttttgcgatttttcttcttgcttgactcagatgtgtccatggctggtttcttctctcccccggtcttcggcctatcgttcttgcgtcttagcgcatcatcagcgtgggcgcatcgctcaacgatctcgaataatctccgagtggttgtgatgcgtcttgtcgccaactcctgggtagtgtagcgatctctgacaccggatttgaaggcgcgaattacagaagcatcgatgatttcaggaattgtgtttctgcactcgttgaaacatcgaacgtattccctcaatgattcactctagttctgtgtcaacgcgtgtaggtcgtcttcgatcgcgtggcgcttgtatgttccttggaaattggcgatgaattgttgccacaggtctgcccacgaagagattgagtagggaggaagatgcatcagccatgaacgtgcagaacccttcaacatggtcggtaaatagtttgctaacgcgttgtcgtctgcttcggcagcatagagtactgtggagtagacttgaagaaactcctctgggtcggtgctcccatcatacttttctattgctccgggtcagaatctctcaggccatcggacatcacgtaaggaacgaccgaaagccctacacccagcgttgggggcggtgggttgccggcggtcgtgtgtccttcgtggatgtctgtctgacgatgaggaggaggcggatgatgacgatgacgatgggtcgcttggttccggtgtacgattacgaggatgacggcctggatctcgacaatcctgtcgtcgtcttccgctgttgtctcggcgccgatctccatcgtcgtcgtcgatacggcggcgaccatgaccagtattgtctggcacccgtcgttcgcgatcgttgtgatcgtggtggttgtcgtggtcccggtcctcgtttgagcgatttcctcgatttccgttatcatggcgccgtgaagagacatgacgccgagagcgattcacgttgtctcgtgtgcgtcgtgcttcccggcggccgttgatttgatctcgaagatcgccagtgccgcgaggtggaggggtagcttgttgaggtgattccctccgttccggatcttcaccattggcctctccagttggtggctgctcctggtgtgctgcggtagcggcttcttcaaacgcgttgctgaggttagtcaccgattctcgtagacgttctgtccaacgctcgaggtcaacgttcagaacgggatcgtaaggagtttccctcagtatcgcttgaacggccctgatgtgctgggctggagtagtcgattgattccccgcttctgtgttggcgtgcgctgacgtgccaacgtcatcgatagccaatacctcccgcggcgcgctcgttgtcgatgacccatagtcctcaaggagatgtaagaccgatggttcgtgaggatcgatatcgattaccccaacgaatcaatctgaagttggagtcgctccttgttccttgccgttatccctgatggggatatatgacttaggagactgagctttcatggcgccgagaaagactttgcagctcgagaggacatgattctttgtcttgtgaataggacaatagacatcccgagttggagaagtacgctgaattccacgttctttgcaggcgcgaatttcagcacggacgttgaggaaaacccagcaatcttgcagggtgtgtttcttggttttgtggataggacaccaagaccttgtggcttcgtaagtcatctttgtcggctcgtggttcatgtcggaaggacaaggtttggccgtatcagaatccttcttgagcttggatgtcatcgatattccgttctccgtctcgacgggaggatttttcgacatggaatcgccttggttcgtagccactgcgttctcgtctccggtcattggaggaccggttgagatcggtgtcgtggtgtaaaccgggaagacgatttcgccgacttgagtccataccagcattgttgaagcagggagtacttggctgaggctggtgctgacgttgttgtcgacgaagctggatgacatagtagtagaaccttgagtaccaaggacccctacctggcgctccactgtcgacgggtgatacccgtagaccggatataaagggtattggggtacgttggtacaaggatctacgtagtacgacatcaagcaaacaaaagacaagaattatactggttcaagagacaagaattatccagttgatgtgggattatatggtagaaaacacaggttacaaagagaacaagggaacttgtcggatccggcgagattgtagtcgagttgattcgactagctctcggtgacttggctcctcataagctccggcttcgtaggctgtggaggtggtgttggctctgagattcgatgcctaaaccctcccggggggggcccttttatatcgcagatctggaggtctccacatagaactcggagatatcagacccagttctgcccgagtaggattcttcccatctgtagattccgtgaaaggttttcttagaatatacaggaaatatccgaatgcgcgtgggtatgccatatcgatatgtaacgtatatcgaagggtaaagggtatgcctaacccgtaaccctgacatattatttaaaagatattttacatgtatgatttacaaagtggatcatatataatagacttactaccgtaaacgtgtggatagccaaatgggtcgcccgactcggcccgagcacaaccaggccgaggctgagttcagtcaagtcggcacgacctgacctacacaccaggacgggccatgcccgtccaagtgttgcaccaacagcccatgaacgactagaaggcacgaaagcccaccatgctcctccttggaaaaagtctattttgtctccctgatctctttgggccaactctcatatggctcaaaataagtatattttgaatccctcatctctttgagccgtgtcgagccagcccatcgcgccgaggcagaggcccaagcacgacccaaaggtctggtcgggccaacaagggcctgactgcttgggccaggcccaaacccatgccattggccgagccgtcgggcctagggcgttttggtcaactatacttctttccacccgatgtactttgattttttttatttttaatatatttttgaaaataaactatttgaaaacttattttcagctctgaacctttttagcttgccattttaactgacatggtaggacaacgttttggcactttcaacagtggcgtatggtaatggcagtgaagggagaaaataaatcgcggatggcaatggccaaaagatttatttttaaaagtaagattttcatagggtttgttttaaaatttttagttaataatggttagaaaaaagatcgagctacttagccaagcctcataaattctgctctgttttctccctttagtgaatatactagtagcagctagcagagctcctgtttgtcttatgaaaaagaaaaaagaacagagaaacatccgcaaatgtaacatggcaagtttcggtgtgaaacgagttcaataggttaataaaaggaccaattggataaatttgacataagaacggttatggtcgtatactaaaccaagtgctagcccgttaattaatttggtcaaacgcatgcgtgtaagtactatgggaagatgctctctcaaaaaaaaagtacaacgagaagataagtttggtgataagccagctcaatgcatgcatacgaactttgatgccgaaaaaaaccttatcaaattgtcaaaattttggtatagtgactggcaggatttcttatatagtcacttttttgacaactttaccaaaatttgataaggttgaaaatggcatcaaagttaacaggcccgaaaattcccattagtggctctttactgaaccagtgtttttctaatgttgacttcttttcctcgactcaaaacgataacttcctcatttcttattactacatattctcgaactgctaaaatatacatcttatataaaaatcgttgtacataaaattttttaataaataaataaataatatttctaatatataatatttaatatgtaaacaatcatgcgctaatgatatgttccgtttgggagccacaaatagctctagccaaactacattcgaattaggactaacaaactttatatagcgaggttcacataggtcgactcaatctgtacgaatacaaacaggagctcatgcattcctacagaagagtgtcctagtctcttctctgatctctcttgtacatctgatcctctacatttttttaaaaaaaaaaagcagtgtaacttccggctcgaaaggagctccctagccgttgttgccgctgccttcccaaacatcttctccgccgatgccgctaatgttgttgtcaagctacggtggcggtggcggtggctctctctctctctctctctctgccgcccaacaacatcacgaagcagataaggtcaaaactcggccatcaaaatacaaattggattggactacgttggcttcgctgccatgtccaacattacttgtcatggttgcctaaagccctcatcactaggtgtgatgcaaaattgattcaatctggtcgtgcttgccatggccgttggaggatggttgttggctttgtttaaaactgagcatttgatgcttccttcctccatgtttcaaatagaaagtgtttcttccattcacctgatagaggcaaataaaggaggccaaagctccatcctgatggctacactttgatactatttggtctttgtcgttggtgaccatatgaggatgcatgctactcaggtggtgtcgtggcaacctccattttgatcgggaagattggtcagcgattgttgaaatcggtttagaagatccatctttgattttttttatggtagcagttaatttcttgtccatggtgcactcgctttaactagaaggtggtacagagtgcaagcaacaatgactccagggtgaaaaccttgagatgtaatctaaattcagcagtgtcagctcttgtttgtcatctcatcgttgaaggtgtcgtttgaagtgttggataaaaatccagccctatttttggatgacaatgtggtagacaggggccaagtcgttctcgaaggtgcttggatccgagtaggtgcataataccgaggtttgttttcgttacggaattgctaaaaaatcgtgcgatagtttttttcaaagaaatttgtcaacgcgctttaactagaaggtggtacagagtgcaagcaacaatgactccagggtgaaaaccttgagatgtgatctaaattcagcaatgtcagctcttgtttgtcatctcattgttgaaggtgtcgtttgaagtgttggataaaaatccagccctaaatcgatcccgccaccttcatttcactcaggtgtctcatttaccaccaagctagcattgtttttgtgttccaaacccagttacgtacaacttccagggtgtagttacaatgtaattgcttcgcaaaaaaaaagttacaatgtaactggggtgtagctagacatttttttgccttaaaatctgtttacagcgctataggtagacccttggtaatgtgtgttgagttgctccaagataatatatgtctgtcttcgccttcccccccccccccccccccattcccattacccaaaaaaagttgtatctcctagcttctcaccaactaaaatgcagatatcataatttgaatatggtagatggagttatattttcacgactttatcatcgcaccagtgatgttttccccttccgattgtccactcgatgcatatgccatgataagatccgctttccactttttctctgggggatgaataaaccttccatatatgtcccaatgtaaggtatagctatagctagaaaccatgcgcacgaacgaaattaagaaacgaacgcgcaagaggacagggcaccaatagt

SEQ ID NO: 5221 - DNA, 9064 bp, Oryza sativa
ttgccatggccgcccggccggcttgatgccgggcctggccggtacatcggctcgtggagccggagccgtggggcccgcttgccagccgtgcccccccccttgagccgctgccgagtgggcccgtgtaccagcgcccttcccctctctctccccgtgccgctgaccggtgggccccgcttgtcggcgccgcgccaccccgtgctgacgtcagccctggaatatattgcgcaataattaattaaggactttttctttattagtaaaaacacagtgaatcttctaaaattcataactaattcatccgagctccgtttaagtccattcaagtctcagtaaatcaagaaaaatgtgtagaatccattaaaaatggttttgtttcctgtttcagtagtcttatagcatgttttgcttgtgtgctttgtttgtcgcgtagatttcgcccgtttcgtcgatccgcagtttctcgaagacgttgctgtggttccatcagtgcgagagcaaggcaagtcatacattgcaattgatcatattgtacctaatttacaaatgtcccgcatttctattaaatattgcattgttttacaatatcatgtgggatgggtcctattactcagctatatgttgtttcccttatgccaatgataacttgggtattaaaatgactagatgttggtttaggagatgcttagccatgcttagttcaactagtgcacaaaaggggaccacattaaagcatagacttgattattggcaatagctttggattagtgccaccgcaatggtgttggctaattaaaatacactacatggtgggctgtgggtgcatggttttgctagacgtgcccatggcgattaaggaccggttcgcgggatgccctggaagaatttatcgtacttaccacaagccagcgtgggcaacggctgggcttgtagtgtagcttttctctagccgacgtacccaggcgagggtgggcgtgatggagttgggtcggccggggtgtccggttgatcggctgccggattcaccgcggcacgaaaggggggctgcccgttgcctgctggggacgggggcgaaccctaaggtgtggtgcgatcggttagagggggttatgcgaagggtcctgtcacggcctctttccggtatgtcgtggtggcatgtcggcgcacgggaacgtgtcgtggggctgtgtcttgtgggtacagttgtacacctctgatcagagtaaaactattcgaatagccgtgcccgcggttatgggcggtcgaccagattcaccgtgattagtttcaccctagttagcttttggaactggttaggtcaggtggtggtttgggcctgttgcaacgtggtgtaacgttggacagtgattggttaatatggattaattactacaactgttttactgctttcaactactgctttgaaatgccggctttatgcaaaagaacctttagcctcccttggatatatcttgcatcatacctcctcttccggtgtgacttgctgagtacagtgggtagtactcagtcttgctctcttttcccccacaccagagttgaagtccttctcagttgaagatgtctcgaagaggttggtttcgtcgctgccgtcaaggatgcctgtggaatggagtcgcccgctgcaggagtcaagtcttcaggcttagctcgcttttctctttttccgctgcatttgtaatcttttatatttttgtaagacgtggatctgtatgtcaacaattgtcgtttgtgtaccctggccggtcctggacaggggtttaatgcacattcagcttagaaattctggttcgtgaatttctgggcgtgacaatctcccaagacatggtgttgcctggtaaccggtgcttgcacttttcactccgtgcagcatctgataccgagttgaagatttcactctttgccttcatagaaacacttttacctaggtcatcttgcttacttaatgacaaggtgactgttgcggggcaattactatcaggggtcttccttgagcgatgcagagcatgtttctgtttatcaatcacctttcggcctacttctttcatgctggagaacgtctttgccaatctcttttatcaatcatctttcggcttatctctaacaggtggtattctttaatgtggattgcggacgcttctggggacgatgaggtcctttggcttgctgcctttccgtgaaaccttgatgtggttcgtcaaaaagctgcactgactaccttcaaggaaatacgttgcttgctatctgtatctatgccactagggtttaattgccgatgatcatctttagtgcttcctcgagatggggagcatccaaattgttcttctgccatatcacctttgacccttttctgatacctgatagactaattaccaaccatcgactactatgttctcaaatattgatgtctcctggatcttcttaactgtttgcaggtatatccgaacttatcaatgtagaggcatggcgggtacccttatgggtttcatccaacaatccttatcttgatctgtaaaaggcgtatccaaactcctatccccaactactgtctcattggctttttaacccaacacagtttaattggttttcttttccatcaacaggttggttattaactcgagtttataatatagttcttctgacacgagaccctaggtctccttgtcagtaaacaattatacatatgatcacatatccgcatcttccacaagaatcctcttagaacttgtctgtattacccatttctcccttattacacgaatacaaggcactgccttaaacaaaaagggaaggtgcttatcattggtacattgtatcctcaacatgaatcatccctaaacatagcaagctcattgtttaaaatcatgaatatatttgtttattacatgattgctgcatactttcgattacacaatgataagtagcaaactgaaaaccacaaacatggctgctcattttgattccggagagatatagctggcattgttctagtgactgcatcatccttgattggttctgtgatgatgtgataggactgcataatgctatcattcgcaggagaagcttccttctgattgctggttgaagcggatgacggttttctgcttggtatcgccctcctgaggttgattgccctttgcttggcctggagtaggtcggggagagacacaacttcttccatcgacgacaactctttgctgaggctgtcggtgcagagaatggttggtgctaaagatattattgctatgatttattgcagagttaggtggagcaggaggagcattggtgttgtggatgatatcgtcgatgttgctgttggagctgactagctgacgagacaatcgtagggtcgttcgttggatttctgcggtcttggtcaacaacacactgagttggcaatccttgggcacatgatttgtaccttcgcacagaaagcatgtgaccttgcgggtgggacactcccctggtggatggtcttcttcacaataagcgcagagtgtgagacacatgctagcaatgtgtccaatttctccacaacggatacatgcttttgattccatctcttcctcaccgagatgtcggggagactcatcttcatcatccgaggagacttgatctgacccttcactatcagatactctgccaccatggcttagaaggtgctgggtcaactgtcgtgcacctcggaaggtatttcctctttgacgtctaggaatagttatccctgcgggaggccattcggtgctgctaatagccatcttacgtacttcttcttcagttcgcatcggcgcttttctcttctgattcttactcttcttgcctttggcttgcttagtacgtgaccccacgtggtacgaagggctaggaggaaagcaattcccgggattcaatggattctctccattgggctctctactttgcacactaggctgcaagcttgacttggtgcgaggaggctggtttagcgatgtctgccctgttaaaccaaaggaaggggcttctttggcatatacccatggacaattcagggcatagtgtccttgttctctacaatcgtgacaaaaggggacatcctcttctggcattggaagctcattgacctgggtggcaaatgctcgatcaaacacatactgattttggtcttgacttccaaccaatggtagctgtgaactaagcggcatgcttggaatggaccaagggtgtgccctggttaactctcttgaggccagtggtggattgagttgaaaacttgagttactggaggcataccctctgacattctttcctttttctctgttaaacatctgttacagggattgaggtgagagaggaaacaagctaggaaagaatagaccagaactagggacaggaccttaaaggaactaactctctttgttgatgtgttgtttgtttcacttattctgcaagttgattaagcaaacaacctagcatggttacatcacaaccccccgatgcaaaccacgcgctacacacacaagcaaggaacacacgactaacaacactaccctacagggtggcttaggttctgcgacgggttctccaagatcttcactgcttcacagctggcttcactgcttcctccacttcgctagcggatcctgcagtcttccggagcttcggcgaacaattggcgacatcttcttcttcgcaaactaaccatctagtactagtggaaatccgaagaaggaagaagggagtaaaccttttgcaaatagcattaggggaaggagaaaaaaaaggaactttcgcaaatagttttatttataaaatatgtccttaggttttatccacttggcttatcctacagtcgagatggctctgataccatcttgtcgcgaccgggaaaattgccttttcccgaacaccagtgtattaatccccgtcccaggaaaagccgggtacaccacacaaacatggtataaaagacacatctttattatatcgataatatttacattattacaaaggtacttcaggcctgacaaacaaaaataaacagcagcggactagcgggcctacggctccatcttcacaggcgctcaactggggtataagccaggactccacctaagacttcttctccaaagcttctcttactgaaggggggaaaagattgagcaagaatgagtacaaccacagtactcagcaggccacaccggagatgcacaattaatgcaaaggagtacaaggggataataagataggggttaagttttgcagtaaacggcatttaaaagtcacttagttgcccaaagccattttataaagacgatcctagagctacacagtattattaatcaaggccgtgaacccacacgaacctgccttaacccaaggcctacgatgattcagaccgaactggcaacccgaccctgggtcccagctcgtcccaagccaacccaggccaaccattccacattttagttgttgagcaaattttaagaattaaaacactgacttgggtacattgctcggcttgcccataaccgagggcgcggctattcgaatagattatactctgatcagaggtgtacatctttacccacaagacacatcttcctcacgtgtaaccacgtgccacataccaccacggtatacggacggaagacgtgacatagttcccaacccatcctagccataaacaagagtaccgacccaatcctgcctacggccggaacccccgggacaggcaggcaggactgagccccaagcagcagggcaccaaccctctgccacgacatctcgactaccgggccgcagctcgtgtagccttcatttgccctggagaatgtccatcgacccccgacttcatccatctccaatccgtgtacttttgtttataaccagactgagccacaaactaagccttacccactagacatgtggaagtacggtagtgctttgcaacagaggcccgagcttaatccttatagtggccggggtgctacttcccacaactggcatgcacccaaaccccaccgaaaacaggttttaggggttttgaaaggggaagagaggtgtatgtccaattccaccataaaccaacaattccaaagtgtccaaatgatatgagaattcccaaagtctaaagttataaaatcacctaatgttgcctaattaaccagcgaagcatctacctaagttcatactagtggaaccataaatagagtacccactagttggggttttattttcctagggtgaacaaggtaataataacaatagcaataataatgtcttaacaacgataaataggcatggctaaataaaacagtgataacgcgggaatttaaataaagcggtaatgcaataatttaaatcaaaataattttataaactgtgattcaatatgctcaaggatgatgtgacttgccttgctcgctttcccaaacaccggcttcaacttccacgaagagcggatcttccgaagctgcagcgtctacacgactaacggaaaagaaacggcttttactctaataaactccacataacagcagaaacaaagcacaaaaatgggttcttgacttcttaaggaaaaattagagacttgaacggtccaattccgagttcaaatggccaagatatagccatttgaagtttatatgctctttaaatggatatttacgaatttcttcatttaaattttaattaaaaactcatttattgcgtcagccgggagagagggcgcgcggaccgggtccacgggagtggggcccacgcgtcagcctctcggtccacggtggaccgggtgcacgcggctgacggcggccggcgccgtgggtcccacgcgtcagccgcacccgcgggcgcgggcggctgacggccgggccccacctggcagccgcggggcgcgcccgaaggcggcctcgccggcacggccgacgggagacggcgcgcccgcgccccgatggtcaccgccggcgaccaccggcgcggcggagcggcgcccgagagagcggagaagagagggaagcgaaaggggcggtccacggttcaccccgggacgacgaggacggcggaaacgacgaccggagtggaggaaagcggcggcgcggttcgggacggcgaggacgacggtgctccggcggtcggcgggcgaaacggaggagcggacgaggtcgacgacgacgcggcgaagccgatggaggtgacgccgagacgggaggaagtccggggcgacgacggcggcgaaccggagctcggcggcgacggcggagagagaggaggacggcgcgagcacgaatccgacggggagagcgagcggcgagcggcggaaacggaggagagaggcacggggaacaattatatagcgccgggagggagagagagaggccggaggggaaggaaacggccgcggcgatctcgggcgccattgatgccggcgaggtttaggggaaagattccgagcgaatccgagggagagagagagggaaaagcggggggaaacggagagggaatcacggggagtgatttccccctctttaatgcgcgcggggatggcgggatgcggcggaatccgcggcggcggcggcgctagggcacgggcgggcggcgggagcggcgcgagaaaggcgatgacaggtgggccccacccgtcagcgagggtggcgggcgggcccgcctgtcagcggcgcgcgcgcgggggaggggccgagtgggccgcggggaggagagagagggaaagagcgaggtgggccgagccggcccaagagaggaagggggggaaagaagacttcttttagggtttttctttttataaacctttttaactttgtttatttcttaataattattatttgtgctctgaaaattccactaaaatttgagggctctttttagaccaaggagaatttaacaaaaattctccgggccacatttgaatttttcttgtacgtattttagtgtttgccaatttcttttcgaattttaattaattctattattccttttagcgaatgatttttaattcgggatgaatttatcaggacgtgacaaatccaccccccttataagaatctcgtccccgagattcgaggaggctagcaagaagataggttgggcggtcttctcttcttgtccgacttcttccgtcgcatcttttataacgaacttgcctaacaaaacttctccactctggactgcttggctcaatctcctgttgcagatggagtcttctcttcacctgacttttccctggttgcacctctagctgacttcgactggattgtggcacttgaagatggggcttcagttccagaactttgcatagttcatatctttggagtcaacctcatacaagttacccacttcatgtcatgcgtcgagatcagctcgtcattactaagataccatgcttgtcatttgcttctaactcgccaccaactgcctcatattagctttcctggtctccgggtgatagctacttctgctatttgatgcaagggtcgataactttgcctttgaattatgcttcccaagagaaccaacttatcccactggacatgctttgacgtcttcccaaatggctttactgctggacttcttattgtctggtcgttatccggccaaatttgaagcttcgttgttagatgtgattttactctgacctctgtagactatcttcgaacatatcacttgtttcataactgggaatagctcccacgaacaagcaactcagattcactttctttatgttcagtttactttccgctattctcttcatgttgtcatcatttagcattcaacgtattcctgtgcaccttcagccttgatgtgttctttcccattggatcatctctgtcacgccctgaagttcccctcccttgctctaaattcataaaataaatcgtccgaagaaattgtttaatttaacctagagagaaaccctaaagtaataaatgcaaataataatcggaatcggcatgtggaatttttcttggattctacatgtcaaaatatgctaacaggatttttagtggaattttcagagccctagaaataattttaaccaattaaaaatcaccaa

SEQ ID NO: 5222 - DNA, 18346 bp, Oryza sativa
ttcggctactgtgatgccatgctagccatcccaaggtgccaatgcctcgatgggttcgagcctgacaccaccaactcttcgagaggatgccgaagaaagcaacagttgagatgcggagatgggaatcattttgtgaccatgtccggaatgaaggtccctgacaagttcattcctgtcccaaacagaagctttgatgagtgcacggctgagtgcaaccgcaactgctcgtgcacggcttatgcttatgcaaacttgaccatagccggcaccacggcagaccaatcaaggtgcttgctttggactggggagctagtcgacacggggaggactggttttggtgatggtcagaacctgtacctccggttggcctactctcctggtatgcccaccttttttcccctgcagttgcaatataactcttagggcatccacaatgtactacaaaagtagtccatagggaataaactattccattcagtcatctagtaatattgtgcaactagtctatataaagaaaatagcaaaaggtatccatatgcatatggactacccatatgacataaataatattatctatctctacttctctctcttctcctaatgtcacattgtatccatatacattgtgaggattgctataggtaaagtttatttatgtggatcccatctatatagactacttttgccatatacattgatgatacccttagatagcttgtacatggaattctgagaaaaaaaatcacttttcttgatagggtacacttctgaagccaacaaaaagaacaaaaaagtagtgaaggttgtagtcccaattatagcatgcctgctgacattcacatccatataccttgtcaggaagtggcaaacaaaaggtacagtgagggtcaatactcaatactaactaacactatgcagtcttcctgtaactactgaccgataatgatgttcttattaggcaaacagagaaatgacgaaaataagaagagaacagtgttaggaaactttacaacttctcacgaactttttgagcagaaggtagaatttccaaatattaattttgaagaggttgctactgcaacaaacaatttcagtgattccaacatgcttggcaaaggaggttttggtaaggtttataaggtaacaatttacactaagagttgtagcagtggacaagccttataatttttatcctgttaaaataattttactatacaggggaagttggaaggaggcaaagaagttgctgtcaaaagactcggtacaggttccacacagggggtagagcattttacaaatgaagtggttcttattgccaaattgcagcacaaaaatctagtcaggcttcttggttgctgcattcatggagaagagaagcttcttatttatgaatacttaccaaacagaagcctggattacttcctttttggtatgtaataattatatattctctttttacctttttcacttttggtgggagaggccgagagggttcccaaagcctgaacaacaataagtttcctttcataatgtccgtcgtagatgattcaaaaaagtctatgcttgattggcgaacacggttcaacataatcaaaggagtagctagaggacttgtttatctccaccaagactcaaggatgacaataattcacagagatctcaaagccagcaacattttattggatgaggagatgagccccaaaatatcagattttggtatggcgagaatctttggtagcaaccagcatcaagcaaacactaagcatgtagtcgggacatagtgagtaactcttcaactacctgtgtataaaatacaaacttctatatacttgaacgcattcaaactacttacactcagttggtgacatgatttaaacagtggttacatgtcacctgaatatgcgatggaaggcatcttctctgtcaagtctgacacctacagctttggtgttttagtcttggagcttataagtggctctaagatcagctcacctcatctgacaatggattttccaaaccttatagcccgtgtaagttgtatgacatatagtgcacaaagtttcaacagctaaagttttgcactaattagaaactctcttctctttgttcaggcctggagcttgtggaaagatggaaatgcagaggattttgtggactcaattattctggaaagctatgcaattagcgagtttttgctctgtatccacttaggactgttatgtgtccaggaagacccaagtgctagaccattcatgtcatcagttgtggccatgttagagaatgagaccacagcacgtcctactccaaagcaacctgcatatttcgtgccaaggaattatatggccgaagggacgagacaggacgccaacaaatctgtaaacagcatgagccttaccacactacaggggcgttagaagtttggattcagaatcaacttgttgcagaattcatcacttgatctgatcatatgattgtccctctttaatttcagaatgagctggttatagaattaaccgctacggaatgaaatttacaggaaacaaaattgtcccagtgaaaatgtgattgctctttgggtcattgggcttatgaattatcattcatattcaacagttttcggatattatggccttgtttagttctcaaaaacatctcatcgaatctttggacacatatatggagcattaaatatagataaaaagaaaaattaattgcatagtttacatgtaaatcacgagacaaatcttttgagcctaattaggtcatgattagccgtaagtgctacagtaacccacatgtgctaatgatggattaattaggctcaaaagattcgtctcacagtttccaggcgagttatgaaattagttttttcatttgtgtccgaaaaccacttccgacatccggtcaaacgtccgatgtgacacccaaaaattttcatttcaccaactaaacacgccctatatgttttacgaaaagaaaaaggtaaaatcctttcgtcgtcaaatttcactaaattattggaactggaaggttgggtacctgggtgcatttttgcaatttgcactaggcgataaaaaaacgaagaatacgaatccgcatctatgtgattcatcactgttttaatcagtagtagtactagtacctgcactcgaggggcgttgaaatggcacgcctgaacctgaacctcctcggcgaaaccacgtcacgaccggaggttgcgcgtctgcttcggttccccctcagccgccgccggcggctgcgccgccgccgcttgcccaacagcgcgtcagcactagcggttcctctttttgccgggtcggccgaaggaaccggcgaccaattttattaagattaggaggaataaaatcaaagtacaagtagttttcgcttgcaacgacaggtgtcgaattagactgtggcaggaaccacagcccggcaaactaaagaactggaacgtcaacacaacagaaagaaaactaagaactgcaattctcgaaatagcctgcttctttccacactaagatctcttctttgatagcctctgctaactggttagggcttctcgatctttggtcgaaaacacgcgcatttctttccttccaaatctaccagcaaatcagcatacaagcgctgtcgaagtttgtcctgtagcacttccgaaaatatgttctggcctgcaaccaccactctgtcaggcatgtgttctcgctcccagggatggggaagtaagcgctagctgatccattgccgcatccactagcggttcctctcctaggctgcaaggctgcaaagcctccaccacctcgcggcgtaccactgccatcgcagtggcggacgaaccaaccccaggaggtccgcgactccgccccgccgcggtctcggtgccctctactccggtggctccggcgggcggcggccgaacacctaactggggtagaggcgcattcggcggcttcggaccatctcgagcacctatggcccaaacccatcagtgggggcctgtgttggcaggaggtgaggcaaagcaggccggcccaagtcggtgaaagctcgttgatggactaatgggcctcaatgaggcctccgcccgccggagtcagcccatccgtggagtaagagcccaccgagccggcactggggcggcccacccgaggaggcgatccgccactgcaagccgacggcgcgggcgaagtggcggagatgttgccgacgatggcgcggcgaggcgggagagcgagcggccgccggccaggacggggaggccggatcgaggatgcaggcggtggcggttgcgcgagctcacggagcaggccaggttccggacaccccccccctcccccccaaacctccgatttttcgatgcggattgagttgatccgactccgtgcggcacggccattcgcgagtcgcgacatcatccgctgcacgggcgcgccggagaggagggagagcgtgtggcgagcggcggcgcgtccagggtgcagacggtatgaacccagcacgggcaggcatgattttaactaatttttcgacccaagcctccaatttttggttctaggttgggcatctggggatggctgattcatgcatgagtcaagcccgtgaggtagagcggggattggaaccacccgccacacataaacatagaccccaagcgctgctggagcacttcgccttggatagattcttccatccttaattagatgacctttcaaatacctgctcaatatatttcacaaaagaaaagacgcatggcaaatgatcacttgtgtggatctctaatcattattctgttagaggagtatctattcaatttttgaacataaattagctcttcctaatatattgatagagcaaagcagatgagaaaaaaacaagtagcacaagcgcacaaccacctacggaatgcattctttccaatatctttcagttcattgtttactactccctccgtttcacaatgtaagtcattctagcatttcccacattcatattgatgttaataaatctagacatatatatctatttagattcattaacatctatatgaatatgaaaaatgctagaatgacttacattgtgaaacggagaaagtattccgtactaatgtactatacaaccatccatctgtttagagcttatgctaaaacatttattcagcggccttctagtatagtcagactcacattattaacagatttatctgagtattctcttggttcttctgattcataatgcctctgcacaaaatatataggttgtgttggaattgggtgtggcatgtcctcgttctccagcatagacacaacgaatgacatcagtggcctagcatttgggctgtcctgaacacacatgagtccaatatggatgcatttaaaaacttcgctgagggaacagctctccaaaattgatttgtccacaaaatccctttgtcttccatctttccataagttccatgcctgaaacaagagaataacttcaatatttgttctggcaatgttatgtttgttctttgattgttaaattttgaagcattgggtaccggcaacacttacgtaagctataaggtttggaaaatccatcacaagatgatgaggtgagctgatctttaatccacttacaatttctagaagcaaaataccaaagctatatgtgtcggacttgactgaaaaggtgccttccattgcatattcaggtgacatgtaaccactatttgaataagaaagaagtttaataatttccagaacctgggtatttgaataattttggttggcaagagcagaagttacttactatgtcccaacaactcgtctagtactttcttgttgctcattgcctccaaatatcctcgccataccaaaatccgatattttggggttcatctctccatcgagcagtatgttgcttgctttgagatctctatgaattatcttcattcttgaatcttgatggagataaagaagtcctcttgctacccctttgataatgttgaaccttgtcagccaatcaagtgtagcctctgttgtatgatctgcccagaacacagttaggatagtagaatcaaacaaataattaaccaagcaagagtatttctttggattggtcgaacatactgaaaaggaatttatctaagcttttgttgggcaagtattcgtaaataagcagcttctcatctccatgaatacagcaaccaagaagtctaactaagtttttgtgttgcagtttggcaataagaaccagttcatttctgaactgctccatcccttgctcagaacacttgctgagccttttaacagcaatttccttgccatcctccaatgttccctgtgtgatttcatcattattaaagtaataggagtaaatgacatcgctattcctcatatcattgacagaatgacaaggtaaaattatatatcaccttatatactttgccaaaacctccttttccaagcatgttggtgtcatggaaactgtctgttgcagcagtgatgtcttcaaagctaatacatggaaattccagattttgatcccacaaatcatgaatagtgctcaactgttgaatgacaggtcttttcgttttttccttgttttgtcggacgccttatagtaaaatcaacaatgtcaatacttacagttactgacaagatatatgcacgctttgcaattaagcaggtcctactgcttatagtacctcttgacttgcatttactgacaagatatatgcacgctgtgagtattagtaggcacactatagctgggagtacaatatttaccaccatgtgcctcttcttctttctgtttactgtagaatttgaccctgtgaagaatgtgggtgaacagaagttacagcgtcaaacatacagtagcttgcaagcttgtgggagatagtaacctggtggtcgtgttcaaaaacaggcatgctaaatttagactaccaccttcactagattcttttttctttctgttgagtttgaagtgtgtcctatcaacacaagtgaacaaaattcaggactgctaatctaagagctattctatcgtcgcaggggaaaaagggtgggcataccagtagaatcggccaaccggaggtacaggttctcagcaatggtgttcctgatgtccctccacgcgtcggcaagctcccctgtccaaagcaaacaccttggctggttggacatggtgccggttgcggtcaagttggtgtaggcgtaggccgtgcacgagcagttgcgggtacactcgtccgtgcactcgtcgaagtttctgttctggacatgcaagaacttgtcaggaaccttcattctagacatgatcacaaaatggtcatctccacatctcaattgttgctttctccggcatcctgaagaagaattggagccaacaggctcaaacccatcgaggcattggcaacttgggacggccgacgtgaggtcgcagtagccgaatgggccacacgagccataggtatcgcagccaggggcccttgggagttgatttgcgacagtccatgaggacaagctgctgttccaactcatgaacctaaagttgcccatgtagtcaatcatgacgcgcgtgtatggtgaatcatcagagattgtgtacttgaggtaaaactcatccttagtgttcacgactgttttatagacaaaagaggtgctgttgtgcaagtatgttgcaccggacaccgagacactatcaaacagaatgaaacggtaatatggccttgtctcgtgccagatgaagatctgaaagtttgacgtgggatcgccgctgaaggagaaatccccggtggatgggtcatctgggcccttccaagcgatgaaccgcatggcgacttgtccgtaggatctcactaaaaacttcatgttgggcagaatggtatcagttggttgatcaaagctttgccatatggttgtattgttcgatagccgaagaaccaaatttcctgagtcgagcagcaccgcgtaaactccgtcgtcttcggtgacaatactgttgggacttgccatcgtcgtccatagggtgcggcctttggaatctgacaatacaagagcagaattgttgctgatggagagcgtcgcggatgaagatgcagcgatcgggtcgtcgcggttggcaacccaaacataggtgcgctcggagatattgtgataccatataccaaggaataagctctggttggaggtggccggggagaagaatccgagcgcaaagtctccacctttggagatgagcatgtcgctaggagagattagtcgcttcgcatgtctcaactggtcatcgcatctgcagaaagagattagtagtagcaagtggatgaaaactgggaggttgtggctcaggcaggccatatttgttctgccttgtttcttcgcttagctgcgagcctgcgaagcacgaagcacacagaaatatacattgttatcattcagtatatatgttactgacgtacgtatacattgtttccagaatcttgagaccgaaggaactaggaagcgacgtgtatgcagatacttttttgtccgtcatatcgggatgaaacacaaaggaaattaggaaaacctgtacgttcaaaaacctactagacagaaaaacccagcacaacaggctgcgttctcaacagattacggattactaacgacggatgaaaatgactttattgactataaatcgagagtacaaacggaaaatattaaaaagttgccgtgcaaactaaaactttagaaataaaatatgaaccaaagtataatttgctctgggcaattaaaaggctgactagcagctgagtccatagacgagcaaggtggtgcaacctgcaaagaaggcttaccgtgatgatacgtggccgcgcattatcttctcatccatcagcccttttctcggcttaccgtgatacagggcagagcatcttcatggccatggtaaaaagagatgcatggcagataagtgaggataccgtacgttgcccttgaccccaagaaaaggatatcgtaataggatggcatcaccataaatgtcatgctgtttattcttagaaaatgcagttaaaggagaattctatggtttatcattgacaaacgctcgaatctggtttctcattagggaacatgagtcgtacagtgtatatgcaatcctactattgttttcctttccttaaccagatttattgtacctagacagggtgggtcgaccgatccagctacacaatgacgaagccaggatttagagataggggtggtggcacgagacgtaagaactcatcaacgcctcggtagacaatgatgtgaatcttggtggcttaaatcctgcagagtggcagattggcctcacgcccagtcgacttttgttcgctctaatatacgtagtcgcccctcgtataattatattttgaattttgtggttatttgtcgtttgcactaatatatacataaaatgattgttgatatgattttttttatatatttcaacacattcttctagattcatatataaaattgaacttattttaggatggagagtgtatgtccgagtctgaatgtactttaggggctgttcagatttatgccatttttagccataccattttttgggtaaagttgttaaaaaagtgcctacgtttagtttgttgccaaactttggtaaatacataagaaatcctgccaaaattttgggaatattatcaacttgccgccaatgccaaaatttggtaaggtttattttggctacaatcagaacatacccttaatatagcataaaaagaaccaattttaaactatgtcactaaatagcaccaactttactcaatacttgaatgacacgacatcatttctattcatcctttttagttttggagacttgcaaccacatcgctttgatatgttaattaactcaggtggacagctagatataggctcaacttgcaactaattaatgagctaattgtatggattagatggataatcacccgaggtttgcatgcagcgcatgcatggggatgggggtgggggtgggggtgccaggtacttcggcactgcagctacgacctgtgtcggcctacatttccaagaccccctacctctttatagtagtcatttttttcaaacctcagttttataaagaggtccatcgcagcgaaatttaaccgtcgatactcgatcgaacggtgggggaggagagaaaggagacacgtggcatattttcagaggcgcaaaacttgatttctgagacgccacgtggcccaatctttggctagggttagaaccctataatcggtattagagattagataggcactgcacctttgagaggtgtgcaagttcaacagagacctgccgcgcttcttcccttgatgccgtctgctccctgcttaaccgccaccgcctgcatcctcgatccggcctccacgtcctggccggcggccgctcgctctcctgcctcgccgcgccttcgcctgcaacatctccgccacctcagtagcggatcgggaattcgggaggaacggcctccacctcggatgggccgccccagtgccggctcggtggcctctactctacggctgggctggctccggcgggcctataattagtccatcaacgatcctgtgatttaatccatgaagcctataaggaaatgaacgagcaccacctccagcatcatcgagatgggccgagtatttacagcccaactctaccattgactacctgctgaggaaataagttcactttaggtccctctatttgtcggtcagtccgattttcgtcccttgaccgcaagaccgggtacgacccgtcccccaacttacgaaaccgggtaaacgaggtccctcggcagtatggagggcggttttggccgacgtggctcctttgactaggtcttcatcccacgtggcgttgacgtggcgcttacgtggtaattttatcccgaaaaaataataaaaaccgtaggacccacatgtcagatacatgtaaaaataatttaaaaaggtagtgcccatgtggtcctacatgtcagcctccctcttctctctatcccctctctccctctcccatacactgcaagcctgcaaggagaagggcgagcggtggcggacggtggccttgctcccggtctccgcgggcgccgccaacgacatcggcgctagggctgtcaacgagccgagctcgagcgagcttgcctgcctatgctcgagctcgatataagctcgaactaagcctgtttgagctcgatcaagctcgagctcgactatcgagctcgatttttaattagaacaatgtatatttcaaaggataatttttaaaaaaatttaatttattgtttatcatattagtataagaggaaaaagaataaaataaacatacgatgctaatacaaggcatacaaataacatatttgatctaccaatttattaaatagcaataaaaaatcatatattactaggctcgttagaagctcgagctcggctcgacaaagctcacgagctttgggacagctcgggctcggctcgtttggagctcgagccgagctcgaatcgagcctaggacgagtcgagctcgagcagctcgcgagtctcgagcttttttgacagccctaatggccgcggtggcggcggcaacgtgtgacgacaccgtcggggagtgcgacgtggacgatgaggaggaggtggaggagatggcgttgatgggggcggccggcgccgccgccggggagaccggttgtcgcacgttgcagcggaggctgctcgattacctcgccgcgcgccccgagtggcggaggtccggcgggagggaccacgtcgtgctcgcgcaccaccccaacgggatgctcgacgcgcgctacaagctctggccatgcgtcttcgtgctctgcgacttcgggaggtacccgcccagcgtcgttggcctcgacaaggacgtcatcgcgccgtaccggcacgtcgtccccaacttcgctggccaacgactccgccggctacgatgaccggccgacgctgctctacttccagggcgccatttacaggaaagatgtgaatgccttgttacttactgtactctttaaaagattcttaggttcaggccaataatataatgcatgctaccactttggcttgtatagatcgagctgagagagaaactgaagattttttttggcagcagtagcagttgctcacgtacgctttggatagagtcgatatgtacatacacatatgagagcagcgtattcactgccgccgccggcaacggcagtgacgccggcgaaggaagagggagatcagttggtgttgcgagcgcatcgggtgatggcggagcagccgcggcggtaggggttgccggccttctgtgaggcgcagttctggtagtaggactgaccgcgcttattgcacgacaccttgttggcgtccagcaccgcgtagctcacctaccagttcgtcggccgccgcatcagcgtctccccggcggcggcggcggcggccgcccccatcaacgccatctcctccacctcctcctcgtcgtccacgtcgcactccctgacggcgccgtcgcacgtctccaccgccgccgccatctgccaccgccccgacgccaccacgcccatgtcgtcggtagcgcccgcggccaggagcaacgtccaccgcccgccgccgctcgtccttctccttcagcgtaagggagagggagagaggggatagagaggaggaggctgacatgtggaaccacatggccccaccttttttaattatttttatatgtagctgacatgtagccatatgggttctacggtttttattattttttgggataaaattgccacgtaagcgccaccttaacactatgtgggatgaagatctagttaaaggagccacgtaggcgccacgtcggcaaaaaccgtcctctatactgccaagggatctcgtttgtccggttttcgtaagttggggaatgggtcgtatccggttttgcggccaagagacgaaaatcggaccaaccgacaaatagagggacctaaagtgaacttattccacctgctgagtgctgagcaagagcatgagattacttcgccatggcaaggacaaaagcatatctgcatatgccgcgaggtttcgctgccgtcgacttttctcgatctctatcgagagttcagttttgtagcgatagtttatcttttcggcttttgacggaagaaaataggtctcggcgacagattgttcttttttttttcttcaccagatttttgtcacatgttatttactcccacgctcgatcttcttttttttcaaatagtttggatcatttattctaagctatttgttctatgtaaaataatctattttaatagcccgtgcaaaaatcatatgtgttgtctcagttttccaaatatgtgtttatagaggtgagtgtgtgaacgttatactgtgttttaaaaaaacatatatattgtaggccagctatttgctctaaactattttgtgttaagctacctgtactaagttattttgtttttttaatgtttcttaacgaaaaatgaggtatgtaactaggacttcccatgaggtctcgtcaactatagacttgttggctgacgggtggttagtacagcgctaccgatgccatgaaatggaatttggttaatcgtggagtgaggtcgatgtcatgacgcagatcatcaacgtgccgcgttcaactctcagatcattttggtcttctggcttatttggaaacaacgttaatgcaaaaatcttccaatctgaatccaatacgcctctggagtctggaggttagaagatcaagaaggaattttgcgtctcgcctgactgctgatttctatttttttttgagcggaacatatattccatttacttattactgatacggccaaatcgccctgattgctgatttctttgtttcataccggtttgataatacttttcgttttggataagggcacggtctctaaaaaacaactttgaccattatttttcattataatatgtataaaattgttaacaaatatacgattatattaaagtactttttaagactaatctatacatatagtcaccatatttaaaagacaaatattttaaaaatgatttataatcaaagattataaagtttgactacacccttatccaaaacgacaagtattatcagcctggagggagtagtaaactttcagaaattaactagagatttctccttttgctgtaaccgtttttaacaggatctattgtacttgttggcagccttgttttattagttacagttgtactgttctggccaggttcttttgccgtcccgggaaaggtaaaaaaggaaaaaggaaaaaaaaataacagtataacggtttcgctctcgttgattttctcgtcgtatccgaacttcgttttcgctttgcgcgtgcatcctgatctggaaggacagaaatgtcttggccgtatgtttgctttcttcggtccaaccatgctctaagactatgggaaatcatctagtatgcatctgataattggatacatatgctctatttcttcacatttacatttttgaaggcaactaggaaacagaagaacaagacctaatgagatttagagccaaagtatggaaggaaaaggaagatgaatgcaagaaccttggtggttggtgtggcaggaacggaacagaagaatttccaacaccaaagccagagggagaagcaaaagtagctgcccaattgtgcaggagttaaatcagatagagcttagcagagcttagcctggtaatttcaagagctacgagagcagttctcctttttatcagatgtacatcttcttttccagttgcctcgcctctcctcgggctcttcttttgtaagactctgtgtctttttaatcgcataatctaattttgattttgcagagctcctgccttgcttgtccaaaaaagaagaacaagggccagatgaatatggcctacctcccagttctcatctacttgctgctcatctctttctgcaaatgcgatgatcagctgacacaggtaaatcgattgatctcccccagcggcaagctcgtctccaagagcggcgtctttgcactcggtttcttctccccagccacttccaaccagagcttattcctcggcatatggtataacaacatcccagagcgaacatacgtttgggttgctaaccgtgacaacccaatcaccacaccttcatcagcgatgctcgccatcagcaatagttctgaccttgtattgtcagattccaaaggtcgcaccgtctggacgacaatggcaaatgtcaccggaggtgacggagcttatgcagtgctgctcgactcaggaaacttggttctccggctgtcaaacaatgtaaccatatggcaaagtttcgatcacccaactgacaccattctgtcgaacatgaagattctgctgaggtacaaggagcaagtaggcatgcggcttgtagcttggaagggccttgatgatccaacaacgggggacttctcatgcagcggagaccccagctcagaccttcaggtcttcgtctggcacgggaccaagccatattaccgctccattgtgcttgacagtgtgtgggtgtccggcaaagcatatggcagcagcacctccttcatgtaccaaacatatgtaaacacacaggatgagttctatgttatctacaccacctctgatggctcaccatacatgcgcatcatgcttgactacacgggcaccttcaggctcctgagttggaacgtcaactcgtcatcatgggcaatctattctcaacgcccagcagccattggcgattgtgatccctacggctcgtgtggcccattcggttactgtgacttcacgtcggtcatcccaagatgccagtgcccggatggatttgagcctaacggctccaactcttcaagtggatgccggagaaagcaacaattaagatgtggagaagggaaccatttcatgaccatgcctggaatgaagctccctgacaagttcttttatgtccaggacagaagctttgaggagtgcgcggctgagtgtagccgaaactgctcatgcacggcctatgcttacaccaacttgaccataaccggctctcccggtaccacagccagccagtcaaggtgcttgctttgggttggtgagcttgttgacatggcgaggaacaatcttggtgacaacttgtacctccggttggccgactctccaggtatgcccaccttttatccctgtggtgacaaatgacaataaagatcttagatagcctgaacatccaattaaaagcaacatccatgcatatacctgcaatctatggttagaaattctgaaagcttcttcatttctcttaataggtcataaaaagagcaggtatgtagtcaaggttgtagtccccattatagcatgcgtgctaatgctcacgtgcatataccttgtctggaaatggatatcaaaaggtacagcaggagccaatactcaacaccgactcatatcatgttttcctcctgtaattgtacttatgatattgatgttcctattaggtgaaaagagaaataatgaaaatcagaatagagcgatgctaggaaactttagagcttctcatgaagtatatgagcaaaatcaggaattcccatgtattaattttgaagatgttgtcactgcaacaaacaattttagtgattcaaatatgcttggagaaggaggtttcggcaaggtttataaggtaacaatttacacagacaaacgcaacagtggagaaacctacaacattttatcatgctaaaatgatgttattatacagggcaagttgggaggtggcaaagaaattgcggttaaaagactcagtacaggttccacacagggattagagcattttacaaatgaagtggtccttattgccaaattgcagcacaaaaatcttgttaggcttcttggttgctgcattcatggagatgaaaagctccttatttatgaatacttaccaaacaaaagcttggatcacttcctttttggtactgttcagaaacttaccacatgatccagatataattggctgaatgcttactaattagcattattcaccattgttgatagatccagcaagtaaatttattcttgattggccaacaaggttcaagataatcaaaggagtagctagaggacttctttatctccaccaagattcaaggttaactataattcatagagatctcaaaacaagcaacatcttgttggatgcggatatgagtcctaagatatcggattttggtatggcaagaatctttggcggaaaccagcaagaagcaaatactaaccgagttgttggaacatagtgagtgatttatgtgttagtgtttagaatgatatttatttcctttcctgaaacaatatttgttacttattgctaaaactgttaagcagcggttacatgtctcctgaatacgcaatggatggggtcttttcagtcaagtctgacatatatagctttggtgttatactcttggagattgtaagcggtttgaagattagcttacctcagctgatggattttcccaacttgttggcctatgtaagtacggtgaaatgatctatcttcatataatgcaaactttttttcttttttttttgccgggtcggccgaaggaaccggcgaccaaatttcattaagattgggaggaatataatgcaaactaactgtactgattttatatggaccctattctattggttcaggcatggagattatggaaggatgataagaccatggatttggtggactcatccattgctgagagttgctcaaaaaacgaggttttactatgtatccacataggcctgttgtgcgtgcaagataatccaaatagtaggccactcatgtcttctgttgttttcatgttggagaacgaacaggcagcacttcccgctccaatacaacctgtgtattttgcacatagggcctctgaaaccaaacaaacaggggaaaataccagcagctctaataataacatgagtctcacggtattagagggacggtagatgtttatgttacctattttctgcatagaaagcatttagattttaccacttctgtaattagtttgttcttttccataaaatattagaaacaaagggcagatgttacattttttttggatgagttttttcttttatcatggcccttgagatggtatttttaatgtgcaggtattacaaaataacagtagataatgtggttctcgatacactgtcctgcaaaagaatcgcaacatatttttaccatcaattcattaaactattctaagttggatgtatacagtttaaaagttgggaagttataaaatactccctccgtttcacaatgtaag

SEQ ID NO: 5223 - DNA, 70491 bp, Oryza sativa
tgcccagagcatgtcggatgcatagttgatatgttggcaagagctgcccgcttggaggaagcaccaggagtggctagcttgactcacaataaattaggagcaaatgcttggaaggctttgatgggaggagggcatttgcatggtgacatgaaatttactaaagttgctgcaaagaaggtgctcaccacggaatcatttgattatgggcatgttgtgttactttctaatgcttatgcatcatctggcaaatatagagctgctgaatctgtcagatcctgttatgcaaagcgaattacaaggaaaactttagggcttagttccattgagatagtgccgtacagcagaagatagtagaacaactcttacctagggaagagagaagatacatcaaacaattagtattcactgtctgtctgtctcaagctattggaatctatctcaggcataagttgagtattcactttcaggttgccaagtctcctgtggaaaaagtaaagcatcaagcatgattttcaaatgcaagttgatgaaatagatgattgccttggacctttttctttaaaagaaaaatatgccttggtctatggaacatgaccaacgatatcacatctcaactcactattgctccaggaatctctaacacgtgaatatggattctaatggtactgacacactaaggtctaaggcagcttgtttagtgcatactcatttttcattacttcctttttttcatttgtctttttttttcctttttaaaagttgccttggagtttttacggtgatcctccatctgaccttatgccctcatctggattgtgcatgttgactttcctacatgctaggacaacaacatactattgatagtaaaaagaattggtgatagagcctgtaaataccagctgtggcagtttttttttttaaaaaaaaatgagcagtatattggggctgctgggtgtgcacctctacatatgtgcaagtgttgctttgcacttccatttcatttggcagcctggcagtccctattaatcagccactttaaaatttatcttggatgtttgttcaaggatctagtagcgttgtcccacttttctgccttaaaggtgttaacgtttcatgctcccaccaacagatatagttcacaaatgttgacactcgatagataatcatagaggaaagctatatttgtttcatgacatatatatctaccaagtactaacacttctcttcaatcaatgaacatttgtctgctctgtaagtctaaattatcccacatatttgtatagatgctgccattcatgtcttttcatgcgtatgccccagtgtcaatggctattgcttctgtttgaagcaggttcatatgtggcgtgattatttatcacctatcatatagttttattctgaaagatgacatctcaatatgcatatgccatggaattatctggtggaggcatattggtgtttgcctggtataagatgtgtgtggcaacatgtgttttgctattgtttattctatttaccccacaaattgcaatgcttaatcccttccttacatattcattacgctggtattagtgaacagaattatatgaagactatttgatgatgcagtgagaataatgtatgacaaaaactctggaaggtcaagaggttttgggtttgtgcacttctcaaacgagtatgaagctaagtgcgccaaggatgctatggatggaaaggtactgtttgatgaagagaaatgtctaacagattgtaatattaactgtttcagtgaaaaataaacaggaaaataaacatggtctttctttttattctacaggtaatgctaggacgaccattgcggataagttttgctcttgacaaggtccgtggtgctccagttgttgttccacgactttccacggtgagtttaacgattgacatgttcattacatttctggaatgaagatttttttggtaccataaattctttattctatataaacatttctgtgatttttatcatataacattttaagcaatcaaataagatctctccacctggcatgactttttttaataaaaaaaagttacttatattagacattaagtatacgaaggatcacccacactgtgtgagaatgtgagattaccgacagcaatagttcaaagatgacacaactattaatagagctcacttttttcttattacctgataaatggctagttactgcaaatcatgttcgtaaaagcatctataagaatttcaaatattgcacattaaaggctctaatagaaaaagatggtgtatgacctgtgcttacttgtcgcataaccattatggacttgtttaagtttcataagctatcactcacactccattacttcgaatacaacaggacaggccatttaaactctttattcatgtttgctagataacatgtcacccccttgctatggtacacttgtttttgtcacatccataagatgacacagaggtctgtttgatgttacaaacattagagcctcttctaaagtgaattcgaaattggaatttgaatatgtcaccatgtccaaaagtatattccttgtgccagatcaattagactcgcagttgcactattcatttgctaggtgcatctgtgtcaatgtcgatctctgtggcttcttcttccttggtaggtattttgatggattcttcagaatggagtgacattaccttatattggtagaagtgtgagcatataagaaaataaataaggttcaggactcccataagggcaataaaatagaagtaatagtcgagtttgccaagattaatgttgtctgttaaccagcttgagtgaccatctctggtcgtgacctttctcatgatgtttgccagagcagtactcaggtagtttgctccagctatagtacagaagaacagagatcctgctagggtttgcatgttctctggaaactgcttattgtagaattctatttgtccaactgcattgaaggcctcagcaatacccattaaaacaagttggggtgcaagccacaagactgacataggcgatattcctccattcgacaaggctgagttcctcctcttacgttcgacaagtcctgctaccaccattgaaatgggagaaatggccaatcctataccctgtctctgtagaagtgtaataccactttccactccagtgaatcctctagctattggtactaaaatccggtcataaatggggatgaatagagttagggcaataagggatatggatacaacagagcctgctgggatttcaaagtgcgtcccaaagtgacagtccattgtaaatgtttgcaagattatataggtgaattgctgagccaatgcgacaaagcataagactccagaaatacaaaccggcacaattcttattaagcatttgacctcctctatttgttggacgttgcaaagctcccaagagtttcttgcagaaccatcaacatttatatcatcacccattacaattgcacccttgttcagaaacctgaggatgagtaacatgcatcaaactatgatggcatctagcatataattctttgaaagggtcagtattttgtttgatatgaccagcatgtttcttcttaactccatttaagcatgtggtgcattctatgcatttactagaggaaaaagggtgtatatttaccaacaaatatgaatttctgcattttcttgcccagcacatagatagcaatatagcatctatcagtaaatatttatgtgtgctcgtgttgataagcatacaaaatactcgtgcaagttatgatatgcatgatctatatgagtttaatattcaactgtataaaaggtatctgagtcttacaacttggtaagaggtaatgaataaaaatcactaaattcaacaacctgattaattatttggtgttgctttgctttgaaaacttacaatgttttggcaataaaatagaacaatgtcaagaacttatgtttttcaaatttcgtttttttccacatgtacatatatacatgcaacatcataatttcaaatgtgcctcgggattgatgcagatataaatttcaagaaaaccaacccatatccgattcattgtaatgttcttgcaaaaactcctgaagcacactatacgcgtaaaagtgtgtgcacatatacatatgacaatgcatttatcacttctcagtttgttggatgttctaatactttcactatgactagtcattgttttagtttttcctccactctaagttgattacatctctagctacattagttccaattctgttcatctttagtggtaacagatgtttacctgaactgggaagtaagtggcaatctgaatacgcggttgcccttggaaggagggttgtagagcatcaatccttgttggtttatatcatgaggacaaggaagcttgagatttctctttttaaatgaagccactaaaacctgggcaattccagcaaatatgcttccctctggttgtacatggacgtacaggttggtacccagaaataacatgataatggcgagaaacatgagtaatgtgggtatgccaaatcctattggccagctgacattgttctggatgtagatgatgacaatcatagataacacaagggcagcagtacttgttccatagtaccaattataatagctgtttagtccctttcgaccttcttcgtcggtcttatcaaactggtctactccaaagggcaagctacaaggccggatcgctcctccaccgataattagaaagcctagagaaaggtatagcacacttagctggagtgttgatggactgttgcagcctccgcctagtcgggttttttcatggcagatcggtggcttgagagctggaagtgatgcatacaaagtcattcccagcatcccctgttattttagcaaataaataaattaaaatgagttcatgttgatgaactacactcctgggaagagcttaaatcaacaaaaatgttggatgtgcactatatatcagtttcttgcatcagttggggcttattgtacattcttcgtttctaatgaaaaaaaagcattaagctattgctgatctttttattcgttgggtgaagccttatttgacaatgacaagtgaccttgcatttctttctgctgccaagcaggtgaaatgaaactactaagagagatggtttggtcatcatatggacataccaggaggctggcgaagcatccataggctagtgttttgaaccttcccaagtagacgtcggagatgaaggcgcctagcaatggcgcaaagttaagcgtaccgaagaatatgttggtaatattagctgcctcaatttgcccaatgttgaagcgcttcacaagatagaccgtcaaatttgctaccactccaattgtcgcaaccttttcaaatgtctcagttgctacatagatacaatcagaaaagggcatccattcagtacattataatgagcattttgatttgatccgcttgaagtacaacataattcattcgtgaatccctttttgctttgatttgaggcagggtgtatcctgtgcagggatcaccgggttagagcacccatgttgtcatgtctaaatttagacaaagaagccaagccaagccagaccaaatcaacatatacttggtctaggctcagagtctgaaaatactcttatattgaatggatattagtatatgatttacggtagtcatgtagaagtattaatgagatgattcacgaatacgagtgattaaaagagtcttccgtacgtgctaatcgaatacgaataccatggacatatacatctatgatctatatatatggcccttctcaggatgcaatttattttctatattatcaaaggaaatgaattgatctttcacatgaaactatctataaaaaggggacttcgggcatgtttaaattgtagccaaaataaaccttgccattcaatatgtgtaggtaggtgtgcgtgtgtatacatacgtgtatttgagcgttgcgtctatcttgttattttcaagcctacggtgtagccgtgcagcatttgagaggtctaaggctgcgttcgtttcttggctaaggaactcattcccttcacacgtaaaacggagtggtccattagtgcgtgattaattaagtactagttattttttttcaaaataatagatcaatatgatttttaagtaacttttgtatagaaacttttgtaaaaacgcactgtttgaaaagcgtgtacacgaaatatgagagggggagttggtattaggtccctggaaacgaacgcagcctaagtaacatcagtgacggcagaggtattaggtctagtaacgtcagcgacggagctagaaatcattaaagagtgaacttaaactagtgagttgctttttttttcttaaagttacatggtggtttaagataatttaaccataattctgaagacaagtctaaggctcaagccctaactactctaggcctgccttcgctcctttagggcccctttgatttggaagaaaaacatagaaattttagaggatttcaattctataggaaaattttctatgaagccatttgaaacaaaagattaaatcctatccaattctttgaaattcctatggaatgcacaatcttatagagattttagagaaaatttagcatgagctttaacctcttggtaatttttctttgagtttatctctctcatccaattcttggggttcaatcaaacggtaattcatgtgtttttcttacgtttcgaaatcctctgttttacacttatatacctttttaaaatcctgcgtttttcctattcttatgttttcttaatcctacgattcaaagggccgttaacatactatacggatcgcaaaacgtagaaagaaatcactggaacgggagcctcacctatgatgaatggcatgcacttccaaccttgcggcgtcttccccctcttgcctgccacaacttcaccaccgacgacacccccgttctcaacggcgccgatctccatctccgtctccaaagcgtaccctcgctaccacagcaaccaccaccaccaccaccgcgcggaacggcggaggccaaccaaaacaccggcgaaaaacctcgctctccgcccgccggtgcgcgcgccagccagccagcaccagcggcgccgcgcgtatgtgaaagtaggcaatgctactaccaccagttggtagaagtggtacatcacgctacactgcacatatatgcgtgcgtgcgtgcgtgcgtgggtgcgtgacggcgtaggagtcttgtcacgctagagctattgggtgcaccacgcgttgtcaagcgccgcggagcggacgggacggttttttttgggtcggcgtgatgcgattgctcccgtgtgtttattgcgaaacggacacatatgcgtccgtccgccgaaacagtgagcacgtcacagcggctgggctggcggacgggcggttgggtttccgcggcctttgaggcggcatgacgcgtcggcgtgtctcatcctgaagatacacgtaggtttggatggagacagtccatggcggcatctagggatggcaattgtgcccgtttttctatttacccgtggttaaaaaccctattaggattaaatttgttctccattttatacccatagatattttattgggttaaaagctatgcctgatgggtaaatgggcatgggtatgggtaatcactacccatgcccgctttgcccgtttacccacgaaatctaacttacatgtaggctagaagcaaaatccactagaatacataagccacgttctttgttttctacggttttccttttatttcccttattatctctccctcttactctatcgccgtcagaggagagacaccacaccgagacagagaatatttgatgttttaaattcgatatcgaacttagaagcttgtagactttttattccactacttttgtagtggcgggtaaacgggcacgcctgcgggcacaaggcgcccgtgggcgatgggcatgggcaaccattcttacccgtcatgtagtaatagatatacccacggaaaaaaataatctcatgggcacgggtatggataggcactacccgtacccgtcgcacccgattgccatccctagcggcatctgatgctttttggtcatgttgattgtgtgcgcgcggtactgacagtccagtccacattctcccgtgaatgaatgaagaaagtttggtttttagtgaaaaaaattatcgtggaaattaaacatggaagctgatgagtacttcctccgtcccaatatataagaacctaaaatcggatgggatatttcctagtactacgaatctggacaggtagcctatgatgtccagattcatagtactataaaatgttttatccggttctaggttcttagagcatccccagcagctcctttatctagtcatccatccgatatttggagtatggaggagaaaaatagtgctccagcaaagtcaccatcacatactccatttttggagattctccaaacctagcccttcctatgctaaatatggaggttctctctcctcactccatcctcaactacccacttcccgagattttttttaagtggtgaaaggtgagagggatatgagtaaaaatgtgtggtagttgaaaaatattaataaaatataggatgttggtatatttaggatgtaatatggatgatctgttgaagtgaaaagttatatagagtgagaatttttttggatggctatccaaatgggagtatggaggatgaaatttagatgagctgctggggatgctcttatatattgggacggagggagtatgttgcaaataatgggccgtgactatcttggacccacaaattttgtggatgatctcctttgtagcccatgaagcctttgcacagtttattgggcccataaccagtactgggcctcgatcaaaggtcgcccattagaccctgtatttccatgtattattaaccccatgacctaattctttaataatcataagaggcatttccggccgggacgtcccgaaagctaagacaacgcatccatcatgccgcgtgttcgtacttaacgtgcccatgcatccagcagccggcacccaatcaagctcatgattaactaaaacacgtccaaaagttaaagcctttctaagatccccataaaactaaaccttttattagaccaactaatccttctttctgtagccgctagctaacaatctaaactaatgctatcaactccggctcaggtggaggggcctgcacttactagtacgtacgtgaccgataataatcatagagtgacaaagtgtaccatctgtttgtcctaatcccaaatatcccaatcctttccctttcctttcggtctctgttgcacagaatcgggaaccggttggtgagacgtaaccaaacgtgggtccagccggtgccgtttgatgacttggcctccaggctccaagtgaccgtaattatggcatgttaattcggtttagttagtaagcttattagccaataaattaacgaatttggtgtaaatatagtgccacatttctgacttgactcaatcattttttaaatatgtgattgctagtgtttctctctcaatcttatcttccaagttggtaattatttacttttatcattattctcttatataacttacagtataaatgttgtacttccctcatttcatattataagactttctaatattgttcgtatttatatatatgttaacatccataagttatttacattgtaaatgtatgttatttacaatataaataacttacttagtataagttttgaagtgtaaatgtatgctatttacattgtaacaagattttaactttttttaatatgatatcataaatatagctagtcccataaataaatacataaataaattcaaaaagagaaaataacaaatagttagaaaagttatatctaataatactgatgtacaaggttaactttggcgaaatctacttttgtaagcgcatcacagaagtattctataccaccattagcaaagaacgggtcttgtcgggcatcagggaagaagagagcgtggagcggagcgcgccaccgcgccgcgcggccggcgacggcgatgggtgcatggcccatccgttgtcctggtgacctgatccctgcattgcaatcttgcattcgactactctacatatgttttttaaaaaaaatctaaaactgaacgtgatatatactagtagaagtatgtctataatttgttgcactagaatatatgatagtatctagttttaggtttgttttttttaacggatgaagtatactctctctgtctagaaaaagacccatcctacatacgaacttgatatatatgtgtgttcagattcgtagctagcagtatttttttttaggacggagtggtactgtagtaggtcatgtgcagtggtttgtttttcgccgcccgaatcattcgcgccatctgggctccgcctcggcgcgacacgatcattgcccgcgcacacacccggcccggtacgtccccgtccttgccatcgccgttaaatcttaatccggcagcactagtagtagctttcaccaaacccttaactaactcggtgctaatcactcgccattaagatctaagcaagcacgaatgatgagtgatcagtggtactgtctcagccagccaatcatagctgctcatacgctgaaacagccgagtagttctgaaaatcatacaggctggaacagcagataattaagccaaaaaaaaaacaggctgaatatttcccgatgtaggtgacggctacgagcttgttacaggtgcatccaggttgtggtacatgatgagagctttagctcgctcttgtgcaatcaaatcattcatccatttccccttttctctccaaatcatcatccatgcatgcaggttggtgactgatgaaaggaagaaaagggaaggcaaacctggacagcacagacagagtatctgcatctctccctttctttcttctcgaggttttctctgattctttcggcagcatccaaatgcacgacaacgatgccacccatgatgcgtcgatggcgaccgaaagctcatctcagctcagcctcagctcgccacggtcgagaggctgcatttctgcagagattttcctcttcatggcgagcagaaaggagaatatgttcgcactatgcgtactggaggcgtgtgaatcccgtatgcgcgtgtggtgcctgctctgcctgccctgtgtgcgtgtttttgctcggatcaatgggttgatccccactgctatcatgctgctcccaatgatggctcgctagcttccccgacaggttgtgcccatcaggtgcagcctgaactcacacctcgcagggccaacactagttcacgagattgctaactacagctgctagctactccctccgtttcgcaatgtaagttattctagcattttccacattcatattgatattaatgaatctagatattcaatatgaatatgagaaatgttagaatgacttacattgtgaaatggagaaagtaatagctagccagctatacggacatgtcaaccatttttttttacacggaaatgctaaactactgttggtagaaaattgaggctaaaatattgtaaatttctaccattagatttgctttgcggttcctgctccggcgacctcacctctttctcctcaagctccaattaccccttcttcaccagccatgacgaccggcgtcttgccgacaagcggtggcccgacgatgcatggtggaactagtggacggcacggcgacatcggagtcacggggatggaggaagacggtggactggtgttggtggtggaggcaaagcaagtgtacagttaggagatggtggtggatccgacaatagtgagtcgctggagatgggggagacggtggggcgggggcacctcgccgccgccaccttgaggagaaatagagggggaagggtagtagggaggggaggcggctggtcgagggagcctctctggtgccattagcgtatttcgatcagctgacaaggccagggcgttggtggcaacaagaagcggaagtgttgagcacttcatgtggtgatggggaggaaaaaggaaaaaaagaaaaggttagagttttgagggctttgcatgaatctcaaaacataatttactacatgatattctatcattaatatagaccagggtttaagttttcaataaaaactggttgagaactgtagttttttttttgttttcacggaggacggaagcggattataagtaaaatttcaaatggtttttaagaattcaaaattgagacgatagatttaactgaaatttgaaaaaaaaactgtcataccgtcaagatcgggattcgtcgctcaatcggaaatgggaacactggtaattggtaaaagaccaaagcattaactttgttcagtagttttctgaaccgggaaacaaggagtatactgtttcggtgcttttgtttcgtctcctaattaatactgtacctcgttggctagcttgagctggatgcaaaatttatctcccggtcatcgcggtacaccgagatgtcagaatgatatacgagggcgcacatgccttgtaccaaccggaagcatccaaaaacccagatgcacagctaatgcattcactctatggggcattggaccaagagaagagaacacaggacatttttgtttcttgttcgtttgtgcttttgcaattctgcaaagcattaggggcgtttcaccgcgtatgtatgtacagcgtgttcgtgccacgatggttgcgtcagtgaggaaaggcagcccacgttaagttcagacttcagaggagaaagaaacaaggctttctctacactgtggctgcaacaagggccccacatgacagcagaagacactgctgctccacggtcggactggcattctcgccgtcaatgtcgtcgtcttccttcagtttacaactaaaaatatatacttggagtactaggaaaacaagcccaaatagtaggcatacatgtgaccaaaaccgaaccggtaaaaccgctcaggttttgcatcactctcaagtttcaacaaaactaaaacacattctaccatgtgggaaggaaagaacgctatgcgtgaaattaccgcctaaattaaactgttttgggggtcaccggtcacgggcaaattagcaccatcatctcgttcccgtccactccaccatcttgccctctagttgtacttaagtttgcaagtagtaggtgtgatcgtaggatagcctaccatgcaatggttctcatcctcaccattgtcttcctcgtgttacattcctttcgttcattctctcagtgaaatgtacattttcatcaccccacctcaaataacggtggtagaaatatggagggacattattatatataaaaaaaagtacggagaaatataattgaaatttagtagtggctaaatctcttttttttttcttttttggcatatttcgattgaatatgagtgatgccaacgtggatggccacatatcgattagtcaaaaaatgataaataataaagttacccctaatcaatctatcagtaaattactagtttatctttatctctaataactaatggatcaaatcatttctactagagagtaacgaaccatcgtccaaactacgaacataattacaaattcacaatagtctctagtctacaagtaaaattagggtgtgttaaaaaaactcaatttgtgtcattaagaaagaaggaaacaggcaacaaattacatttttttagaaaggtcaaattacatataattcgtgcaaagccaaactggctcaagctccgccacattggcattagcattttgagggcgcccgacattctcatcctcatcgtcgtcttacttaagtttttttttttatttttacgcaagtcttacttaagtttcatccatttgttccatgcttttacgttcaaacggctcccttatggcccggtcatatgctcctaccatacacaacacgctgttccaatgtcagtacaaatgttactaaggtaccactgattgcccacattctctaataaacagtaagaaagtgtttggcaaatgggaaacggaaatgatttcccaccatctttagattctaaccattcattctcccttttccatttaatcctaacccttcattcatttcctaatcccaatcccaccctccatttcccattatccaaacacaccgtaagggcttattaagaaataaaaattattttacaggtaaatttttatatatgtgttcttagtgatttaaaaccaatgctgaaaaaaaaacgttcaaaatatcttaaaatcaacttcaaaattatttttgaaaaatttaaattttggtttttgccgacggagctcaaactttgtatgaactgcgtttttttttaaaaaagaatcggaacaactttaagatgtagggctagcttggtttgaagtctaaattaggcttaccaatatttggtaatttcaatagtgtttagtgtctatttggtttgaagccaaattttagcatgcctaacaaaataggccattttaatagtgaacttaggctattttggcttcaatccaaacacaactttgccttaccaaaattagtagtgccaaaatttggtaaggcctatttaggccacaaaccaaaccaacccttaaactaaaattagggttaatgaacaacctttagaacacaaccaaaatcgcacactaaggtaaaggaacaaaacaacaaatcacgttacacccgcgaccaaagccaaaacggaaaacgcacacccagctaagggttgggcatcattgcagcataactaaacacaccgtagaatagaggagcgctttacgcggaactaattaactaaaattaaaccccgctttctcggtcacgggcaggtcggtcccaccaccccaagtccccatccactccaccaccccggccattccattccattccatttcttttcttttctttctccccctcaattattgccgcttctgtccatcccctccccctccaattccattccatcttcatctccatatcttctcctcctcgcgtcggcagttatctcctcgttgataatggcgtcgtcgtcgtcgtggtgggtggtgatgttgttgatggtggtggcggcggcggggtggggcggggtggcggcggcgacggcggcggaggcggcgcacgaggtgctgcgggcgcacgggctgccgcgggggctcctgccggcggggatcgcggatttcaggcacgacgaagggagcgggaggttcgaggcggcgctcggggagtcgtgcacggcgcagttcgaggtcgggctgcggtacaacgcgacggtggccggggtcatcagctacggccggatcgcgtcgctgtcgggcgtctccgcgcaggacctcttcctctggttccccgtccgcggcatccgcgtcgacgtcccttcctccggcgtcatctacttcgacgtcggcgtcgtgttcaagcacttccccctcgccgtcttcgaggccccgccgccctgcacccccgaccccctcctcctcctcacgcaggtaatctaatccttcttcctcgaaccaatcacgaagtgaaatctccacccacctagttcatctctgaattgggcgctcacgcggggcaggtgtgtgaggacggatcggtcgccggcggcggcgcggcgtcgcaatgaaggggacggactcgatggttgaaatcggcgaggcggaaaccaaaagaatgcgcagttttgaggcatgggagtggtcggccggtccgtcgccggcgggccggcatctgtgcagatagatagaatgaacattcctttcgttttctactactagttagtaacctttcattcctcatcactctgttcttcttgccgttcttgttgtccagtgcgatcaaagccggccgacggtggccggtagaggaggctgccggcctccggtcgccgccacggcgataatttttcgtggttatgatggttcggggattacaacgtgttgaatctgtttcttgccgtgggcgatgaacttggatcgttcccggatccaatccagcgtggcgatcggcaaaacacgcgtgttccgttccgttggatgatgcggttttgggtagcacagcaagcgtcgctgtctgtctctctcggcgctgctgatgatgcgtctcctccggtggctttcagtgtcctgttgctgctgctagatgctccggtggcgcgtatctgaggcgaagccgtccatgttggcatccaatgggatcgcgcatcctgcggtactgctactagtctcctcctgatgcgtcagattcggcggcattcgccttctcgatcagctagcgccagtctcgcgagagaatgggcgagcattgtgatctgtgcccatccatgaccaaattgaccatatgccttccctagcttgcagtacctctctccctccctctcgccattggctcttctctgacatgtctcgccaaaagtgagctcgctttgtgcgcgcgggggcgggggggcggcgattggataagattggaccattcaccgcgccacggcgccagtgaggcatgtgtttgactgctgggtggtgtgtgacccgttcttgtctgtgaaatgtgaatactggcatactgcacgcacggtgagcgccatgtaaatgctctctgctcgcgtacacggttttcttctcgcgcacacggaattcttctcgaggtgtaaaccccgtttggtaactttggggtatcaatcaaagcggcgaaaccgtgcaccgctatgtgccacatgggcgcagcattcttcccgagctccgaattgataagttggatctggtacggcgtagcgtacgcattgcatgttgcgatcgatcgatcgatcgaagtcccggcctgggcaataattcgctgctgcacatccacacacaccgcaagctgacagcggctggctgacgtggtggaaccaccaatcggcattacgaacagctcggcaacgcccaggatgactcgtcactgacacgtggatcccatagggcacatcacgatcttttcttagagaagggtattttttatcggcctctacatccgaccggatatatgcaatatttttaaattataaatttagcctaacccaatctaaaatttgctatcatgaatatgctacttaagtcaatgcaaccgctaaactacatgtggcacgtcacaatcctgcctgcgttgcatagtgttctttgtgacaccaatgccacagttggtaacgaacgaactagtcgggggcaaggggcaagacagcatgtttcgcatagcgcttgggagtgaactggtgaagttacacaggaacagcgagcgacagagagggggagaggatcaggcgagcgattgcgtattttgcattacgggagagggagaaatgggtggattggaggagcagcggcatgtgctatgggggaaagctaatgatgggaaagagacaagcgtatcaactgcagcgccttcctgcagctgccgggttggtggagtaggtgacgaccacccgcgcctgggtgggagtgggatgccggcgcggggcaagtgatcgatcgattgaccatggtaggagccacacaggccacagccacctgggtaactagtgtcatcagctgcattttgctcagttgctgcttgccatcgtcgtcgacttgttgccctcctcttttttcactgtccgttgctgcttcttgggttcacttttggtgcgtttggaactttggatagagtattaggtgatctggataggcacgaggaggaagccatgcgatgcaatgggataatatgcaatgggtgatgaggtgtttgggtgtccacctgttgaaactgtgtcattgttggacgggtgacatgtcacatgctgatggggtggcgtcagtcaatcatgtttttgtagattaaccggagtgaagaatggggtctgatgttctatctgatctgatctgatcatctcttgtggatcatcatggttaggcttggcatgatatatgaatcttggtccagtcagcaagtgggggtttttattggtaaattgctttggtaagttaagaggtcacatcactaaacatttgctatgcaaatgtgaatgcgtatgatccctacttggcaaaaacttggaacgtgctgtttgcgtgtcttcgcattcatgcatttctatccgtcgttagacaaccaatcgccaggtcaattgtagtgccggatggctagctggttggatgacactgatcatagcttgaactttacgtatttatttttggagcagatgttcgtatggtaaaatgccttaatggtatacgatctatttgacatcagatacaactttctgatattgattccaattccattcagggaaagagccagagtgccgtacaatttgcacacagaggtgtgtccaaaagaacttttttgcagtaaaaatgtgaaatatagggagacatgaaccattaggcatttgtcacccgtgtgcctgtgtgtgtcactcttctcatgatctcatcacaccagtaaactgcatattaacgcctgaattcattggtagtgccaaattctaggtaaactccggcactatcaaaatattgtagggtaaagttatttagctaatatttggattgctaccaatataaaaccaaactcttatagtatagaggagaaacttctagaatatgaccaaataaggtaggcactaccaaatatttggtgttagtccaaactaacacacatattattcagtttgccaacaaagtggaaaggcatgttttggtatcaaaccaaaacggccctaattaaaaacaaggagggacaggtaaattaattgggccgtcaaactcaggaaaagcccagtctggttcaaaaggcccaagatacaaaaaaaaaccgcaaccccaactacacgtctccggcacagtggaagtctactttgcctcccttatttcttgctcctgactcaatcgcctccaccgaccacagctgggccacctcccatggcgtcccagcacggcggcgacccgcgcctcgaccgcctctcgcgtgccctcgcctccgaccacccgccgccggcggccgccgcggtccacgcgcatctcgtccgcgcgcacgccggcacgccgccccccgtcatccggtccctcctcaaccgcgccattcgccgcctctccaagccgcacccgcgcgccgcgctccgcctgctcctcctcatgccgcgcctccccgtctcccccgaccacttctccctccccttcgcgctcaacgccgccgcgtcgctccggttgctcccgctcggcgcctccctgcacgcgctcgccctccgcctcgcgctcctcccctgccgcctccccgtcgccaacgcgctcgttgatctctacgccaagtgcgacgatctccccgccgcacacaccgcgctcgccgacatcgcggcccccgacgccgtctcgttcaactcgctcctctgcgcgcacgcccgcctcgcctccgtgcccgacgccgagtccctctttgttgccatgccatccagaacccaggtatcgtggaacgccatggtggtcgtctacgtcaatgcaggggacgtctcttctgctcgccgcgtgttcgatcaaatgcctaccagggactccacctcgtggtcggtgctgattgttgggtactgcaagtgtggttcaatgcggagtgcacgagaggtgttcgatagaatgccggcaaagaatcttgtggcatggacagcgatgatcaatgggtatgcgcagagtggggtgccaaaggaatcacttgcgctgtttagagaaatggaggctgctgggattgagcctgatgcagcaactatggtcggcgttatatctgctgcctcgcagattggcagcacggagttggctgggtgggttggaagttatgttgacaagaagaggattgaaaggaacgataaagttcttacagcacttgtagatatgcatgctaagtgtgggaatgttgacgaggctctcagtgcttttagggagattgcacagccagatgcatacccttatactgcacttattagtgggctggcagctcatggtcatgcaaaattagcgcttcaagtgtttgaaaggatgcaagctcagtcagtttggcctgatccaatcactttcgtcggtgtgcttaccgcatgcagccatgcaggacttgtcgataaaggtttggattactgggaggcaatggtgaagtactatgggatggagcgtcgagctgatcactatgcttgtgtagttgacatgcttggccgagcggggaggcttgaggaggcttttgaaatggtgcaaacgatgccaatgggcccccacccaggggctcttggtgcattgcttagtgcctgcaagacgcatggcaatgttgagattgctgaaattgttgcaaacaaactttttgagttggaacctcacaacactgggaactatataatgttgtcaaatatatatgctgagaaagaacaatgggaggaggcagaaagaattagatcagttatgagaacaagactgcccttcaaacagccaggctctagttgggtggaggatcgacagagggagcgtggcaggtttcctttgaggagctgaaaacccgaacacatatctctctttgtttcaaatgtaaattttcagatgatgccaaacagatcttattgaactgccagaaatgcaggagctactgatgccattaaggtactttcacttctttacagttcatgttatatctgaaagatcccaatgcaaattattttgtggaagtattcagataactttattgctttagtaagtttggcatctcaatgaattgatgcggtacagcataataccaacacttgtattttaacctctatatcttagataattgtttggcaagatattttaataaatggtgtggggtaagcaaataaggcaatttgcaatccatatcttaatgcttgtaactgcaagagtttagaaagaaaattttctgtaatctagtatgcagaaaatgctcaggcaagagcatgtcgatcgcttccaaatcaataatttcagaaagtaacagtctcctcacgaagacatgaagtatggaacgattatttgcatcaccatcatgcatgattgtattttgttctgaatgtttggtaaatcatgtgcagaagaactagaacaatagttttttctccatgttcattatccactttcacgaaaggatgctaattggtgcaattattctgggtattattgatcagcctgatttcactcttgacagcgggagcatagtagtctgactacaaggaattgatagacaattctcgttgctgcaagattgttaacttttctgagatgctgcaagctaagctggttttaaacaagctaattatcaggggcggatgatctatggatcagtttgtcgttaaggtaacttcaattcttcatggttcatgtcatgtctgaaatttgccatgataaattactttgatccttttatgtgttcattgagccatgtttttttttaaaaaaatatgcttgtttatctctagaagaattgagtatagtttcatgacacttgcaatttaagctcgtcatcttaggtaggtatctgtgttatcaagaatttaagatgtgtcataaaaaaaaaccggcatccgaatgtttaaactatgatggttcagctggaaatttgttgatatattttgaaattttgctaaccatgaatacaatgttcacttgcaaatcagtaagattagaaaacagatcatcatgacgttggaaatagttatttacatggtgcattccatataaatggccgtatattgttctggatgcttgataaatcatcataggcagaagaactagattaactgtttgtctccatgtcgaatacccacttcaataactggtggttcacccataacgtacactagtgacaacaagctaactgatgcaaattttcagggcattcctcagcttgacttcaccgtctcgatcgcttggattaattcatctagtttggcacctgtgacctccttgacgaccttcccgtccttgagaatcttgaatgttggcacaacctttatgcccagctcctttgcaagagactgcgaatcgcacgcaccaaggaggcttagcacgatttattcaggaaaacagcagatacattccaatcgaataatggtgggtggagcgtagacaagagaaagaaaatcagttctaactgaccttgttgtcttgattgcagtcgagtttgaggaacacaacgtcctggtccttctcggacatctcctggaatttcggtgccatcaccttgcaagggccgcacctgcaaatcaaccagtcagttttacagttattacactgagcagtgggatgagatctgttccctttcttattcacgccgctcatttcaaaataaatccagctcgtgataagactgaagaattcatgcgaggcaacagttcatcaatggagattgacgcgaagagatcagtggagttttgtggcttttgtgaagtaccattgggtgtacatgtcgaggacgacgaccttgggccctgccgacttgacaattggccagaaggtatccttgttcacctccgtcacctgcccggtcacggccaccgcctccgcctcggccccaacagtggcggtgtccgagccgctcgacctcacggggatcaccgcccttgtctcagggccagacaccaccgtcaggctcctcctctgagaagccacaccgccgccgagcaaggcggggaagcgcccgcaggcggcggggcggcatgtggagatggccggcgaggaagccggcccgtgcgaggaggagacggagaggcgtagcgccattggatgggagaattttggaaggtaatggcctaattgggtggcgagttggtgctaggaaggaaggatgtgcgtttttcttcagcagcggcagcggcagatgagtggtgagcttgaaaggatatcttgcattgcttggcggtattcatagcctttctagtggagatagtttcttggcggggaaatgacatggctgccccaggtaattcctgcacttttgtggtggcactccacctatagctttctgtgggatggggcatttccggtatctgaaagatcgggttgtgtggtgcctgcgcatctctgaggtttcatggaggagagagcttgtctaacatttgtagatggctctttgtgtctggaactgatggcctcacgattgacggtaacatggaatcagtatcatagatgtcatagatccttttacatttacacatatgctatgttagattgctagagaccctaatgaagtaaagattagaaactgcacacaaaaggttgtgttgtatagtggttgaattggagttaggcgctatagcgttgtgaacttaccaacatgatgctgggccagtattacttggaaaccatagtaattgaattatgttgacagtgtagacttttaactagccgaattatgttaacagtgaaaccatagtattactccttttctggttgttgaaaacgggatatgtttcttatacaattttacagctccagcacatgcttgatacaatttaacagctcgagtagatgctataacagatatttatctcgttttttttgggttatttccagtctatgacaaacacatcagcaattcagcatcgttttctactatttgtatgtcttccctttgagcagtgaacaaacaagtgttccaaatgcactgtaccatcaaagaatcagtaccacgtgaaaagaaaaaaaaaatcaccagcgtctctagcgaaaagccaatccagctgcacaaacacatcagcatcatcgccacgttttgcgaattctaccctactcgacacaatctcgttagtcaaactccagccgccagatattgaacaataattgtggactgctcgtttctggcttggaaaaaaaacagaggaatattcctgagatattgtaggtaaatgccagatgtcacaatgagtagtatcatgtattacatggatattttctctttgctcattgtcggaaatgcacaggtagaaggtttagtgaaccaatgcaatcaggttcattttctttttgcactaactatcttgcttcgagagtttgagtttgagaacaaatttcacaggctcgtgaatggtagtatcaagtttctgaataacctcatctcaaaataataataataataataataataataataataataataataataataataataataataataataataataaagattctaaataacctactagtcaaattcccaaaccgacacaaaatgacaacatgccaagaaggcgaagatgaggcccaaaaacatgcatccggcccaaacatagccccaaatgtagctgctaggcaaggcccaacatatacggtggaagagacggcccatgtgcagaggcggcttagagcacgcatctggcaaagcgaatgcccctgttactcgatcaggcaactaaggacctgttgaagcttattttgtcatgacacatccggtatatttatagcagctagcgctatggtttgggaggggataccgggatatctaatccaactcaattgagatcctttaggttactgcatatcgctcactgacatgtgagccggagagtgacctacatccgatccaactacattagaagctcttgcttgcaatgaaggacctgccatcgccatggactgcaacgtcctgaaggtctgtatagattcagattgtcatgaaagttatttcgagtattgctacaagatcaaaatgcagatacttggcagtccttaatgacaccaatataagaagacgtcaatttgttaaagcagaattttgtcatgaaagttgggatctaaatgtagatgcacataatttggctaagtttgcatgtactttaaattatgaggggcgttacatgtggctgttaaaatactttccctcccattaatgccttattcgattaatacaggaggatggattgaaggggattgatgggattaattccatgcaccttagtggatgtagaacaaatctccctcggaatcaaggtgtggaatgaatcaccctcgaagatcgatcaccttgagattaaccgaaaaaaaccttaagaaataacgtgttttttttcgtaaatttcttaacccattcatgatttcaaatgtttagtaaaccctagtaattctatgtggcatgctgtgagatggatctatctcctaccatgcatgaaaccagttagtttcatagaactacctcataggagaaaaaaagcatctcctttactggaaaacctcacctgttttgtcaactgtgtggggaaattgaatcaattaaccatattatctttgattgccccattgtttttttttttgtttggtgtgcctggagagatgccatgagttgggggcagactgccaggagttttgatgacatttttttactggtagagatgaactcaattgctaagagcaaatctgttaagatgtgttgaattggtgcaacggagtggtcactttggttgacaagaaatgcaatgatttttagagaaaaaatcgtttactatcctctaaacattccttttcaaatcatttcccttatgctgcagttgaaacctctgcttcaccctgatcagaaacaaagtctggagatgctgatgacccaccttagggagacgagatcaggcctacgctcaagaactgggattggttaacactgtgtccttctgaacctgattttctatttagctgtcctcgttaggtgatgtttagagctagtttcatgagagtttttggttggagttagcctggagttgtttctgtttggttcattgatacttgcaatccctatcaagccggggtgtggcccattaatgttttttttttttctgcttttgtgctgaacctctgtcaagctggcatccccagcagactcgtggcccgtgatggttttcaatagaagccgggtccttggacctttttctaaaaaaaaaaactcacatgctggatatatatatggtaatgtggaactgaaattgggcatatatggctaacaaagtttctgtacaaaaaatacacatatatgaaactgaaattgaaattgggcaaatgtatagtcaacaattttctctttttacaaaccagaacacataagtacgtacatgttttgaggtcgccgtattttgatcttaacgacttaaccaattgctagatcagtggtgatcgaattcttgtacaacacatgcgtccttgttcctacaaggttaaaaagaaattagaaataccgacggggttaccggtgatgacagcaccaacggtgcagatggtccacagcaacgctttcacgaccgggctgtccatcgtccacggcgacggcgacgactcctccggcacgccggtcggcagctgagggaggatcatgacgccgccgccgccgccggtcgccgctcctctcagcatattcaccagacgcgccttgagcctttccacccttgtgcgctgctgctgctgcaggcgcgcgccctcgtactcctcgcggaagaggtcgttggcgcaggcgacatggatctggacgacaccggcgccgccgccgccgtcggagacgtacccccaggtgtgcctcctgtcgccgagcttgacgtgcctgcacttgcagcacggcgacctgagcttccgcgtgagccgcagcttcgtcacgctgccctcggcttcgatcaccttcggcagcgccgcgcagcaggggtgcaggaccctgccgcgtttgagcagggtgcgcaaccttccgatgtcccgcacgtacgcataaccattcacctgcaagcgtgcacaactgattacacgtacgtatactagcttagagttttctgcgatgtagccaaaatcttttatatttggggacggaagatcttccgaatcatacatatataaaacaacatgcccctctcaaaaaaaaaaacatgccaagtatcgtatatttcgagaattgcatgtaggtattgagaaaaaagaaacacctaaaaccaactaagacacgatcgacaacatccgtgtttcaaaagtttttatttggacgaagctaattaaggtagtagatgaaaaataagaaaacatcgatcgatgacaagaaacatgatcaagagaaggagagatataatgggaaactattttaatttcttaaggggatatcctctcgttttgtgcatgtcactcaaatgtttatgaaaaatgtgaaaaaaaaaatctgagaatatgtattaacacgtggtctatcactccacaaacatgcaagtttaaattcaacttctacatctcgcaacggaaaaccaaattaaactataactagttaacgtatattcacagttaaatttgtttttttcgttgcgagatatagaaattgaatttgaacttgcatatttgtggagtgatgtaccacatgttaatatatcttttcagattattttttcataattatttgagtgacatgcaattaacgaggggatatcgcacgagatataatctagaaagaggtgacttacgttgcctccgcatccatcgcagcgaacgtcgtcctgcactgtacctgggaagagatttatggaacacgaggctgtaacgcttgaagggatcctggtaagaatccccgaacctgtgctgcgcgcacgcctcgtggagatggaaccccgcgcgacaccctcccagcttgcacacgtatctcatgtggtacccgtgctccttgcagccatcgcaccggaatgactccttcccggccgtcagtgtgagctcatggtcgtggtgctcgggagctcgaagcttactgtgccccgtcatctcgcaaaaacaatgaaatcaagtgaagcggccggctagctatgatatctacgtgcaggtgcatatgcatcacatatatgcaacaatataatcggattgggaactctaaaagcaagcgttatacttggagagcaagaacgtagagcatgctgctatcatgctactccgtgatcccctctttatatactatataagacctggccttttggtttgttttaagtcgcactttttaaagttgatcaacttaatttatagaatgaatgtagcaacgacatttcttaaaaaaaacaaataggctgtaaaaaattcaatggtggtgatgaaactaattttatgttgtagatttcgatttttttttataaaccttatgtacttaaagaagtttaactcagaataaactcaaaatatcttatacttcctccatttcacaatgtaagtctaacattttccacatttatattagtggtaatgaatctagataaatatatatgtctagattcattaacatcaactagctgggtggcccgcgcaattgcgcggctagtacccaaacaaaatcatatatttttttagtatgattttacttaaaatttattaaatagctatctcattgtcttaagattttgaaagatcaaaccttatcatcctcgtgtttctaattatatagtttttaaaagtcacaccagttgctaccccttatgtcatctacttctttatttgcttgctcgatctaccaatatttctattcattcttcttggaacctttaaaaattggattttatagtttttagagtttattgtcacattgggtttcatttttataatttctagatgttccgtcaaacgttaccattatactcctgtgtgacatgtccactgtctcttctctttattgtcattgagattttaaaaattgaacataattatcgtttgggttcattttttactttctagtagtcccgccaaaccgtcagcggctttgctattgtactcctctacggcttgcccgttgccttccttctttattgtcattgagattttaaaatcgaacatgataataattgttttttttttactttttagaagttctgaaccttaaaaaattgaacttgtagttttattttttataatttttagaagtcccatcaaacgatgccactatgctcctgtacagtccgtccgccacctactctttattgtcattgtgattctaaaaatcgaatataactatcgttggaattcattttttattttctagaagtcccgtcaaccgtcgacagctctgcaactatactcttatgcaccccgcccgctgcttctcctttttattgtcattgagattttaaaaatcaaatatgattatcaatgggttttttttactttctagaagtcccggcaaccgccttacttgtttacttcacggtctgcctgatatcccttcttttaatcattattaggattcaatttggtgttttattaacaatttttatatgtcgtaccaaccgccaccactctactcctttataggcctgttaattaatttatctcgtcatgtgttttagatggtcttttcttaacaaccgacaccttgtaagcttcgatgcctcgtgagcatggactcgtttcaatgatattttttccgtattgaaaatccaatttgaaatttatttcatattttattataaatataattaatctcattttgaattttagatggtctgtgtaaaacttataacctataagccttatattttaggcttaactacattaattaacactaaattatgctccgaggtgaatacagctccgagctgaatacgtttaaaataaatttacacgattatgattataatttgttgtcagttgccaatgtggccggacgcttctgggtgggttgcatgcattgctggtctggaatgctggttgcagctttgctttgtttgctttacctattgggggcgatggtaatcaactttgcttgtcacttgttctgccgcagcagcccaagtatatctacttcatatatctgcgttttatatgtgcggtaacaatgcatatatacttgcgttttggaatcataacaaattctgtaccgtattgtatcccgcttgaatttttgataccgtatagtaatccaattggatttttctaaacggacaggactttttaatctatatcaaagctctataattctttattttttctatagcaaatctaaaccgttgtaatctaaatctattataatccaacggtgtataattttctctttttctccgattaatgtgagaatttctagcccccacagtgaacgtggtgccttcttttcgagctgtcttaataatataatagaagatatgaatgtgggaaatgctagaatgactaatattgtgaaatagagggagtaatatggaacgaaggggattgtgtgatgttgccttaagacaagttggaccactaccttgagttatgtgagaaaaatcacacctctctacgcgtggtattaactaagtacgcgtaatcaaaaaataatataaatttcttagggatatatatctatcgtgagaaagtactatttgtgtccctactaaagatatcatcatcgcaaatgggtgataatataatcctcatttgtaatgggtatccactagagtataagtttggatgtccatgaaaatgaccttgactcgagactttaagctattttcacagcttatgcgagaaaaatcaagctcttctccgtgtggcatcaactacatacgcgcaatcgaaaaatcaatggaattaaatttctgggtgatgtgtctatcgtgagacgagttataattaatattggtgtgtagtgtggtcttgaaatttgagtgcatcatttgatccagtagagtttaagtatgtgtgaatatgacttagcttcaagacaagttgggctattttctcagcttgtgtgagaaaaatcacacctttctccatatagcactaaccatatggatgcacaatcgaaaaaaaaaatattgatactattcggtcaacgtatatggtgagaagaagtatcataggtgttgagttaagtttaagtatgtacatcacttcatccattagagtttaaataataaatatataagaatatgcgttggctcatatgacataagtaatacttctagaataaaatacgtcatgtaataatatttaattttaagtgtgatttctcaattacatggaattcaactagtttaaataaaatataacagggaaacttttaagtttctgctaacaaatgagttactgaatttctaccttgcgagtttgcgaggacaatgtatagaagaattatatggatagcgccacacaagaaaactcatctaatttccttagtgtacgtactagcacctgtttatatataacgtacgaatccgggactagagagtcccaggactgccgtaagatagggagcggcagtcccggttggtccatttttctttttttttttcccttccaaattgagtgagatgtatatacctaaatcaaacaccagatccccaaatcgtgtgctatgcatatacctaaatcaaaccccaaatcaacgtaacatcccaaatcattcacatcacaaatacaaatcctaagttacttacacacaaatcaactacatcacaaatcttaaaaaaaattacacacaaatcaaatgcatcatagatcgattatacatatcagatccatgcaataaatcacaaattgtaataaaagaaattatacatctcttaatcacaaattattaaaaaaacggagaggagaaccggcgcgttgcctcccgcctgctgccgctcaccacggccggcacgctgtcgccccgtgcgcggccccgctggccgccgccgcgtgctgccccaccacccgctagccgcttgctcgccgacgctgcccgccagatgtgaggaggagaggggaagaggaggaaggggggaggagaggggaggggaggaaggaaatacgagggatagaaggaggatatgatcttatctaaatattttggtgaggaggaaatatcatctgggacttaaccgatcagatatggagagaaatatttacttccggttggtagtatcaaccgggactactttagtgccgattgatacctcagcctcctgacatgcctctgacaggggtttgtgttactaaccgggactaaagatcaaaatttttataaccgggactaccggttcttattggaaccggtattattgtggaaaacagccgatccagcaaagatcatttttctagtagtgtagttttatctcatgtcaaatttatattcgactttattcagttaacgcgttgttaattcgtggtcgatcgatctagtttgtaggtgtagctgccgcaagataatatgcacaagcacatggatcagattaatagctgtcgttttaggcactacgccatttatgtggatcaggacacatgttgcaacttgcaagtgacatgaccgcaagtatatgcattgaactagtctaaaaataataataataaaaatagtctaaaaaagtagtatatgcattgaaccagtcaagtaaacgcaagtaaactaggtactttgatagtctgattgacacagacatatgtagcaactaaccggagtgtgtatggggcacaacgtacgcattcaaaacgttgggcattcaggcatttcagggttatgggtcgtaagtgaaaaaaaaatgtgaccactaatggaaaaacgcagttaatttacagcaagacttttatacccttacctttagttagtggaccaaaagatatagctaagtgataaaacgatgaaaaattcccaataaatcctaagagtacgctttaaaactcaacattattaattgtctttgaaacaagcaagcctaatcaacaattctgattttttttttggtggatggcacatggagcagtgttgatatgcttagatcgaggtcgtgcgtttggcggcgaccttcgtgagcgtggttagcggacgggaaccgcggcaggatgtggtgtgtactttgtggcagtatccttgcctagtcggctttgatgactttggaggtggtaatatctaggtcaacgactgatattctccgatgttactccagttctatttaggttcgatgtcagatgtgagcaaaattcgattagcacaataatcagccgctgatttcacagaagataaggacttcatacaacacaaaattcgattagcacaataatcaaccactgatttcatagaagataaagacttcatgcaacttataagccattgagcagaaacaacgaatggctatgtagattctcgccaaacatagattaaagtttagcaatacctattatctttatcttaaggttggtatttttaattcgtagccattcgatccagccacaacctacgtaataattggttatagcttctttgtagcatatgttgggatgaatttcattttaaaaaatgtgtattgctagattccaagagcataaaaatttgcgaaaattaggtcacctaaaaattacacattcataagcctaaaactgcatcggtatgcaatatacaattttacttatttttaactataatattattcttatatatagttttgatttattaatttgtatctgagcttgagtacttctaaaaaaaaattaaatctttatctttcatgtagtttggtaatatttattttttaggttagaatagtttacaaagtagcgtgcctcgctataagacatgtcacgtgtgtttgtcatctttatatatgatatccttataacatgctttaaggcatgttatacttgagtatgaagtatgaatcttttcactcccccccccctctcttcttattcccctttcccttttaaaagttgccaactatgcaaggtcaattagcagcacttctctcacgcatatgcaagtagctagtagtgcatgtgcatgggcgactgacaaggagcattctcgtaagaataatcaacaccttatccctatcgatgcctatcgatgtactcgtttacttggaagtttggaagttcacttgccggttcttacattctaaaccccgcgtggtacgcgacgttattagatactacatatactgtgtacctatatgtttctcccactagctagctaattaattaatctctcgtacgtttctatatatataagtgaccgcgagatcgatccaagccacggtatgctatgagctactgaaacctacctagctactcaaaagatcgatctagcttggcgagcgtgaggtggtgaggtacgtttacgtacgtacgtatactcagcatggccgggtacaccgaaattttggacaccaaccatcacgagcacaaggtgtgcttggttcgcaaggacgaacctttcatttgctctggctgcaaagagctcggcttcgagctccggtacgcttgccacactgcgggctgcaaccatcagtaccacaggtcctgtacactgcagcctctcaacactcgcgtgccagctcccttctacaagcacgacttcttcttcttcaagtcggtcagtacagctggtgcccgttgcgaggcatgcgctgctgaggtctccgctctcttattcttaattactaattcctcctggcaaggtttatgattagatatacttaagtctggcttgtatatatttatatttgcacgtatttcgaataacataaatacatatttaaaaaccaaagtaattttgaataagataaatgcatatttaaaaaaaatcaaaggagtcatccatcataaaattaagccggtgataatacctccgaaacatgagaaactatttttatcccttgagggatgttccctcattgtttatatgttacttatgttacttaaatagttatgaaaaaaattgagaagatatattaacatgtgatataccactctacaaacatgtaagtttaaattcaacttatgcatctcgcaaaaaaattaaattatagctagttaacatatattcacagtcaattttattttttttctttgctagatatagaaattgaatttgaacttgcatgttcgtggagtgatatatcacatgttaatatatcttctctttttttttaaatttttttcataattatttaagtgacatacaaacaacgatgagacatctcctcgagttatcagaatccactcccccgaaacatatgttgatgtttctttccttggatggcgaggcatgcgctactgaggtcctcgctctctccattcttaatacttccttccggcaaggttgaccttgactgcaaattaatactctctatgactttttagtaaagaacgtcgttttgattttttacatagatttcatcatttgacttattaaaattttatataattatgatttctttattatggtttggtttatgattacagttacttaagtatgacttgtatttttacatatttgtacatattttgaataaggtaaatgcatattaaaaaaagagacgtcatccgatccattgtaaaagccggcgataatacctccaaaacatatggagttgtttcttttctttggatgtccctcgtttcttacatatcatccaaacaatataaattatttttgacaacattaatcaatatgtaatatatatatatatatcattatgtaaacatgtaagtttaaatttgactcatacaagttgaaaaaaagataatgaaactaactagcaagctagtgtattgttcacatattcacagtcatatttattatttctattccaacttaatttgtatataggttgaatttaactttaatgtttctgaaataacataccacctttgatctatattattagatatatttttttatttaagatggcatcgaagaaacgatgccttaaggagaaaaatgactttccatgaaatatatatgtattcacgaaaatagtattagtagattttttttcctcaaaactactccttcaatttaatcttttagaagaataaagattaaaaggtgctagccatatacattgagaataaaaaagttgagaagatatattaatatgtgatatatcactccacaaacatgcaagttcaaattcaatatagaagttgaatttgaacttacatggtttaatttgtttttttcgttgcgaggtgtagaagttgaatttgaacttacatatttgtagagtgatatatatatcacatgttaatacatcttctcaaattttttcaattttttatagctatttgggtaatatataaataacgagaggatatcctctcgatgaaaatagtttcccagtagaaaaccctttcccgccgttaatttacaccatgctttaggaagctcgcaggtgcgaggttacgtgtactactgcccggacaagaaggtcagcctgcacccttgctgcgcagatctcccccgcgtgataaccaccgagacggtgcagctgaaactggagaggaagatcaccaagaaatgcggcatgtgccacgagcggaatcaggggagcttcagcaacccatgggcctacgcctccagcgagaagatgatccagctgcacgtcgcctgcgtccggaaagctctcgtttcgcagttcgagtcgaggctttacggcgtgcaaaagccgaagatgctgctgccgccgccgcctgctgctggagcaagcgctgcttcttcaactagtagttcgactgccattgtggaatgcaacagcttccccgtgctcgaggtggataagtaccggaggaaatcggccgggttcctcgatacgttcaggcggatcgtcagggcagtcatggccatggtctcggcggtgatcaccgggaaccatttggagatatacatggctttcatagaattcttcaaaccgaactgagctgacaacatttgcatctttgcggtttggagctcgtgtgtttgtgcgcagcaccagtttctccctttaaattatagatttgctttcagaacttgaaaatgggtttgggtggtgtgtggtggttcttgcaagttgtaataagggggaaaaaaaggaacacatttgttcgtacaattttcaacatatatgtataagacgatcagtttaactggataaggtggttgtttaagctgcagagatgtttttggattttgagttatgacaacatgcaaatgattttccgaatgtaaattataattaaattttctttcagaacttgaaaatgggtggtgtaaaaaaaaacatattcttcatgcaagggaaccgtgaatagttcaaagtatagctcaggtgacatggtgcgagggtgttcgcccagtcaacctgggtcctggttttgaatcctaaatcagacttgtcgggcctgttcactttaatgtcattttcaaccttaccaagttttaataaagttgccaaaaaaatggctacatttagtttgtagctaaattttggtaactatataaaaaatcctgccaaaattttggcaagttaccaaaattttcgcaatgccaaaatttggtaaggttttttttttatcaaagtgaataggcccgtcatctcatggtgtttcttgtaccccttattcttaatacaaagatagccagctccgttattcctcttttttttttttgaccaaacgttattcctcttttgtttccaaaaaaaaaaggaagcgcaatctggcatacatgcatgcaaacacgaaccacttaacagttggaacatctgaaaaccccggccagccagatgctgaatcaactgtcgatcatgccgctgataggatttcgttagaaatagatacacacacatatatgcatacactgatacacaaaagcttgacctggagaatcaggccagagtatcaggttgagttgggactgtgggagctagtacaatcacagagtcgttctcaaaaactgtacaatgaagtagagaacggccaggaaaagcgcaatctggtacacatcttggttcaatccatcatccggcctttggaagaactgcaatattgaacacaaaagctcaaaaagttgaaaacactatcactggatagctacagataagtgggtgggtttatataaagtgacatcaatttttgcaatgtatgattcatgtaccttagtaggatcccctgagggatctggataaacctccaagttctcatctttctttgatgatagccgagatgctgtaccctttgcagcttcgattgtgtcctttccggcttcaacagtggagaaggccctcctggacaaccaaaagtaggcctgggcaggaggagacgaggcagagaggtcccatgagtcgacctgttcgagcacttggccgctaatctggttcaatacgaactgtgaggtaacagagacgatcaggtctcctccgatggttgcgaagattggattcttaggtttgcctctgaatgtccatttgatggtcaggttgcttgtcgattgcattgacatttcctggactgtctgacgcaataacacgaatgctgattagatagtcagactggaatcaatccaaactcatgagcatgccaatgtgaaataaggagagaggcattctttgtttgaatttgaactgacaaagtcctttttcttttggacagtatgttatgcaacttgtttgggttagatatcttacaacagagttctaacttcatggatatggtatagaattgcagcaatccttaccactgtagggttttcgagtgccttggtgatccacaatggcctcttgtacttctcccgtccaacaaatgttctgaccgggtcctgaaaaaaaaagaaaggcacgaaaccacaaggtgatgtcaagtagctcatcagttattgtatctgcatctggacatcctaatctgtcactagttcagtagtttgtttcttgctgttgtttgagtggtactttcgttgctattcttcttaatataaaatcagcatcagcctggctaaaacttctgaaaatggaggcatgttacctacttaaacattcatcagatttcctcggggaaaaaaaacattcatcagctaacagcagtattttgtgttggttcatagagcttttgcaagagcttctcggggtctactctgtgcctgaaactattcttgttggtgttgctaaaccttcggagcgaatacgcaaaagcgttactcgctgattgaaatggcatagctctatttttcccttccaagaaaaaaaaaacagatagtactgttaaaaaaaaaactacagatagtgtttgccacagttcatggaatcccatgatcatatcagactcgtagcttacatgtttgctagattaacttgaaaggagatgcaaagcattggtgcgagattggtaccaaattaatgtctgaattactgataacacatagtacggagtagcagtaaagtggtaattggtggtacaagggtgatgcgcacaccttgtatttgacggagacggcgtagcaggtgaaggcgcggttgtcgtcgcggaggtcgaggatgtcgcgggcgagctgcctcgcggtggcctccacgtaggggctgcttatgcactcgaagtcgttgcagagctccccgaagtccatcccgtccaccagcttgtccgtctgcgacctctcctccgcaccatctccggcagccgtctctacctccttggaatcatccacaactgcaatcacgcacagagccgggagttaattagatcacgtacgtgcgagctggaccgcacggcgagatcgcattggtgagatgagatcttcaccgtgcaggggggcgaggcggcgttggagcgcgggagcatggcggcgggagaggaagccggtgacggcggcggggatgcctcgccgtcgccgtcgccggggggaggaggagggggaaagggtgcgggaggagaagagagcggcggcggtggcggtggcggtggccattggtggcccatggcgcggtcggcgtggcgggacgtgaaaaggcgggaggataaggcgcggcgctccacggcctctcgttgccacatgtggcctccgctccattagccctggcccaacaactgctagtccattccatttctcatttctcttctatttttcctcaatttttttaagggaaaacaaaattggcccgtgccaactactataggtctagtattttctagtggactgccttcttctaggcccaacgaggaagatgtatcccaggatgggcatgactttcctgagctttcacgtgcctctagcttcgtgttttgttgaagaacacaatgttttcttatagaaactgttctagaaaatcatgcgtcacttatgtaattcttgtattctgccctctctgtttcatattcattttacgagttactttgattaagtatataaaaaatatcatagtattttcaacacaaaacaaacgtattattgtaacatattgaatattagatttgataaaactaatttaatgtattagatattgctgaatttatttataaatttgatcaaacttaaaaagtcaaaggtacatgtaatatgaaacagagaaagcagatgggactgcaaatgggagatgattttgtggatgaagtataggtcctgtttgggggagcttttagcagctgcagcttctcctagaatcttcagttgccagaagctcccccaaacagttcatcttttaatctagattttgagaatctgtagttgtagaatctgaaaaatgaactagaagctagaagctgggacccagcttctccagattctcactagctagcttctcagcagctcattctcagaatcttaagctccccaaacaggcccatagacacgaagaatacctctgttgctccaaaactgcccagtttacggacaacaaatcgaaagatgcacctgtgatccgggctacatgcaacagataaaatatacttgcatcgaagagtactttactcctggaggtaatcatatacagtatggtgataaagtagtgagttgtcctctttgtagtggaggaggtagtagcatttgtcgcagaaataacagggattgttcagagtccacttgtcgtccaccgtcatcttcgtggcatggaagatctggcacaccgaacacttctgtagccgcctctgcatctggaatgtcatgagagggtattccgcttggttctgtgtgtcctccgggtggatcaacctcatgtccctgatcacaatcatgtgtttgcagtttccctgaaaacgtatgtgcagggtattgtcagaaacatgggggaaagggttgtagatctctacctcaaccatcatacattactacagcttcaagttaatcgattttagatttcatcacaaaacatagataacaaacaacacaaggtttgattgtgactaaatgacgatttgatttccacaaaaaaagtgatgcagaaacatcacaacaataaaggcataaggagaatagataagaacctgatgacagtagaggtacccagcaccgagacggaagttcagatcagaaaagcgagtcttttccatttttgcagatttaaaatcaggaacatttgaaacattcaaacccatcagtaaatccttttgtcgtttcttcagcacaccagaagtaatggcatcccacttctcttccgcctcatttctggaatttttaatccagtcaagtataggtttactataatcaacagtagaacgccttgtgtcattatagaatgtgtcctgacaatagagagcgttgattaatacagttgcaattctttaagaacacacagcaaatttctgttcacagatgcatacctcaataagaaaataaccagaatgaacgtgttgctttgccacattcatcagcttgtctttgaaacagtaaatattgtctctaagatctgtaaggagctggcttcccaacactagaaattcctggctctgcaaggaaaggagatcaccaaaaaatttattccccacatatttcaccctacaaataagtataccaaaaaatatatgtatataagtcattactttcacagagccatatctcttctcataaacttccacacacagaagtacttctggatagactacaggtctgtgctccccaggtttgaaagttttgttctgggataacaaaaatggttagtgtgaaatttgagacaaatgagccacttgtgtaaaagagcaaatgaaataggctatagtttttaatgcaaaccttccaagttgtgctgatgtacctaagagattttgcaacatcaactttctcagctgatggcttagaaactttggccaacacagaatcaccactgcgttcaaaaaaatatgtttatagaaggctgtaatgaaaacaatataacagataaaatcaaatcatctagttatggccataagtgcatagcctggacagctgtattttatacttatcttattctctagtggctcagttataaaaaggaagcaaactattcctaccgggcataccatatatgatttacataaatgggctaataaataggatacatgagtaaatgtatgggctaatcaaaatccagtattaaggggaggtaaatttctatacctagttagttcagccagcacagaagtaccaattttttactgaaacatgaatctagccaaactgggctgcatcctgctatcatctgaaccacaaagaacgatttacattacttttacactgttatttgccacagcccatcagtaaaagttcaaattacttatcaacagaaattccacagctcttcagcaaagctgtgataacaccatcccattcggtagaaaattaaataatatatatctatgagcttatggcacaatcagaaaatggaattactaacaatacatacccacaaatcaaggtcaaataaatacatgcccacaaagttaactgttttacctgaatgagtgcaagctggctgcatgtttgtcttcctcttgtttggccttaatttctgccatcttcactgctttagtaagatagctcccctagttatagccatgccacaacatatgatgacgcaaaaccatggtcagattttccagagattaacaatagatgcaagaagaagagggaaatatgtatatatatttttttagagaaaactactatacaagataaattcatcagaaaatgcatgcaattaagcagagatgcaacattagggtaaggcatacttgtaaaatatgtgctcgaacttctctatcaaaatgcctgcctctctttttgccctttccgcattttgtatctccatctgcgcctgcagcatcatgtgaaacaacttccagatcctcgacaggtggtacagactcatgtgaaacaacttccagattctcgcctaatgaatttgaagtggtatttccaccttttttcattcttcctctggatttccccttcatgccacctgttttcccttcgatgccttgttgtggtacgtatggtacaactgccgtgtcaacagatggtccaggtatctccgtttcaactgacgaatttaaggtcggagtgacattttttcgcttcctgcctctagtttccccttttacccctcttgttttaccgttgtttccatgcacatgtggtatgcttgccgtatcctcagtaggtgatctggaagtctctctctcacctgatgagcttgatgtgatagcaccatttccaaaggtggaactagctgacattctgcatgtgatagttcgaaagaacatcagaccctatcattttgtgagccacataagacatgaatattaaatataataatatgaaaagaaaatttagatgccaggaattcagctacaagccataaaaattgaaaagagatgatttggtgcataaagtgcaaaccgctgttccatgctaccaattcacaatagaactttctttatgagttggcatggaatgacgctatccaacaattaaccgtccgtgttgcatctaattccaactcgcataaaagaagcaccaatcaagcaaaaatagcttaccctccatcaatcctctgatcctccagctgtgacaaagcagtggaatcccagccctcctaaaaacaccaaataacagagacatcacatcaaaatattgttcacaaaactagaactacaattaagcacattagcataagctcgataggaacggtcacctccatagcctcccggagagcgcgctccaccagctcctcctctgagaggaccctcaactcatctacgctgcagaatccacaaaatgtacaaaccagaacacgaataagcatatgaacaacatgacagacactgggggatttctccacctgatacggcggaatttggggggcttaccagagctcttcgtcgaattcatcaccaggatcgcccaattcatctttcagcgactgctcgcaaagtaacacagaacgcgattacaccaaagcaagggcacggattgaagagctagggtttggcggtgtgctcaaggggattcgaacctgcagctcgtggagcgcggaggacatgaactcggggaccgtggagacgggtccgaccatgaaggggacgaacacgggcccgccacgagcgaagggcatgcgccgctgctcgccggcggcagagctctccgcctcctcccccgccgccgccgccgccatcgccgtgtgtccgcctctttcgctggttgggggggttttcggcgccaatgcggtgggaagaaggctaaaagctactgggcccagtataaagcccaatatgaagaatcactactgggccgtcgtcgtctccgtcgagtatcgtctcgctccagagcactcggctggcgggcgaattttttttttaatatttacagaaataatctatcgaccaaaaaaattgcagaaatagcccctgccgccccaatggtgggcggcaagctgacgtggcagacggtgggtcgaccacgccgtctgccgccgtcggccaaaattgcgattagaccctagggcggcaaggggctaattgcaattttggccgcccataaagagcttgcggccgtaattttttcatctgggtcccttgccgccccaatagagagcgacaagggacccaaatgaaaaaagtacggccaaaagatatttctatgttatgttaataataaataaagaagtatttattggtaaaacttgttaatattgttataaaaatgtattgaagttggttgttgcgcaatttcatatgttaagtgaggtattattttgtaccttattcgatgtattagtactcagataatttatataggcctatcgcagtctgggtcatagaaacattatatggacttaaacaaggagaattatgtaacatgaagaaatagtagtacaatttgaacatgatacaactatttccattgcggttacatagatgatattagattcgaactaggagggaggtagtgcaatagttgaacacaacgacgatatagtaatgggacaaggaagcatgacagtagaaatttcaatatgctaagttgtccgataatagctaacccctacgtgaggatccctctcctctctcaaaccgcgctttagtaaccctgtattgctctggtagttcaagctgcacaacacggctaggtggagttagaacccttctggtatctatccattctctgtattgacatctccttggtggttcctgggaggaaagattaaatgtaaagcaagcaaagttagtaaatgttgtgagaaaataaggattcatgtaatcaaaatattcttaccatgaaatcgtcgtcaagaatatttggacaaacaaagaaccttcgacccaatgttgtaggatttatggaacaaagaacctgacaacgatcaccacacctgcatcttggacgggcttcccatggagggagtgccgtagttagcacccgccagtcgctctgttgttcacgacattgtcgttcataagccgcttttctctgtaagtattgctcagtactttcggatgcgaaataccagcaaccttcttgtaaacaagtggttaggtcgagaacgggattttctgtatcgacccactcgatgtatgcacaagccgtagtgcgggtctgccgaatagagtagtgttacgaagaataaagcgattgcccatacggaatgaataagcatatgcagataataaaatacctcacggtcatagttagggcacctaaaaaagcgccttcctcgaatatcaggattcctcgaagccattaattggcatcgatcaccgcataggcagagaggacgctggcaccaaggtggtagtaggtatacacaaggatcgctacgccagtttggatcctcaacaccccggcgtctagccattgacgaaagccggttggatttgtaatgaagcaagtggggaagagagtactgaatgtgactgagttctgaaagattgtgaggcctcactcgttaaggcgacttatataggcgcaaaaaatcgagtgatacccctgacatgtgaacgtggtggggtatggtgggtacgcctgattggcgccgaaagttacatgcatgatcggcgccgaaagttacattggtcgtatgcgccaaatggcgggcaaatatcgtatcgcacgcgaataaaggaggctgcatcggtgcggcagaaagtagtcatgcatgcgccgaaaggtatcgtgcatgcgccgaaaggtatcgtgcacatataacaacaacgtagtcattacacaagcatacagtactgaaaagtgaagcaaataaacaaagagaagattgctctactggccctgccccgcgccgcgaccacgcttggtcctccgggcctgtgctcgcacgtagtcctgggagtaggtgaaacgatccggtggcacagcacgggtagcacgagtgtcccgcggaggagtggcctgcgcctggtcctgcgtctgcaccggcggtgcgcctcccagctgtgaggggccgatgacatcctctgtcgagcctgaagcgaagtcgaagtcaaagtcagtgatgtcgaagagcaaggtggaaggcagcaagcggtccgacgaggtcccagcatggtccagtggtggaccctgactcgacgtgccggctgcctgtgatgaagtcccggtgtactgccagaactgcgctaagtgcgaggtcgacgcagctgcctgagacgctgaccttgcagcctgggagaagtgggcggcctgcgtcatagcgaactgggcgaaacctacacatcgacaacgggacccttgtaagctaagacataatgcatgtaaattgattgtcgaagtaatgttgtttttttaagtacctgtggggggcacaacagaaggcctaaccgaggaaggcggggtgctgaacggtgcacgaaaccctgaagcaatcggcaggtgaaacggctcacttatatgtgcgaggcatgtacagaaatagtaataaaaatacttacctccgtgcggagggggagtcggcctaggaacgtgcgcagctggacggggaccagtcagtacgggtggccgctgtacagctgcgtctgcccgagcaacgtcgtctgcacgacaggtgagcactcggagaatcgagcgcatcgactccaccatccgcgtgtacgtcgtcaggtgctcctctacgggtaccggaatccccgcgcctaaatgttggatcgtcgttgaaccatcaacgacgacccggttgatgtcgtcgacctgcatggttaatttgttcgtaaatattcgtaaaatttgatgaagagaaagacatgaaaacataaaggaatggtgcgatgcagggtactcacagcacgagcgaagtcctggtcgtggtgcctggcgtagaggtctctagtgctcgcaacgtggggctgctgctccaagggagcgaaggtgaccctagtacgggtgcgtggctggtaccagcgtaggtaggcctggtacgcctcctcagtgtgtggctctccctcgtggtccacgacctcctcggttgcgaggaaccagtcctcaacaaaagtcgccaacgttactagtgcgaaacgtgccgtcagatcgtcctaccagtccacagccgtggtcactggcccaacagcgtctcccgcgagcggtagccccaacaagtacgatacgtcctgcagggtaggggctacctcaccgcacggcaagtgaaaagtgtgtgactctggcctccatcggtcgaccaaagctgctaggagggacctgtccacagtctattgtctggccgggtccgcgtcgccggcggcagcctccaccagccgacacatcggtaggaggccggcctcacgcagcctgcaataacaaattaatatgtcattataaaaaatattacagcgcaactaacttatagtaatacactgttcgtacctctcgacaaaggagtcgtgaaccgtgagtagctcaccgcacgtccgtgcccggaacgtcccaagctgagccccctgcaccgcagtaaggtgagaccggtgtcggtgatctatcgccgggtccaacaactgaggtgtatactgacgtgccatctctgaaaaatatagtgtttcgtgttagaacaattcagaaagtagtaatgtaaaacaaaagataatttgcaaaattatgaaatagtaataaaatcatgagaataattatgtacaacaagagtacaggctatttaaatatagcaaacgttactaatggtacactccgatgacgtgcaatttaacatatatgtagagctcgataatataacataacattacgtgtcgaagtccgacatacatcagcatacctaaagacgttaggcgccttagtccgacgttacatcacgagaccaaaagacatgacatgccgaagtctgacattacacgacgaaacatagaacataagaactacaccacggagccagacgtggcacgacgacgcctaggacgtggtcgagtggaggtagtgccttcacccgtagggcgagctccatctgctgttgatcctgatagtcctgcctccgccgcacttggtttctccttgtctttaggacaatgcttgtaggtgtgcccatgttcatcgcatttgctgcaacgcttcaccctgccagcctccgactcgtccatatcgttgcggatgcgacgagtcctcctccttccagccttgcctcggagcttcgatgggtcaggaatattgagtacttcatcgttagtctctgtgaactccccagctatgccgaacccataaatctcgccgctccatgtatgatatattgcttgcttactgaagtactatgacacatatattgcatctggtatgccacactccgctgcggcagcaatgacatgggtgcatggcctgtggagcagcttcggctttgcacaagagcaatgacatgtgccgtcggctttgagaacacactcctgcttcactctcttgcggtagatactcatgcctgccttatcttgacatagtatctcaaacctgtgctgttgggtaccttgcactagagctcgatgtttcatggcctttttatgcaactcctctagctttttctgcatgaaagctccaaacaaaatgctgttattcggcatagagggaagaactgcctggaaccgatccctaaaatacctgcatgtcccatgtaaaatgaactccactatgccaactagtggcagtccacggacaccgcgcatcacccagttgtaaacttctgccaaatttgttgtcattattccatatctagcaccacctgtgtcatacgccttggcccatttctcttttggttcatgcagaatccactgagaaaatttccgaatctccaatccagttcttctaaccaatgttggactatccgttgggagaggtccaagagcttgaggagggtcagcaacggcggtcgatggagctgctgcacgctgatcactgcatttggctgtcaactcatctaatctcttccaaagctcattgaattttttctcctggttatgattgcacagcctcttgaacatgttcatgagctccttgttcttgaattgcttgaagaaatcagcccccatatgacgcatgccccacctactctatacatcttcccaaacaccggggtatcctcgttccatactcccaaactgcaactcttctatcgctcgcagaatgccaacgtgcctatcatgtatcatgctcacatttggcctcataccaacaacttttgttttaaccaatttcaggaaccagtaccagctgtcggtattctcactctcaacaaaagcaaatgccaagggcaatacctgattgttcccatctacccctattgctgttagtatctggccccgatactttcctgtcaagaatgtcccatcaatgcagagaacaggacgacagttcacgaatgctatcttgcatgcatgtagagctaagaacgccctttgcagcacactcttgccaggatgttcaattgaggggaatttcttcacttcgtaagagctctcagggtttctttcctcgataacaccaagcaggcgtggcaaattgtcatacgaggcttcgtaagttccaaatctcatctctattattttctgtttggccctccaggccttggcatagctaatagtatacttgtatgtctcttcgatgtgtcggattattgaccttggttcatatgtgagattatcgatgacatgcgcatacatctcagatgcaacaaatgcacatgtaatgttcctgtggtatttctgaacaccaggtagaaaacatgtatgcttggtaacgactgacactgtccaataatccttccatttccccttatatgcgtgcactctccagggacaaccatcttttttcttaacacaccgaacttcatattgcgaccggttcgacttggcaacccaaaactctctatgaagtgacactgcaaaatgttttactgcttccttcatatcttcttctctactataaatcgctccctgaataacctcattttctttgtgctcccatctcacactatcctcttcagagacgatcagcccagaaaaatcctcactagcccattctgctggattaatatccgtctcatcatctgacgaatcaccttcctctacacgctcgttgtcagaatcctccctctccatttcatccacaatggcaccgacagtctccccctcgtcggccacttcacctggttgaatgcccactggagctactacgcccccgtcctctcgtgcgttgacctcctccacagaagtctcatttacttcagcacttggtccctcgccatcatccatgttcatctgcacacctggatccttcgggtgaacaaacggaaccaaagctagaggccacccgcgttgcaatgcattttccaaataccatctccacactcgagagttttgaactggcattagttcccaataaaaaccctcagttgcccgacttactataacattgattgttatgtcacttgtctgtggatcaactctcaagcccctcattaactatccttttatagaaggtacactcctctcagccggtctatcaattcccctttctgatacaataaaatctgacagatctaccccagttggcccgtaacggacgtttcctggtccatggtaaacttggaatatttgtttgttcgacatatctgtcaatgaaataactagatcatattactctttcatgcaataaacatctacaacgtaatatcttcttgtgtaagccaatgcaacggtaatgtattgattccaaactagcagatctacgtagttaccgatatctacaatacgcacttctagattagtacaactaaaaccctaaaaatataatgcatttattcaaacaaatttttaaagaatacacactatttaactcaatagtcacatataggatctatgaatattacctgaaatcggcgtctgaatctggcagggcttcgccccttcttctcttctcctcccctctcttcttttttttttcactggaattgaggagggaagaatgagggctgggggctaggcggcaggccttttataggcagcgaggcctgccgcccggctagagggcggcaaggggccgcctgcaaaatggccggccccgactggcttttttgcattcgggccccttgccgccccaccagagggcggcaagggttttcctgcaaaaaaaccctccctccgtcaccgcccgttcctcccccgtttgccacgtcaacttgccgccctagaggtgggcggtatggtctatttttgtaatttttttggccgatagattatttctgtaaatattttaaaaaaaatctaaaaccgaaaaaaattcgctggcgggctgggtgctctccaccgccgacccgtgactcggcccggtcgcaacgccgccaagctactccactatatccagtattatggttcattgataccgattagatttagctactagatgttaagagagttacagtaaacttattcctatttttattgaaattgaattattcttttatgaaattgaataaagactgttaaattcgcatacccaagggtactaaggccctgtttgttttagtttaaaattattgtaatctagattattgagtcagattattataagttggattataaaaagcctacatagaataagctgttagctgtttgtttctctgaatcattagctctacatagaataagttgttagctgtttgtttctctgaattattagctagttgttaggtgttagccacccagtatagctgtttgtttctcggaattattagctagttgttaggtgttagccacccagtaatctaaaaaaacacctttagagtggataactagattatagtaatctagcttatagattataataatctatcaaaataagctatctgtttgtttcatcttacttctattaatctatattataatagaagtaagatgaaacaaacatatagcttattatgatagattattacaatctataaatccactctaaatgtgtttttcttagattattgagtgactaacagctaacaaacagttaataatcaagagaaagagaaacaaacaatcaggtttggaaattccagtcatttcggacctcctttgatacgatattatttcggccaaaattttattttttttaacttttcatgaatttcagtaatatttgttcaaaatttcggactaaaatttcagaaaatttggtctatcggtgacctccgatacagtcggtcaatccaataaattaaaccctgcaaacagtttattctatatcagcttgttataatacagcttatagtaatctagatcaataatctagattacaattaagttaaaacaaatagagcctgaatcaataagcatgtaaaatggatctcaaccataatagatttacaaagtcatgtttatgcgtcacttacaaagttatgcttatgcgtcatgtccaaatacgtgctcattcaaataattggtttcgataagcaggtttccgttgctacaaagagaaaagaagatctatcaggtttccgttgcacaaagagaaaagaagttcccatgagtcatcgcttgtcaaacgttgtttgacgatatccttctcccaattattatccatgagcgccaattatcatccataagtcatcgcttgttgtttgacgatatcttctcctaattattatctcgttttcaatctaagataattttccgtgaaaactcgataaaaaagaggaaactcggtaaaaaaaaaaaagagtactgggattgctggttctcgttctagttcgttgaacatcaatttcacaaataagataatccaattcatgaacatcaatttcacaaaaaagataatccttacactgctatctaatcaaagtataaccctccagtctctccaggattgctatctaatcagtctctccaggtttgctatctaatcaaagtatcgatcgaaaatccatcagtttatccaggatttcatcaacacagaagtccagcgagctctgatcgtcccctcctcgcagcggctttttccatctctgcataaatcaaactactatatacacaaaacattctcaaaaacaaaatctttagtcaaaaaaacactcacggttcaaatgactaccgtttcgccgtcgtcgaacgaccacagccgcagcggttcgccgccgtcgtcgtccggcaagactaccgtttcgccgtcgtcgaacgaccacagccgcagcggttcgccgccgtcgtcgtccggcaggaggctttgtggaggagggatcgcgtgttcgcgccagattgcttcgaatcggttgtgctcgatcatgtacccgcccaagttgatgtgctcgccgtcgtacgcgacgccgttcccgctcgccgccggcggcggcgcggcatcctcctgggagtccaccatgagcgcgcccgcgtgagcgtgcgcgtgcgcgcgctcgagcgagacactttgttcagcctcgtcggcggccttctggatcgtgtcgctcgcggcggccagggagacgtcgatggatcggagaagctccagtagctccacgtcgggcatggcggcgatgccgtccacctgcgccgccgccatggccaactcgccgccgccgccgccgggtccttgctttgcggcggcttggttctcgcagtaggaggcgttgtccacggagtgcttccgccgatccttctccggcagcgatttgtaccgagtggcgatcgcccagacctcctccttcgacggccaccacgtcggctcgcccccggcgccgacgcccgggcagatcacggcgacggggacgtcgcaccgcgtcgcgagcgagctcgccttcctcaccagcctctccttcctcatctccaacgccgcgcgccgctgctcgccggcgacggcgggggtgacacgagcctctccgccgccgccgccgccgcgcggcatcggtgctcccatcatctcaaacgtgtgcgtgtgctagcagatgaatcttgtgctagcagatgaatctcctctcgcgcgagttttgtaggctgctccccttccgggcccaagaagcgcacggggttgggcctgaacacgacccggagttcccttcttttttttttttttggaaaaagtccacttagactcccttaattgtttaccaaatctaattggtgaccattaactgaaacaccggataggatgactccccgaattattgaaactagtgcaatttgactcctccaacggttttacaggacggttttgctgacgtggcggtgctaacccgattttcattctacgtggcgctttcgtgtcattagaattaaaaaattgtttgtgggacccatttgtcacacacaagaatattatgggacccaccgacatgtggggcccacatgtcatcctttctccttcccttcttcctcctccctctgtctcccttctctctcttttctctcccccttctctgatctgatctcccgggggcgcctcttcggcctcactcgacagcaactcggcgagatcggcgagcgtggtgaccgacgggcggcggcatccatgagagcaggctcccgggggcgcctcttcggcctccctcgacagcaactcggcgagaccggcgtgcgtggtgaccgacgggcggcggcatccatgagagcaggccgggcggcgcagatggagtcggcggcgacgcggcgtggatctctggtggtggtggaagcggggcggagcccgaaccgtcctggctcgcggaggatggccggcggccggtcggcaacgggcgcaaacacccggctctggcggcgaggccctccagggcgggcgccggtcggcgacgggcgctcatccccctggtctccggcgaatggcgtctttctctcagatcaatcagcaccatcttttcacaagatggccggatcgagtcaaactagaaagcaacattgtatcaccggggagattccacgccatttgcagctcgacgacatagacacgggcacacggccgatattacgcgtacagcaatctgacaaacgcgttgttattcccctctccaaccttcctcgatcgtatatatggcagcagcgcagcacgtcgtcatccggccatggacgtcacgggagctggtcgcctggtcaggccatggcggagcagggagcggaggggtcgatggcggcgttgagacgaggcgatgcgctcggagccgaggacgccgtgggagcaacgcggcggagggggcccgacgacgccggccgtggacctcggcgcagagggcggaggagatccggcggagaccgaataagggaaggagatcagatcagagaaaagggggagagaaaagagagaggagggagagagagggaggaggaagaaggggaggagaaaggatgatacgtgggtcccacatgtcggtgggtcccataatatattcttgtgtatgaatgacagatgggtcccacaaataattttttaattttaatgccacataagcgccacgtggaatgaaaaccgggttagcaccgccacgtcagcgccacataagccaaaccacactctaaaaccgctggaggagtcaaattgtactggttttaataattcagggagtcatcctacccggttttctagttaagggtcacaaattagattcaatgaactattaagggagtctaaggggactttttcctttttttttttggcaattgcttatttgaccctgttttgccgatttgaccctaccttttgaactttgcttatttgaccctccttttcgagtacgaaggttccgtctgaccctctttcgctgactccgttagggttcaatttttttttaaaaaagaaaatgtttccagagttcctaatggcaaaaataccctccaaagccaaaccctattctgactctctctctctcactcgtgcgtacctctctctcacttgtgtgtgcggcggcggctagctaagggggcggcggcgacggcgagctgagggggcggcggcggcgtcaagcacagccccgccggcgcccgctcgttgtggtggagggcagcggcggcggcgagctgaggcggtggcgacgacgtgatgtacagccacgccggcgccctgtcacgccccgaactagtcccgactggaactagcccgtgacgctccaaattaacctgttaatcgataccagtcccagaaaacagtgctggtatcacaggaagacagaatatcacagcaacagaggtctctttattatagagtagtagtacagttatgttgggctgcggacagaccccgagctcacaactgcattacaaaaggaaaacggaagcaggacttggaccaaacaatacaggcacgacttgggaactaggccgaaaccctaaaactcatcgtagccggcttgctcctggaagaactcctcatcagcaggatccgcttcatcttcttcagcaactaggggggaattatttatatagggcaagggtgagtacgggagtactcagcaagccaggggaaataagtgtttaatgcaggcttcaaggagagactggtgtttttgcaattgattttatttgaactcttttctgaaacaactaagtgagtgcttctcaaacgacacggatgagacagtgcgtctcgtccggtcggagtatgtgccatgtatcaatctttagaaatgaaaacaaggttggcacccggccaacagcttttcaacggccacccgggcctacaacttttcaaacggccacccgggcctagctgatcccatcagctacagattttcaaacgtcgaaccccttttcacaacagcaatttcacaagcagtagtcaaacaaaactacgctatgaatcacctcacatccgcccatgaccgtgggcacggctgttcgaacagtttgttaacctctgcagagggggtacactttacccacacgacattactaacccggatcacccagcccgtggggatcagccacgtcgggagacctccaagctttcatgacaaggtatttccaaagctgacacaggtttaccatatgccgacgagaggggtcccagaccaacaacaggttaggtcccagaccatactgtgccaggaagcccaggggtcctccccgacaccaccccggcgaatccacatgtctctcggcatcaaggcacccctgataagctagttactcagccaggggtgtcccattccacccatatggtcgtacttgtcttatgtttggatgaaattccaaggaaacggtccttaagtgcaagaacgggaaaccgtacacccggtatgttccccggtccgcggttttggaaattcatttagttcgcaagcaccgacccaggtgtcgggttttccaagtcttttgcaaaacccaagtttttacccaagttgttactcagattttaagtttgaaggcgtccgtcgatactcgcgcagggtgcacgaatatcgagacgcaactagatggttacaaggggacatggtatcgcaattaacaaagggaggatcaaatgcaacaaaattaggtaggtccgccaatctgccttgcagacgggacaagcagatcaagtgcgatcctatcagtgcataatattttgcaagcaatataattaaatttcaaatataggctcaagatggtcaaaggtggcttgccttgctcgagagctgaagcttgatcctcgaaatcctcgcactgcgggtcttagggctccgaaactacacgcgaaacgggacaactcaacaaacggcgaaaataaagccctattaatgacctctaagcgtgctattagatagatctcgagatttgaggaattttggaagttgaacggagtcaaacggatctacggttgggaggatattgaatttctaagattcttggatttttcgtctaaaggaaaaggatttaattaaatccttattggaaaagaaaagaaaagaaaagaaaagagggatggaaattagacttccctcgggcggctagggcgcggcccgagagaaaaggggcggctcggccgagcttaacgggccggccggcccaagaaggcggctcagaacggcccaagacgcgcgcgcgcgggagggaggagagagagagccggtggaccgggctcaccacgcgcggtcccgggtgggacccgcttgtcagcggcttggctcaccgtgcggagggagcacgcgacgcggcgctagggtggggggaaggacgcggtgcacgcgcgcggttcgcggtggacgcgggtgcggcgggcccacgcgtagcctcacggctcgtggtggagcgcgcgcacgggaagggactgaccggggtcggctcgacccggtctaggctgagctggcgccgacgtggcgcctacgtggctgccacgcgggccggcgggaggtagacgacgacgccggccggaacggacggcggtcgacagcggcgagcggcggagcgaaccacggcgataccggcgaaagcgagcacaccgggtggttgcacgagacgaggggagacgagccaacggctcggattcgccggaggaagcttgacggcggcgaatcgcggcggcggcaaccggcggggagggaagaggggaaacggcgacgaggtcacgaggggccaattcccggcggcgagagcatctatgcggctacgggaatccgatgctagcgtcggattgggcggagctacgccgagcgaggctggcgacgagcgggtgctacggagctcgggcggcgacggcggcgggcacacggcgagtgacggcaacggtcggggcggcgccggctagctacggggaggctactcgtgctaccaccgaaaactaagggggggagatggagcgaggaggaagaacggagggaggcactaccatgaagaggaggggcgctgagacgagaggccgacggcgcgggagtaatctctccggcctcgggccggggaagaggaaggagagggcgcggccaaagtccccttccgcgtcctagtgcgcaccggctcctccggcacacacgtgacggctgcggtcggcgagagggacgacaatggcgcgggcgagaaacagagaagattgggagggggaaaagaggaagggcgggcgcctgggtttatagggggcggcaatgtcggtttggaaaccgactttggcggtcaaggcgcgggctggcgctccggctagcggccaaaacggcgacaggagggagggaggatgacgccggcgggaggaaaaagggaaaaaggagggggagaaagggggcttgcccccttgccgatttaggaaaaaggaggagggaggcggaggcgtcgcggcagagggaggagggctcggcctccgtcccttggcggcttgcgcgcggagtggcggggccgaggcgatgacggcggcgatgacggcggggcggtttggagcggcgcgacgacacgggcgacaggcgcgggctggcgcggcagagggtgacggcggcggcgaccagacggtcggccactcggcacgcgcgcgcggcttgcagcgggagggcgcggcggatggagaggcgcggctcgagcacgcacgctggctgcggggccgagcggctgctggcgcggcagggtagcggggccgggcggcgcagacgcgacgcgggcgaggaccacgcgggcgcgcgcgcgcgaacgacgcgcggggagcggaaaggaggggcggaaaggaggactcggctcggcgcgggcggctcacgcacgcgcggacagagcggagggagcggaggaggggcgctcggcgcggcttgcgcgctcgcgcacgcagcgcgcgcggcgcacgggcggggtggagcggagggagagagagagagagagagggcgccggggagggagggggagatgggccgagagggattcggcccatcgaacccgggggaggcaaacttgacttttgtggaggaatttgatttggagggatttggattcggaattgaactcgatgatagatcggggattgagatcttgagatggcacggacactagacgacaagcgaagaaacaaatttcacaattagggtttttaagagataattttcccgctaggcgccacgacggaacgggcgatacagaccaaccccctaacaagaatctcgaccccgagattcagcacctaagggagcagctccgggaactcggcgtggagaagatcttctcgctcccaggtcgcctcatcttcagaatggttgctccattggactttgtagaacttgatggtcttccttcgagtttgacgttctgcctcttcaagaaccttgattggtctttccttgtaggtcagattcttttccagctcgatattacccagggggacttgctcttctggaactcgaagacatttctttaactgagatacgtggaacacgttgtgcacatctgcgagaccttcaggtaactcaagctgataagccacttcgcctcgtctggcagttatgaggtaggggccgatgtagcggggtgctaacttgccggacatcccaaacctcctcataccacggaggggtgatacccgcaggtacacatgatctcctttttcgaacttaaggtcacgcctccgattgtcagcgtaattcttctgacggttctgcgctgtctttaaatgttctcggattagcttaacttgttcttctgctgccttgagtatgtcaggaccgaataccagcgcttcgcccacctcattccagcacaagggggtgcggcactttcttccgaacattgcctcattcggcgacatctaaatactggcctggtaactgttgttgtataagaactcagcatacggcaaacaacgatcccaagtgccttcgaaatccagggcacacgcacgtagcatgtcttctaggatttggtttactctttctgtctgaccatcggtctgcggatggtaagctgtactaaagtttagatcggttccgagggcttcatgcaactgcttccagaaccttgaggtgaactgagtgcctcggtctgacacaattttcttgggacagccaaatctacatacgacatgggtcatgtagagttctgctagtttctttccatcataggtggttttcactggcacgaaatgagccggtttcgtgagctggtccacgattacccaaatggagtcgtacccgctaggggttcttggcaaaccggtgatgaaatccattccgatttcttcccatttccactcgggaattggtaggggctgtagcagaccagcgggcctctgatgctctgccttgactctttggcaaatgtcacacaaggctacgtattctgcgacgtctcgcttcattccagcccaccagaaatatgccttgatatcttggtacatcttcgtacttcctggatgaatggagtaggcggactcatgagcttcttttaggatgagatctcttaattccttcttggccggtacacagatgcgtggaccgcaccaaactgtgccttggtcgtctatggagaaattggtgtctttcttctcctgtattctttttattaactcttttatcccttcgtcgtttttctgagcttcccggatttgcgactctagggtaggctgtactgtcaagctggcagggacacctgactgcaccacggtcagcctcaacttctccaattctctgcacaggcgatcttggtcaggccgtattcgagctacattgcaataggccttgcgacttagcgcatcagcgaccacgttggctttacaggggtggtaatgaattccaagatcgtaatccttgattagttccaaccatcttctctgcctcatatttaactccgtctgtgtgaagatgtacttaaggcttttgtgatcggtgtatacttcacatctgttcccgattaaatagtgcctccagatcttaagagcatgaaccacggctgccaattcgagatcatgggtgggataattgacttcatgaggtctgagctgcctggatgcataggccacaacctttcgttcttgcattaggacacattctaagccttgtcttgatgcatcacagaagatctcgaaatcttttcggatatctggcaaggtgagaactggggcagtggtcaaccttttcttcatttcttgaaagctgtcttcacaggctgcagaccattgaaatttcttttccttctttaacagctcggtcatgggtctggctaacttagagaatccttcgatgaatcttcgataatatccggctaagccaaggaagctgcgaatctctgacacattcttgggcgggttccaagcaagtacagcttcaaccttgctgggatctacttcgacaccgttggaggagatcacgtgtccaaggaatgctactcggtctaaccagaattcgcatttcaaaaatttagcgaatagttgatgatccctgagcttttccattattagcctcaggtgttcagcatgttcttcctcattcttggagtatattaggatgtcatcgatgaacaccacgacaaactagtccaggtattccataaagattttgttcattaagttcatgaagaacactggagcattggtgagtccgaaggacatcactgtgaactcgtatagaccataacgcgttgagaaagcggtcttcgggatatcttcagatctgattttcaattggtggtaacctgatctcaagtcaattttagagaaaactcttgctcctttaagttgatcgagcaaatcgtcaatccgtggcaacgggtacttgttctttatagttacttcattcagggctctatagtcgattaccattctttcagagccatcctttttcttaaccagaagcactggggctccccaaggggatgagctaggtcgcacataacctttactctccaattcttcgatttgtcttttgacttctgctaactcattagctgccattcggtagggtctttttgcaattggtgcggtgcctggtgccagttctatggcgaactcaatctctcggtctggtggcatactcgttaattcttctggaaatacgtcgggatattcacagactatgggcaccgactccaaggaggtgacttgtaaacaggttaagatagaccgacttgcggtaggactgttagaggtaaagcggacttgctttcctccaggtccttgcaaagtgatggacttttcggcacaatctatctgtcctttgtgctttgccaaccaatccatccctaggatgatgtccaagctttgcgagtctaggactatcggtttggctaggaagtcaacttcctcaattctaaggttaacttccgggcatatttgagttgcccttatatccctcccaggggaatgtactatcatcggtacacgtaaattttgggttttccaaccatttcttttcacaaaagcttgtgatatgaaggagtgggaagctcctgaatcaaacagaactattgcgggtatggagttgacagagaacatacccatcacaacgtctggagcatcctgagcagtctcggcttgaatgtggttcactcggcctcgaccaaagttgttggacgcatgagaaccttgtccacttgcctgggagctaggacgagactgagctgccgctggagtaggagttctagcagtgctgccattagcatgccctgagctggtgttggtaggattctgagggcactgtctagcatagtgacccatctggttgcaccggaaacactgaactgctgacggtccctgcggtgacttgaaagaggtaacactgtttggcgcagtattgccactaggggcacgctgctgtggctggggtgccggacggttcatctgaggacgaggggcgtagcctggctggcggttagcttgagtgaccgactgatggtattgcatgggttgaccgtagcgagggcgaggtgcgcctcgggaagaatttccctgatggttagacttgcgtttcttgtattcttcggtagcctcttttctggcatcctcaagtagaagtgccttgttgatcatatgttgaaaagtagggaagtcatgagcaagcaactggagtctcattccaactgcgattcccttcaagaacttcctgatcttcttcttgtctgtgtccacttcctcaggggcataccgagccaacttgttgaactgacttaggtactcattgacattgctgttgccttgcttaagtctgttgaattcctctttcttcatgtcaatggtgctttcaggtacatgagctgcacggaaagctgtagcaaactcatcccaagcaatgttagtgggttcagggtgtgcattgcagtaattctcccaccaatctgcagcaggtcctcttagctggtgagaggcgtagagcgtcttctcaacaggggtacactgcactaagttgaattttctatcaacatctttcagccaatcgtcagcctcgacgggctcgacggtctgagagaactctggcggacgagacctcagaaaatctgtcagcttggatctattgttgctcatgtgagggtggccatttccatgcgcattatgctgaaaaccggctacggctgcggctaatccttgcaagatttgtgtctgaactgccattaagtgctgcatgttgttttccacatgaggtggggaagggaggcgttcttctccagaattgtgactggcagtgtggtgagagcggtgagactgttccatctctgcatcacaggaagccgtgcgatgcgagcggttgctgcggcggggttgctcaacttctgcgttgcgggaagcagtacggtgcgaacggttgctgtggggagactgctcatgatttacttctggctcggctctaccatcttcaaaaccaaagcgggctggcgcacgagctgcacggcgggggcggctagccatctaaactcccagaagagggcggggtaagaatcagataagcacttaggagggcaaggagcaaagtaaatagcaactcagatagcacacactaggcataaactggatttttcaaatcataaaaacacctgatacaacgggtgtggacaagtcacagagctacaccgagcttgactgtgcgcacaccacctaggagaaccagactaccaaacaacacccacaacaaacacacgcacgcactacctcgccacgactccaaaagagttggcggcggaacaaaagggcctagcacacggacggctgctgaagactgcctcctctactcctcgtcggcctggctgcctcctgtagtcggctcctcagtcgaagaaacgtcgatcggctgacgcgaagggaccggcggaacctgtcgagggccggcagcagcacgggccgctggcggtaggggagctgggtagtggaaatggaacacggtggaagaaccaacaacacgcttccgcgcggtgcggataaagcgtgggccacggcgggaggaagcaactggggtgtgtccgggggtgtaggaagggctaactgggtgtgggtagggggagtacactggtgagtacggcgcacgcgagctgggggagcgcgggccactgggagtgcgggcagagccgcgggagctgtgggaggacaggtggctggcgtgacaggggcggcctgagtcccaagagatagtgtcaactgaggtgacaccctcctcggccagacgggcctccaaggcggcgtagcggcgggcaagggagcggtaagcctcaaggagtaggtcgtgctgagtggcctgagcctccgaaagctcaaccatgcgagtcagcactggctgagactcgctgtacggacaagggtacctggcgtctgagtggccagaaggaaggcgtggaagctgccggaaggcggagcccccgagacggtggctgtagtcgtgggccaggcgacgaagcgcagtccaggagaggtcctggtacgcgatctggagagtgggcctggccaaagtgaagtggtgtgggcaaggccagctccgtgtatacctccacgggggtagaggtacacagagagctcacagtgagggggaacacggcccacggagtaccccgtgtactcgggacacgagaagccaaggaaacgggcgaggtcacgaagctgagcgacgtggtgaccctcaccaaaaccatgggaactgaagctggcgttcactgccatctacaattttgaaagagggagaaagatcagtaaccattttagaaacaaactattgaaaataaggaaaccaaaagaagccttagcttttcgcaagtagttttgaacttagtatccttagggtcgtcctaaacatcgggtttcgccctagggccaagcctgtgctctgataccatctcttgtcacaccccgaactagtcccgactggaactagcccgtgacgctccaaattaacctgttaatcgataccagtcccaggaaacagtgctggtatcacaggaagacagaatatcacagcaacagaggtctctttattatagagtagtagtacagtcatgttgggctgcggacagaccccgagctcacaactgcattacaaaaggaaaacggaagcaggacttggaccaaacaatacaggcgcgacttgggaactaggccgaaaccctaaaactcatcgtagccggcttgctcctgaaagaactcctcatcagcaggatccgcttcatcttcttcagcaactgggggggaattatttatatagagcaagggtgagtacgggagtactcagcaagccaggggaaataagtgtttaatgcaggcttcaaggagagactggtgtttttgcaattgattttatttgaactcttttctgaaacaactaagtgagtgcttctcaaacgacacggatgagacagtgcgtctcgtccggtcggagtatgtgccatgtatcaatctttagaaatgaaaacaaggttggcacccggccaacagcttttcaacggtcacccgggcctacaacttttcaaacggccacccgggcctagctgatcccatcagctacagattttcaaacgtcgaaccccttttcacaacagcaatttcacaagcagtagtcaaacaaaactacgctaggaatcacctcacatccgcccatgaccgtgggcacggctgttcgaacagtttgttaacctctgcagagggggtacactttacccacacgacattactaacccggatcacccagcccgtggggatcagccacgtcgggagacctccaagctttcatgacaagatatttccaaagccgacacaggtttaccatatgccgacgagaggggtcccagaccaacaacaggttaggtcccagaccatactgtgccaggaagcccaggggtcctcccagacaccaccccggtgaatccacatgtctcccattccacccatgtggtcgtacttgtcttatgtttggatgaaattccaaggaaacagtccttaagtgcaagagcgggaaaccgtacacccggtacgttccccggtccgcggttttggaaattcatttagttcgcaagcaccgacccaggtgtcgggttttccaagtcttttgcaaaacccaagttttacccaagttgttactcagattttaagtttgaaggcatccgttgatactcgcgcagggtgcacgaatatcgagacgcaactagatggttacaaggggacatggtatcgcaattaacaaagggaggatcaaatgcaacaaaattaggtaggtctgccaatctgccttgcagacgggacaagcagatcaagtgcgatcctatcaatgcataatattttgcaagcaatataattaaatttcaaatataggctcaagatgttcaaaggtggcttgccttgctcgagagctgaagcttgatcctcgaaatcctcgcactgcgggtcttagggctccgaaactacacgcgaaacgggacaactcaacaaacggcgaaaataaagccctattaatgacctctaagcgtgctattagatagatctcgagatttgaggaattttggaagttgaacggagtcaaacggatctacggttgggaggatattgaatttctaagattcttggatttttggtctaaaggaaaaggatttaattaaatcctttttggaaaagaaaagaaaagaaaagaaaagagggatggaaattagacttccctcgggcggctagggcgcggcccgagagaaaaggggcggctcggccgagcttaacgggccggccggcccaagaaggcggcccagaacggcccaagacgcgcgcgcgcgggagggaggagagagagagccggtggaccgggctcaccacgcgcggtctcaggtgggacccgcttgtcagcggcttggctcaccgtgcggagggagcacgcgacgcggcgctagggtggggggaaggacgcggtgcacgcgcgcggttcgcggtggacgcgggtgcggcgggcccacgcgcagcctcacggctcgcggtggagcgcgcgcacgggaagggactgaccggggtcggctcgacccggtctaggctgagctggcgccgacgtggcgcctacgtggctgccacgcgggccggcgggaggtagacgacgacgccgaccggaacggacggcggtcgacagcggcgagcggcggagcgaaccacggcgataccggcgaaagcgagcacaccgggtggttgcacgagacgaggggagacgagccaacggctcagattcgccggaggaagcttgacggcggcgaatcgcggcggcggcaaccggcggggagggaagaggggaaaacggcgacgaggtcacgaggggccaattcccggcggcgagagcatctatgcggctacgggaatccgatgctagcgtcggattgggcggagctacgccgagcgaggctggcgacgagcgggtgctacggagctcgggcggcgacggcggcgggcacacggcgagcgacggcaacggtcggggcggcgccggctagctacggggaggctactcgtgctaccaccgaaaactaagggggggagatggagcgaggaggaagaacggagggaggcactaccgtgaagaggaggggcgctgagacgagaggccgacggcgcgggagtaatctctccggcctcgggccggggaagaggaaggagagggcgcggccaaagtccccttccgcgtcctagtgcgcaccggctcctccggcacacacgtgacggctgcggtcggcgagagggacgacaatggcgcgggcgagaaacagagaagattgggagggggaaaaggggaagggcgggcgcctgggtttatagggggcggcaatgtcggtttggaaaccgactttggcggtcaaggcgcgggctggcgctccggctagcggccaaaacggcgacaggagggagggaggatgacgccggcgggaggaaaaagggaaaaaggagggggagaaagggggcttgcccccttgccgatttgggaaaaaggaggagggaggcggaggcgtcccggcagagggaggagggctcggcctccgtcccttggcggcttgcgcgcggagtggcggggccgaggcgatgacggcggcgatgacggcggggcggtttggagcggcgcgacgacacgggcgacaggcgcgggctggcgcggcagagggtgacggcggcggcgaccaaacggtcggccactcggcacgcgcgcgcggcttgcagcgggagggcgcggcggatggagaggcgcggctcgagcacgcacgctggctgcggggccgagcggctgctggcgcggcagggtagcggggccgggcggcgcatacgcgacgcgggcgaggaccacgcgggcgcgcgcgcgcgaacgacgcgcggggagcggaaaggaggggcggaaaggaggactcggctcggcgcgggcggctcacgcacgcgcggacagagcggagggagcggaggaggggcgctcggcgcggcttgcgcgctcgcgcacgcagcgcgcgcggcgcacgggcggggtggagcggaggtaga

SEQ ID NO: 5224 - DNA, 25580 bp, Oryza sativa
  unsure (1)..(25580): unsure at all n locations
gagagagagagagagagagagggagagcgcccggaagaaaaaggggggcccgggggagagatgggccgagctggattcggcccatcgaacccgggggaggcaaactagacttttgcggaggaaattgattggaaggatttggattcggaattgaactcgacgatagatcggggattgagatcttgagatggcacagacactagacaacaagcaaagaaacaaatttcgcaattagggtttttaagagataattttcccgctaggcgccacgacggaacgggcgctacagtgaaggattgaatttataaaatatcaaaaaaaaaaatcattcgcgcgtgtggaaaagaaagaagcgattaaaaaaatctggaaaaaagaagcgatttaaaaaaggaaacaaaaaagtgacgttaaaataggagatcttaaaaaaaagaaacgcgtagggatgcagctggtgcgcgcgccggctcctttcccttgcgcgcacgcgcgctagcatcccccataagtttaacccataaattatatttgcttcgttcgtttctcaatggcttgttagtcataggtcaatcaatcagagtctagaaaaagaggtaattttttccattgttgagaagatattaggagatactatttttttagtgtgaaatttgatatctatactagctatctcggtataaaaattactttaaatgtaaaatttagatgcctcaatatatatacttttttaagaaccgtaaaatttctcatagaaaaaagcaatgaagacggacatgactctcattagtagtgttcttttttttttcctaatccactatatagtgtaccattatccattaatttcttttatcttttacaactttgattttgagggatttgcatactgttttgaaaggttgattgtggttatttctcacttgattagatgcatgagtttttaaaataatttaatttcaagtagatacaatactcatgtatagatgatataattgtgtattattccctccatcctacgtatttttagtgtttaaaatttgttagcatttcttgagtattattttcctaacccacctaattaaccactgaaattatttctcactagtttgcatcgctgggcatgatatttcttattaaggatgtgtttagttcacattaaaattggaagtttggttgaaattgaaacgatgtgacggaaaaattaaaagtttaggtgtgtaggaaagttttgatgtgatagaaaagttggaagtttgaagaattattttgaaactaaacacggcataaagtgaactctcgggaggccgggggcatcgtgaaataaaaaagaaatgttggatatcagagaaggggctctcgtattgaaattttgttaagaggggtgagtttcgaatcgggatcggcgagcccatactttaagaggatatcttgaaataatttcaccgtaaccttaatttacgctaaaatccctaaacatatttatattcgtggacatggcgagtacatgccacgtttcttctgctagtaatttttcacataaatttttttttctcagcaagaaaggctggctatatactccagtgcagaaagagtgaaaaagactacaccaaacaagcatgaggcgtgtggaggcatgaaaacagtacgtacccagggcacagcagtgaaaacatcgatctcttcaccctgcatggtgtctccttaaaatctgatcgatcgactcccaaaaatataagtaaaatactcgagtcaaaatgcatcagtttgcatgcatagtgaaacagcagcaagctggtcttccacaggatactttttgacccattcctcctatacatgcatgtaattaatcacaaagttgcaaaaaatacaatactatgattgtgtatttgtgtgtactatatataaaacaaataaattaacctagtagtaactgatcagtatcgatcgagagtcaacaaaatatatgtagactacgacgatacgtgtgtgccttcctgttttcttttgttcttatctttgggccgcactatacgctgcatctatactaaacagtagtgaaaaatctacctctccaccactcaattattacgccggtctataataattcgttgtataaattacggggcaacagtgaattattcatgtgctcttgcgtgtaggattgccaaacaactgtttcatggtcagataaatgaaaaaaaagcgacaaattggtaacaataaggaaatgttaattaatttatgacatgtattactttcattaaaaatataatagtttctgactatacatgtatctcggaggtacataaccaaaaattcttagaggaagtataaaaaaaatgttttcttgttattggctacgaggtctcccaaaaatccaatgttgtacaaatactatattacatgtcaatttgaaattgtgttaataagtaaaaaaggacactccaatttctccatatcctcaattgaggaaatataaaaacaaaatttgtttaaaaaaatgtttcaggaagtataaaaaatgttttattgttcttggctatgaggtctcccaaaaatccagtgttgtacaaacactatattacatgtcaatttgacattgtgttaataaataataagtcaaaaaaggacactctaatttctccatatcctcaattgagggaatataaaaacaaaaattggaattgaaagttgaaaccatgcaccactagtctctctctctctctctctctctctctctccccttccatctctttctctcccctagcaattacactacgccttctccataaatgcgattgcaccctctcaacactccgcggcaataactccttcgcccccctctccacattctcttccacctgtgttccccttttcttctcctcttcttcttcctctcctcctcctgatcctgatcgagaagatctcaccttgatctcttgccgtgtgatctctagctctcgctagccctctgaaccttgcagtttgttgtttgcacccggtgaaacatcttcttttgtgcaggtaggagagacagcaaagcagagataagagttctatatttgcatgtagttcttgtcttggatctcactggctggctgtctcctctctgcagcaaggttcgttgggctagcttgtgtgctagatctgtttctacttgcgtttgcgttgcttggcaagcaagatatatatatatatatctatatctatctatctatcattctatctccctacatatttagagctagcactttgtgtgttctttgggtttgggacacactcatatacgcgtgttcatgagtggaaatggaaggagctgcaagggcaagaattagggtttgagatataggagtataatgatgatcccggcgaggcatatgccgtcgatgatcggccggaacggcgcagcgtacggatcctcatcggcactgtcactcagccaggtaaagaatttcttttgtcaggaatttgagctgaaaagaaattaatttcaaggggtggcctgctttccttttattttcttgaaaaatccaaagacttttgagcgttttgctgtgctagatttttaccttttgcgtcttctttctctttcttgtgtttgattaatttgaggtgttactacttgagatgaaaagctagaagaggggaaaaaaagcaatacattcagttctgaagtttctgaagataattagtcacactttcttggaaaatgagaagtttcagggttgtggagagagagagaaggggggctatatagaggggagagaaagaggttatctccagtacttagtggttgctgttcacacatattaggtcataagattcagagtacatgagagcctccctttctttaagactggcctactcctctccctactcctatataaggggagcagatgaacaggtcagctgatagatagatagataggactatggagaggagggagattttccaagttgctgatcttgcacacatattgagagggaaacctgtagatcatcttcaacaggtttgttgttgcttgcttccttgttcttccaagctttttgggtctttgtgttgtggcactcttgaagaagaaacatatcgatctagctaccctttctttcttattcctctttgcaagcttgctttcacatcttctgcatataccaaagggaatcaaaaaaggagaaaagtttcttcacttagcttgtctcctcatcccttcctgatttaaagcaatcttccattttatccccaaatttttttctgtgtttttatgaagtatgaacacaccagatttttccttgcagaaatgagaaagttatcaatatgggttgtttttgttcatgcatacaattttttcttctatcttttccacaaaactttgaacttctccactttgtctagtatctatttaatgcatatgccatgtataaaacgcacggaataaataggtactactactgtaaaggcgtaatctgtggtaccaaattggtagctaagttttgctctttatgtagcacacgcatactaatcctcaattaattcgatctgctccaaaattcgcagccaaacttgctggataatcaccagttccagcaagcgttccagcatcagcagcagcagcatcatctccttgaccagatcccggcgacgacggcggagagcggcgacaacatgatccgcagccgtgcgtccgaccctctcggcggcgacgagttcgagagcaagtccggcagcgagaacgtcgacggcgtctccgtcgacgaccaggaccccaaccagcggccgcgcaagaagcgctaccaccgccacacccagcatcagatccaggagatggaagcgtaataacactcaactcatagctatttacttaattaattatgtgttcttgattccatatagtatatactttgtttgattgtcctagaaatgtgacatatttgagttcagttcagttttgccccagctagcttgttcttggaatgttattcatgggtgttctaattcagaaaattacgcatgaaatgctgtgttagtctactgaaatcaatgtgaggagatgagtacaaatggaacagctggttaattatactgtctttaattaatttcccatggactgatgtaagcttgcgtagaagtcaaattgatttctcttgcccgtccatttcccctggacgaactgcataaagttgactcgttgatcaaaaccgtttttgttcttttgcactctcccccaaacaaaacggaagacgaagcattcaagaacgtagtacgaattttgcgttcacacgttcaaccgaacttcaaaaatttccccttctaatttatttttcctggatgcattaattcgtacgtactattaacttactgatgactaatagaattaaattaatctcggttcatctgttctaaatctatctgatctgatcagattcttcaaggaatgtccacacccagatgataagcagcgcaaggagctgagccgggagctcggcctggagcctctccaagtgaagttctggttccagaacaagcgcacccaaatgaaggtgaaaaaacctaattaatcacccaaatagttgttgattctgctcatcattttcacctttctttcacctgtgttcgtagcagtacaattcttttttttaggaaacacatgtacgtgtaattaatcaggacgttgcaacctgcaagcgagtgcaaatgcaacggattctttggatttctggttgagaaaatttcggccggaaagaaggcgagcttgcgagatagagagaagagagagagcgtcgtcttcttcttcctcctcgtcgtcacaaccacttcatttaagcctctgacctagctcctgcaggacgcattcatggcgtattactataactggacaaggcttgcccacgcacccccatgtccgcttctgcattgcacactgccaaatgtggcagttgcaggcctacgcctccgtccgtcctccatagtcaaacccttcccctaccttgctgacctagctgcatacgtgtacagtgattggaattaacagtttgcacgaacgaacacactgtcatagtgtcatcgtcaatccgttgcaaagattttcgaagtttttagcttgaaatttgagtaaaaatggtgtgtgatttgatgtgttggggagagtgcagaaccagcatgagaggcacgagaactcgcagctgcggtcggataacgagaagctccgggccgagaacatgcggtacaaggaggccctgagcagcgcctcctgccccaactgcggcggccccgccgccctcggcgagatgtccttcgacgagcaccacctccgcatcgagaacgcccgcctccgcgaagaggtagttttcaccatatctgaacaatcgatcgatcatggtgacaccgccattgcatggatcgtcgcacgctgatcgtgtcgttgtgcttgtcagatcgataggatatcggcgatcgcggcgaagtacgtggggaagccaatggtgccgttcccggtgctgtcgaacccgatggcggcggcggcgtcgcgggcgccgctggacctccccgtggcgccgtacggcgtgccgggcgacatgttcggcggcggtggcgccggggagctgctgcgcggggtgcagtcggaggtcgacaagccgatgatcgtggagctcgccgtggcggcgatggaggagctggtccgcatggcgcagctggacgagccgctctggagcgtcgcgccgccgctcgacgccacggcggcggcgatggagacgctcagcgaggaggagtacgcgcgcatgttcccccgagggctcggccccaagcagtacgggctcaggtcggaggcgtcccgcgacagcgccgtcgtcatcatgacgcacgccaacctcgtcgagatcctcatggacgcggtaagctcttggttaattttctgtcagtcagtgcgctattcttgtctgaatgttttttagtttggtgatttttatgatcctgtttgattgttggggtctgaatttcgttcaaattttgagtgaattgcgcagaatcagtacgcggcagtgttctcgaacatcgtgtcgagggccatcacgctggaggtgctgtccaccggcgtcgcggggaactacaacggtgcattgcaagtggtatgtgttcatgcttgtcttaaaaattttgtctcctttctgaatcttctgtcatattcggtagtaccaaagaattcgaagtgtgtacatgttggtcactgaaatgggacaaaattgtgttggttttggccgttttctctgcagatgtcagtggagtttcaggtgccatcgccactggtgccaacgagagagagctacttcgtgagatactgcaagcagaacgcagacgggacatgggccgtcgtcgacgtctcgctggacagcctccgccctagccccgtcctcaaatgtcgccgccgtccgtcaggctgcctcatccaagaaatgcccaatggctactccaaggtgaccatcatcagctcatcatcatcatcatcacaaatcaaatctgaaattctgaattcaagatatattgctgttcagaaatcatggaaaactgatgaaattgttgtatgatcaggtgacgtgggtggagcatgtggaggtggacgacaggtcggtgcacaacatctacaagctgctggtgaactccgggctggcgttcggcgcgcggcggtgggtcggcacgctggaccgccagtgcgagcgcctcgccagcgtcatggccagcaacatccccaccagcgacatcggcggtaagtaattgatcgagcatgcagcgaatttcaccctttaatttgatccaaaacgaaattaaaattcagatatgttcaatcactaaaccacgcagtggatttaattgtgtttgttgaatgaatgaatataattgcagtgattacgagctcggaggggaggaagagcatgctgaagctggcggagaggatggtggtgagcttctgcggcggcgtgacggcgtcggtggcgcatcagtggacgacgctgtccggcagcggcgccgaggacgtccgcgtcatgacgaggaagagcgtcgacgaccccgggaggccccccggcatcgtcctcaacgccgccacctccttctggctccccgtccctcccaagcgcgtcttcgacttcctccgcgacgaatcctctcgcagtgaggtactccctctgttttatatcataagtcgcttttacgtcaaaaaaaaagtcgctttgttttttattcagatgaattttgtaaaaaaaaacatagtagcgcttttaatacaaagcaaacacattttatcacaatatattcaatattaaatttaataaaactaatttaatattttatatgctattaatttttttaaaattttatttaacttaataaagtttgactaggaaagaagtcaatacgacttataatattaaacagatagaatacctataaatccatgataaggttaacaagaatacaattacaaactcttagttcgcgaaaaaaattacaaaatcttaaactttgaaaataaatttattttcagtgggacatcctctccaatggcggtatcgttcaagaaatggcccacatcgccaatggccgggatcagggcaactgcgtctcacttcttcgcgtcaacgtaagcagcaattcatccaagatcaaaacgcaagatatatacgagcatgcgataatgcgcgatgtattgatcgatcccgtttcatgtacaaatatatattgcagagctcgaactcgaaccagagcaacatgctgatcctgcaggagagctgcacggacgcgtcggggtcgtacgtcatctacgcgccggtggacgtggttgcgatgaacgtcgtgctaaacggcggcgacccggactacgtcgcgctgctgccatcgggcttcgccatcctgcccgatgggccggcgcacgacggtggcgacggcgacggcggcgtcggcgtcggctccggcgggtcgctgctgacggtggcgttccagatactggtggactccgtcccgacggcgaagctctcgctggggtcggtggcgacggtgaacagcctcatcgcctgcacggtggagcgcatcaaggcggccgtctccggcgagagcaatccgcagtagcttcgtccttgaatcaaacaaaagcttcttgtgctttcaatttcaggtacaaatgcaccaaattacttcagaactcttgcgagattaattgcatcagttaatgagaggtatatctgtaaaatttctgatgagtttgatcatgtttgtgtgcaggagcagcaaaattttggagctttcatcagtgggaagtcaagaacgcacctcagactgtccttgccatgtggtgcccatatatagtttggattatttttcgctagtttttccgcaaattcgggaaatttcaaaaaaaatgtgtcaccactacgcaagggcggttggttcgggtattgacttcctcttcatgttcgcctctcggatgctgctaccttatgaatttagggttcttctggagtacaaaaaaaaccccttaatttgatctgtaatttctgttgttcagacttcccagtacctagctagctagtaggagttgcagaatagagatctgtgtccctgtcttatacttttagttctcttcagtgtttgatcagtgctgtttcaatccaaaattgtgtgtgctgtgcttgttattagttcttccttgctgcttcaatgaaggcgatgttaatttcagtttccagcagttgcagagttgtgtaagatgacttgcatttcattgccttcaacagtattctatcagaactgtcgcatatcccccaaaaaacagcacaatcaatttaatactccttgataaaatttatgccactcttattatttacatcactgattacccttcaaaagattacatatatacgacaatccctacatggaaatactcgagtgcttctgccataaccttcaccccatgaacaaacatttcagttcccagaaactatacggtctcatccaaagcaacttagctcgcctttagactgaataatgaactggataaactcataagagacgccacttggatcttcatgattcatgacattaccaccaaaagcctcggcagtcagcacagatgatgtccgcgagggaatcattgtatgaatccattgcactcatgaaagtacatcattccgtggggacgagatcgtcaaacgaaaaatcatggatcggtgcacctgcaaaacaagttgagttctggagtaactcgtgtgttcattttacaaaaggcttattaacggaaacacattttaatagttttctcaggatggcatttttcaaaacaacttgattcttaaatatatcacttacatatggagtttgttcctagcaaacatgtttgtgcggtaacaaacatgaaaggatgcttactccacatttaacaatataagtttgctaaaagagttttttacctttttgttcagctaacaggtagaacggaatgtgagctaccatctttgttcctccttcactccagttgacaataccaggaccatttccttgtgcggtggatggtcctagtacagataaacaaatggccggttcattcaatagacctaaatagtcacaagcacgttgccacactctcctgtccgaggttcgggaacgagcgacctgtacgaaagtaagttacaagctcaaacgatgaaaatgagtggtgacagtaatatatcaaaccttaatattcctcaaactggaaggattagggcctaccttggccaatgatacacgtgctcttggaagcaactcattatggaacgttgctagctttgctatggcagtcaccacaaagcagaggagcctagcttgagatgattttctagaagatgcacccataggatcaaatcctgtgtcctgacttaatcccaaacgacttcacaacaagagataagaggtcagtcaaaagagatgccatgcaagtttagaaaaaaaagactggtttaacagggcccacctggtagccagattttcatataacagcaactccaaattttcaaacagttcacgagctacatctttgcgattttttcctccagctccatgctcaccaatggcccaacacaaatgcaatgctaattcagtctgtgtaaataaatcacattcgatcagaaaactcagttgatgtggagaagagtattaatcatttaagataatcagaactaggataagagagcaggtgaaaattagcagtttggtgaacttataaaatcaaaatgtacttaaaacatatacttgcctttgcaggattatcatgagcctccccaagtctgtctgtaatgggcttctgtagaatggtttgaaattatagtgcaaaatttttagtggaaccagaaaaaggagatatttactttgttgcttaaatatgctacaacattcactctcagaaaaagaaatgctacaaacatggtatattggttcagagaattgacatgtatatgcatgtctagttatatgtatacccagtacctttagcagtgcaatgatgtcaggggagcgctggaatgcagccaatatgaaatctgaaagtcttttcctcacctacagcaattttattgcaaggaacttgtttgaagggtgatatagaattgtggaaataaccaaacataaatccccatacgaacatataccatccttttgtactgaaggtacatatgatgtgaagaaaattcgaaaacatgatttacttcttccattttgttcgttagacactccaatgtaatgtatacgttccacaaatttcaacttttaggatagctttagcaattaacaattttacttaaaaaaaactatataagccgtatatctaaatagatgggtgtatcatcaattgttttcttgaggaattgattcttaattgctgactaaaatttagtttcctatgcaagtaagcacttcggttcaatcatcaagtaagcacttcaatgatcttaccgtagtactgtagttactactccagtattagacgcagtattagacgcaatgggaaaaggacacccacttgcctacctcgaaggagtatactttgtcagggaacattgctgcatatcttgacataactacaggaatcagagcgcataggagtgctgaagtgacaaatagtagagggtcaaatcaacaatatgttggtcatcactcatcagtatgtatagcaattaacaaagataggcaacatacagtcgttaacgtcccgcaatgctgtagcaaaatataatgtaagaaaacgaggtgccattttcagtgactgtttcaatctgtccgattgtgggctattaactgctgcctgtaaggttgaagatatcgtaggagatgtccaatgttttgcctgaggaaaacatcagaaaatgagaagactagatcaaggcattcactgaagaacatggaacacatacttcaaggaactacttacagcaataccatcattctcatcttttagaagatcaaggaacatcgggtcagcaaggtctagaggaccactatcatccgaacctgcattgccaatggcatcttctatagcagaaccagtgtatgcttcatccattagtgcaagtagcatctgtacgatagaaaaagattagcaagcttattagttttgataggtgacatttcatttacagcttttaggtcaaatcattacggaaatcaacctcaggagcagcactcttctgtatagtagctatactactaccgatgagagttccagaacttctttccaccttttccaatgctaccactaacactgttttgttccatgagtaagcaatagaacaaatgacaccaattagtaaaaaaagcataatagtacaggataagcatcctcagtagcagcatgttatacacattacatgcatctcgcatgttggaagagatgtgccccagatgtcagcagtcagcacatgcaacagtttaataacactatcataataaacttggctaattagcttctaaaatcatgaagtttacagccttgcacaatctaaagaagctagaggaaaattctggaagtctggaatcagaaggcttacttggaagatccataagggacaggaagagaggaagaaaagatcctgctgacatcattaacggaagcacttctgagaacttcctctccaatctaaaacaaaggaaacccaagttagataggtcaaatcattgctggaaagaggtagaatgaacttcttcatatttacacagtaaaatatcagcaaatatgtgaggagttcatgagcaattaagatggcatacctctcaccatttgatgcaattagcttcagcaacaatggaaaaaactgcacatagacagcatcacgaaagcattgccaaatattaacatcattaaatagtaatttggaaagagaacaaaacagaaaagtcaaaaaagaaaggaggaaattggattgagatcttttcaagaagtatgcttgattcattggcccttgccagtagaagcctagagctacatttatgcaaaaaaaattctaactgacaatataaagaatggtagttgacataagatgtagatattttgataattctagtgctgtataacattatatggtatggcacctgtggaattaatgtgggaaaagagctcaggatctttgtcttattcgctatcaggaattcaagtgtacgttctgcgacaataggatcagcgaactccctatcatcaagaaagaatagccaagtgattgagggtaagcaggaaaataaaaataaacaatcgcatacccaatacatcaagaaaaattattacctacttaggcaagagcggaagaaggtcctcaagctaccatcagcatcatgcaggactgcctccccaaagtccaggaagaactgcagaatggtctgggtagggagcagtaatacagtatgtattattagacaggtttttcttcaaatatatgatgactaaaaatgtgtgtacattactaatcaaatctaaatgattctattcaccaacaattgtccacagagaatgattatatggggtcaaatggggatcataaggttaaccattaacattagagcaagctcgcccctaaagatgcaaacatttcacaaaactaccaaaacattgcaacgatatcgtcctccaacctaacatgtaagaataacaaccatttgcagccaagatgggggaaaaacttcacatcagtgaatcgaagcacagcttacgagtagcagcacgccgctggaggccacggattgggtcggcgcggcggcgcagcgctggaacagcttgctcatcacagggaacgcccgggccaccatctcgtcgctggcccccttggcctccttgcacatctcgcacaccctcctcaccttcacgccgcaaagcccacacgagtcaacaagccaaaacgtgagcacatcccaccccccctgattcgaagaccatggaaggggccagggttgcagagagatgcgcttacggattcgaggaggttggggtcggaggcggggtcggcggccgcggcggagtccctggatgcggcggagagggagcggaggtggaagttgtagctgccatcgccggcggcgagctccggcgaagccatggccgtcgcctccgacgaacgagtgagtttacagatggggacgtatgatgggcctcagccgaattagagcccattaaactaggcccacgttgcactctgggccgttggataacacgtacgaaatgtaactcctatttaatctgagtcggcttctaaaaaaaaaaaaattaatctgagtcggtctcactgctgatttttcaccttttggtcctttaaaaaaacttattattcacgcagtgagaggtgtctgaataagtttagaaaaacttttggtcttttagaaaaacttaaggccattttggtttgaagctaaaatatgtgctatcaaattgtttggcactttgaatagtatatttttaggcctcttcactttgatgacattttcaatattaccaagttttgataaaattgtcaaaaaagtggctacatttagtttgctgccaaatttttgtaactatataagaaatcatgccaaaattttagcaactataccaaatttttggcattgccaaaatttggtaaggtttttttggtatcaaagtgaacaggcctttattaatgtttgatttactatcaaaatataccaatagcacaaaaaatttggtagtaccaatattttagtatggtaggaaaccaaacatacccttattctctttttggtccttaaaaaaactttttcatctttaaaaaactttttgagatctatttataaaatatttttttctaaaaggatcaaaatgtgaaaaattcagcagggagaggtgtctgtccctcccacagtcccactcccacctcccctcattgcctcgccgccgctcgccgtcgttatccaccggacaacgagcatcccctgacgagcgcagaaccgagctccggcgccgccgatctcggatgccaaggcgggctacaggtaggtgattttctttttgttccctaatcagttttttttcgatttaattatttcggcctatagtttcttattcgttttccatgttgatatttttcgccttcttttttttcagttttgcctctcccgattgctccgtctctcgagtcggtttccgattcgaacgcaggatgccaaattaaccgctaactccttcaaaatctgaactcgggaggcaagagaagaagagaatcaaacagagcgcctctggattttgattctcaacactacaagaggcatttttttttttgccggtggagtatatgaacggcaagcggaagagatcgggtggaaccatggagactcgtgccatcaagtgcaggacgatgcagcttctccatgaacttcaaataagtatgcttccccgtcctcaagtctttgatctaattcctatacagagattgttgattccgctgtttctagggttcatttcatatgtctgaagaagaaaaatctgttccttttttttcctgggtgagacgcctttttaatggaggggcggcggttgaaaaaaaaacaactctttttttttaataacctggttggttcttcacctaaactacactttttttttcttaaggtgctatctaaacagaaggcaattgttaactctcgtctggtctaagctcaaatattaactttattttagagtaaatttcacaaaactatacgttttgtggtctatgttgcagaaaactacacactttgatacttggcatttaagtacatatatttcggtagtgttgttttataaaaccacactatcaatgaataaatccaccgtgagatgacatggctgttccacctaaacgaggacgtggcatcctatgctattaattttttgcatgacctcctatgcttgtcagcgccggcgcggacggccgttccatatttccgcccatcgacgaccaccgaacaatatcgtgtagctctcaccgccttcggcctgcatctcgtcgtcatgtcagccacaagccagcgcctttcctctcactgctatcccctcgccgccgcgccacgaggttcctcgctaggcctcatcatctctcccggcggcccctcaccatcctctggtcatctctctccaatacatgctatgctcgagatctggagttagcaggcaactcgctggctacatgcctcttcgagtactgcggccccttgtgtctcattccagtactatggtggctctgccattctgctactaacaggtatagtttggttctttttttttggtccaaggaatcaatcaggtgcccatttcatagtgagttttctaaaaaatctagtgtgaatgagcaagttccaactgaaatttcacataggtttgtagttttttgcctcactgttgattgattttgttaaaaaaaacagttaattcatcaaatatggaggtttctaatgcctctgaaatgaaagtagtacaaaacatgggagctataaggggaggacagggaactagtattctaaattttacagtcagtccactattgtacttaatttcaggtagataaattacgcttcagtggaaaggatcactgagtctgaagtttgtggctataaccccttgagttaattgattgttccattcagcttgtagtactggaacttgacaagagaagcacagtagtttggctgtagatagtagtaggtggctcctttcatgtctgcaggaaagtgctcctaaaccaagcacaaccttcagttgtggtaagcacaatacagacctaaactcatggaactttgaaatgaaataaaaatggtataatgctccattagacatgttcacacatctagtttgatcaacaagtattcttaataaccagctcaacaaatagtgcaagaacaataaactcaaaacaaccatatagaaaggtgatcactgaccagaaaacaagtcacagaataaaatccttggtaacatatcgtgctgggattgtgtagcgcccgttccgtcgtggcgcctagcgggaaaattatctctgaaaaaccctaattgcgaaatttgtttcttcgcttgttgtctagtgtccgtgccatctcaagatctcaatccccgatctatcgtcgagttcaattccaaatccaaatccctccaaatcaaattcctccgcaaaagtctaatttgcctcccccggggtcgatgggccgaatcccgctcggcccatctctccctccctccccggctctccctctctctctccctctccccgctccccctccgctccgcccgcgcgccgcgcgcgcgtgcgcgtgagtcgcccgcgccgagcgccccttctccttgctctccttctccccatccctggcgagctccccgctcgcgaagacggcccccgcgcgccgttgttcgcgcgcgcgcccgcgtggttccccgcccgagccgtgtcgtctgcgccgtccgcgtcgcccggtcccgctaccctgccgcgcccacagccgcgcagccgctcggcccggcgagccagcgcgcgtgcccagccgcgccgcccgttgtatcccgcgcgcgcgtgccgagtggccgaccgcctggtcgccgccgccgtcaccctctaccgcgccagcccgcgcctgtcgcccgtgtcgtcgcgccgctccaaaccgccccgccgtcatcgccgtcgtcatcgcctcggccccgccactccgcgcgcaagccgccaagggacggaggccgagccctcctccctctgccgcgacgctcccgctccctcctccctttttcccaaagcggcaaggggcaagccccctttctctccctctttttccttttcctcttcctcgccggcgtcatccgcctctgtcgccgttttggccgcaagcgccgagcgccagctcgcgccttgaccgcccaaagtcggtttccaaaccgacattgccgccccctttaaacccaggcgccctcccttcctcttttcccctcccaatcttccctatttctcgcccgcgccattgccgtccctctcgccgaccgccgccgtcgcgtgtgtgccggaggagccggtgcgcactaggacgcggaaggggacttcgggcgcgtcctcttcttcctcttcctcggcccgaggccggagagattactcccgcgccgtcggcctctcgtcactgcgccccgacccgcacggtagtgcctccctccgttcttcctcctcgctccatcttccccccttagttttcggtggtagcacgagtagcctccccgtagctagccggcgccgccccgaccgttgccgtcgctcgccgtgtgctcgccgccgtcgccgcccgagctcggaagcgccgctcgtcgccggcctcgctcggcgtagttccgcccaatccgacgctagcatcggattcccgtagccgcgtagatgctctcgccgccgggaattggcccctcgtgacctcgtcgccgttttccccttttcccgccgccggttgccgccgccgcgattcgccgccgtcaagctccctccggcgaatccgaaccgttggctcgtctcccctcgtcacgtgcaaccacccggtgtgctcgcttttgcctgtatcgccgtggttcgctccgccgctcgccgctgtcgaccaccgtccgttccggccggcgtcgtcgtctacctcccgccggcccgcgtgggagccacgtaggcgccacgtcggcaccagctcagccgaggtcgggacgggccgaccccggtcagcccctcccgtgcgcgcgttccaccgcgagccgtgaggctgcgcgtgggcccgccgcatccgcgtccaccgcgaaccgcgcgcgtgcaccgagtccttcccccaccctagcgccgcgccgcgtgctccctccgcacggtgagccgagccactgacaagcgggtcccacccgggaccgcacgcggtgagcccggtccaccggctctctctctcctccctcccgcgcgcgcgcgtcttgggccgctctaggccgccttcttgggccggccggcccgttaagctcggccgagccgccctttctctcgggccgcgccctagccgcccgagaaaagtctataatccctccctcttttcttttcttttctttttcttttccaaaaaggatttaattaaatccttttcctttagaccaaaaatccaataatcttagaaattcaatatcttcccatccgtaaatccgtttgacaccgttcaacttccaaaattcctcaaaactcgagatctatctaatggcacgcttagaggtcattaatagggctttattttcgccgtttgttgagttgtcccgtttcgcgtgtagtttcggagcccgaagacccgcagtgcgaggatttcgaggatcaagctccagatctcgagcaaggcaagccacctttgaacatcttgagcctgtatttgaaatttaattatgttgcttgaaaaatattatgcattgttaggatcgcacttaatctgttgtctcgtctgcaaggcagattggcggacctacctaatttgttgcatttgacccttccttcgttaattgttatatcatgaacccttgtaaccatctagttgcgtctcgatattcgtgcaccctgtgcgagtatcgacggacgccttcaaacttaatatctgaataacaacttgggtaaaacttgggttttacaaaatacttggaaaacccgacacctgggtcggtgcttgcgaactaaatgaatttccaaaaccgcggaccggggaacataccgggtgtacggtttcccactctcgcacttaaggaccgattccttggaatttcatccaaacataaggcaagtacgaccacatgggtggaatgggacacccctggctgagtaactagcttatcaggggagccttgatgccgagagacttgtggatttgccggggtggtgtcagggaggacccctaggcttcctggcacagtatggtctaggacctaacctgttgttggtctgggacccctctcgtcggcatatggtaaacctgtgtcggctttggaaatgccttgtcatgaaagcttggaggtctcccgacgtggttgatccccacgggctgggtgatccgggttagtaatgtcgtgtgggtaaagtgtaccccctctgcagaggttaacaaactgttcgaacagccgtgcccacggtcatgggcggatgtgaggtgattcctagcgtagttttgtttgactactgcttgtgaaattgctgttggggaaaggagttcgatgtttgaaaaatctgcagctgatgggatcagctaagcggatcctgctgatgaggagttcttccaggagcaagccggctacgatgagttttagggtttcggcctagttcccaagtcgcgcctgtgatgtttggtccaagtcctggcttccgtttcccttttgtaatgcagttgtgagctcgggatctgttcgcagcccaacatgactgtacctctactctataataaagagacctctgttgctgtgatattctgtcttcctgtgataccagcactgtatcctgggactggtatcgattaacaggttaatttggagcgtcacgggctagttccggtcggggctagttcggggcgtgacagattggaaggcacatatgtgcgtatatttagttgcagcagttttagtgggccatgcgcatagaagtccagcttgtcccacgatgccacgtccttgtcctaggtggaacagccacatcatctcgcgtgtgaattcattcattgatagtgtagttttgtgaaactacactatcaaaatatatgtacttaagtgccaaatgtcaaagtgtgtgtagttttctgcaacttggaccacaaaacgtgtagttttgtgaaatttactctttattttaacgtaactccagggtctttgactctgtgctctcttcggtcttagtggttctagagtccatcctttcggagggccggctgtggtcgttagcggccgtcgcttcctttggggaattgttgggagcgtagagtggctctgccctctcccgctgtttggagtagagttaccgttgtatcgagttcttttttcctttccttccttgttttttttatctttgtttttcttccttccttggcataggccgatctggctgagtgcgtcgtgtaacaaaaactctattcttctaatatattgacgtgcaatccttttgtgcgttcgtggaaaaattaacctttattttggtttgttcaaattagcagttcttgtctgaattacattatcaaattcggaatctaatagttggtttttatctccagacgaattgggcacatctgcaaaaataattgacgcaccaccgcgacgaggtgatatttctactggcataatgcgagaactcccgctcgataaacttccagaggtatggattgctaagaatgttttgattactatcgttgaaacttctatgtcttcgtgtgcttggatcgtaggatttatttttcctcgagggattgattgtaggaatttggtggtgaacacatatttaaacaacaaatcaacaatgtttgggcaaactatctaccactcaatgatcctgaattatcattgttacaacctttacagtactactagcagaacaaactgcatttctttgcaccacacatccttttatccggttgatttaaactagtcatcgtcttatctgagttgggtgaactattactgatcttcctgtgcagccatgtggtttgctcatgttgattcattaatactcactgttgagtgtaggcgtgtgtatttcagcccaatagggcccattccaccaatgtatatgtatagtagatgagaaaggaaatgaagtgaagcttctagaggaaaaatcacaaaactacatggtatcagagctgggtcaccggcgacctcgccgacgcgaaccctagtcggcggcggcgctgtgaccagagcggttctgcggcgacgtcgacagctgaggcggagcggcgacgtcggacagcggaggcggagcggcagtgtcgacggcggaggcggcgacggctgctgcagaggttctcgacgcgagcagcgtgaaggaggagcagggcgcacgctcgctggttgagctgcgcaaggatttggtgcagcacaagctgtagggagcacagcggctgagagacgcgcagctgttggatgtaggatcaacagagaaggatttggtgctattggctattgttgtccgttccagtggtggtgactttggtggtgctgttgctggtgctgctgctacttgagaaggtgaggatttggaggtgaagtggaagcttggtttgctgttgctgttgttctgatttggggaagaaactgtgtacgagagcttggcttgctgctgctgttgtgctgatttgggggaaactgaaaagtagtgctgctgggaggaagtagtgctactgctgctgttctgtttttggtgagaaactgaggagtagtgttgttactcctattaattgatttggctagtatcctagaagatttggttgatctgccatgggggaaattcaaggaattgagcaaatacttgagaaattggctgaagaagttgaagaaataaggggaagaattcagaaagtgaaggagaaaacaacagtgcttggcaactttgttaatctcgcacatcctatgcaggtacctaactcaacttggatattagactccggagcatctagacatgttacaggaatgtcgagtgagtttacatcatatactccatttcagtcatcatttaaagaaacaattcaaactgccgacggaactttacgacatgtgaggggagtgggaacagtcaaatgtactccatcaattacattgtcgtcagttttatatgctccctcttttcctgttaacctagtatccgtaagctcgttggttgatcatatggattgtcgaattactattgaccgagagaattgtctaattgaggagagaagaactggaagaaagcttggaaccggcgttaggcataatgggttgtggtatctggatagaagagggacggacaaagcactatgtagtgctttgttagctagcacaagtgaagaggaggctaaattgattctaaaacattgtcaattgggacatatgtcctttgatactatgtctaaggtatttcctgatgagatgagtaaggtggacaaaagcaaattaatgtgtgatgcatgcgagtatggaaaacatacacgaaccacatacataagcagaggacttcgaagcattttgccatttgtgttggttcactctgatgtatggacttctcctattgcttcggtaagtggagcaaagtactttgtcacctttattgattgccactcacgaatgacttggatatatctcatgagacacaagagtgaagtattgaaatgtttcaagaatttctatgcttgggttaggaatcaattaaacacttgtgttaaagttattaggagcgataatgggggagaatatgtgaatgatgaatttaggagttttctctcagcagaaggaatagtacatcaaacttcttgtgctgacacacctccacagaacggagtagctgagaggaaaaatcgacatattctggaggtaactcgttcactcatgtatacgatgaatgtaccaaagtttctatggagtgaggcagtcatgacagcaacatatctcatcaatcgcatgccatcacgaatacttgggatgaagactccatatgaaatggtgtttgggaagaatgaattcattgttcctccaaaagtgtttgggtgtacttgttttgtcagagatcatagaccatccgttggaaaattggatcctcgagccgtcaagtgtatttttataggttactcttctgggcaaaagggatataaatgttggagtccatctgagcggcgaacttttgttagtatggatgttacttttagagagtctgttccgttctatggagaaagaacagatttgagttccttgtttgttgatcttgacaatccaattattgatgaggatggacaagagggggagaatggatcatcaggtactgaagaagacacataatcaagaagcatgaaatttgtggttggctcaatcccatatcctgttagtgaacccattcatgagcaaaattggagaaggccatgtgaagaagaaaatctacaagtttatactaggaggaaaacaaggtctttggaggcgcaaacaatagggcaacatgagtctcctatggatgggatggagcagcaacaatcttcaattgttgctgaagtaggtgataaaccatctgatcagtgtgatactatacagatttcatcggatacggaaggagaggagtttgaaacagggggagaagaaactaatcttcctattgctataagaaagggggtaagaagcaatgcaggtaaacctccacaaaagtatggttttgcagctcaaggtgtgaatgatgatgagaataacatagccaattatgtctcttatgcttctttgtcatccacatataaggcctttgtgacatcactaatcnaagtggaattccaaatgattggaaggaaaaaaaccaagacccaaggtggcatcaagctatgctagagaagttagaggctcttgaaaagaccaaaacatgggaccttgtaccattccctaaaggaaagaaagtggttacctgtaaatgggtttatacagtaaagcaaaatcctgatggaaatgtggaaagatacaaggcaaggcttgtggctaagggatatagtcaaacatatggaattgattatgatgaaacttttgcaccagtagcaaagatgagcacggtaagaactcttatctcttgtgcagctaattttgattggccattgcatcagttagatgtcaagaatgcattcttacatggagatcttcaagaggaggtgtatatggaaattccacctggatttgctacctcacaaactgaaggtaaagtgttgagactgaaaaaatctttatatggccttaaacaatcaccaagagcatggtttgatcgctttagacgtgcaatgtgtggtatgggttataaacagtgcaatggagaccacacagttttctatcgccataatagaggtcttaaaactattcttgttg

SEQ ID NO: 5225 - DNA, 37940 bp, Oryza sativa
tcctccgccacaccccgccgccgttgccgccgcgctcccctcctccgccgcaccccgccgccgctgcactcgcctcctcctcctctgccgccgccgccgcctcgcctcgcctactccgccgcaccccgccgccgctcgccgcctcatcccccgccgctcgcctccaccgccgccgccgctccctgtcgcccgcctgcctccgtgtgcgtgagtgagaagagagtgagagaagagggagataagagagagaggggaatagttggataggagtatgacaagtgggttccatatttttttaataaataaaatactgactggactaccagcgtatgccacatagaccaaaaccaccgcggattaggtcgaggggggtaattcgtctgatttacatagttcggggtgaagaatatccagttttatggttcagggaggtaattcagacgaccgctatagttcggggggtgattcgtactttttccaaaaaataaataataattaccgatcgattaattcattcttatttaattgtggtattggttggtctcaatctacccattgactgttcatgcagtagtgactgcagatctgtggttatgtttccaactgttcatgataagaacaaacacagttgctgggattaatacacagacaaagtggccacaatctttgtgtttgttcttcatgtatcctaacaaaactgaggttcttttacatggttcaattatgtgtaagattttacttgcgaacgagtaaattagaggttaattaagaagagatgatttatgcttacaagtcgtcgagaaccttggaggcgacgaggaggcaggcgaggaggaggcggtggacgttgcgggaggcgacggcggcggcggggcggcggtgcgccgccatgtcgacgtacgcgtacgccaccacgtagcactccggctccagcccggcgtaccggtgcacgcgctccagatactgcgccacgccgatgcgcggcgccggcgcgcccctcgccgcctcgaacgccgccatccctgctcctagccccgccgccgcctcccctccgccgctcagcgcctccaccgcgtcgttccgcgccaccagccgctgcacggcgcgcgccaccatgtccagctccggcggcggcggagccgacgccgtcgccttctgccgcgacatctcgccgcccgctgccgcggcggcgtccatggccatgcacggcatcgacagcgtggagtggcgcgcgttagctcaagctgtagccctgtagctgattcggcttggcgcttttttttttcctctttttggttggcgggggattaaccgcgggaacggacggtggatgatgcggcggcggtggggccgtggccgtccgatgaagctgtctctcttcgattttaggaacggaattttctgtttcgcgattcagacaacaccagaatggactgttcaacccttatttccgattttgtcggcattccgtgccaaaatcgtgatccgaaatggttttttaggagtggtggacaggatgctcatcctctcccactcaccgctctttgctgtccataattttagcacagtttatcgttaaaaaatatacaacttttaaagcgataaactttaagaaaaaatatgtatatttagtttattgatgtcatattattctcatgtttttttttcatccgttcgtcatcgccacttactgaattctaccgtaatttttccccttaaaaattgcacacttggacacttggttcatttaagtccccctctcatgctctaattacgcgttcaccgctgactgaaatttgggttactagaaggattttgctcacaaacttttgactcttctatcagtcaagaaaaaggaaaacctttcactctacttgttaggcatgcggcatcaaagttttcttggtcagttttggacttgtggttggggctgcacggcctaatcaaagtgtgatccaaatgatggttttatgccatcatgggccagtggtgtcactataaattcaggcctgataagcactagtgttctgaatatcttcagagttcagaggtgaatacccaaaatattcagaaatcagtagtcatgagtttatacttttcagctggaacgaatttgctattgctcgagcaccgaatgtaggatcaactacttcacaatctccagaactccagaagaagtttatcactgaacacagttcatggacaaactacccggtaatccgaagaacaacacctgcaaaaaaaagatgtgaaagatcacatgtcaggttgtcttctccacaccgctttagctcacatggctggagaagcgagcatgtcaacttgggaagtgtgctaatgactccatgaaattaaaagatcggaacggtggggacgaagtaattaagcagatggggggctggtgctttctgacctccggaattcatgtctgaattctgaaaacacaccggacaaatgctccggtctgaaagatgacagccgttttttctctgttccttcctcctcgcttttattatggctttctgcaggatggtgcaggtgactgttggctcaattctggagaacgcttttcttggccattcactggcctgaaactctggatgatttgattggattgacatgatgcattgtatcatatgatggcctacatgctaccttgaactcctcaattgatcagagagaatcagttgcatttgcaaaattctgcaatcttctcatttcaggcttcagagatgctatgggctgcagttgcagtatcctggcatcaccaacctgacggtccttaatcgtagaattattgaaaatcttcactttatctgcataaaagaggtgacatgtagggacacggacaggcatagatcactcgctcgctaccttcctttggcataggttaagttaataatcattgtgattctctgcgatttattctctgcttgaagagttgggtgagtgagaataataaactttgatgttctggccgtgcagatctctctccctttctcacgtgccacggttgttcttggtcccatccaagaatgggctcccactgggaaggaaggaacaaaagttcagatctatgatctatcgatctgtgtttcctcacaacgacagtcacagtaagtcagtaaaaaaatactcaggtaattaattactgtcttaagctgtaaataatttttgtttacccggactgttctgttcctaatcatcatcgagaggaggagttggagatgatgttgtggatttcgaggcgagcagctttaccacgagatgaagcttcgtctagttatagccagcgatttgacagtatgcgaataatgtagagtgtgatgtgttgtaattgcttcaaaattaatttgctttttattgaaggtttcggttaacttttgtgcacactcgccagtgagagtttggagcgtagtaacatggtttggtgatcacttttttgtagggcagtactgagttaattataatatttagaaaaggattaccatgtggaaaagggattatggtacaaccaaactgtgatgagcagtaaggtgtgcaagcgtcggttcggtctactgatgttacaacagcaaacgaggaaaaatcatggccaatcgcttgactaaagttggagagaattaaaacaggagaggaaaacacaaagcttaagacaatagaggagagaacaatgctgtgttctttcgagagagttaccaactcatttttcacgtgcacgattttcaaattactaaacgatgtatttttttaaaaaaagtttctatacgtaagttgcttacattaattcatatttcaaaacaataacaaatacttaattaatcatgttattttaaaaataagttaatatgatttttaaagcaacttacacgctcactatacttcaaattaaaactaattaaagttaaatggtcatgtcttaacatgtccagattttaacatgttttactgccttacacgtccactgtacttcaaattattaaaaccaataaaagttaaacacgggtattgatctcacgagcatcatttacaaaacaatgcgaatctgaacctgtcaaattactacagctttgcaaaaaacaaaacaaaagaaaaaaaaaagataaaaaaggcttaaggcgaaaggaagtctcagacctaaaagagggccccacattttctttcaccttctcttccattccacctctccatctcgccggaatctcacctccgatccggcggcggcgccgccaccgacaccgagaaggggcgtcccctccctccgccaccgcgcgcgcggcacgaagagccaccggagcattcaggggaggggcgttgtagaagcgcgggcggggggaaggcggggatggagtcgatcatagcgcgggcgctggagtacacgctcaagtactggctcaagtccttctcccgcgaccagttcaagctgcagggccgcaccgcgcagctctccaatctcggttgggatccgcttctccggttgaggatgccaatttggtcgcctccgggtgctaactttttttttgggcgtgatttgggtgatgcagatatcaatggcgacgcgttgcacgcgagcctggtgctgcctccgtcgctcgccgtcgagaccgcgcgagtcgggaagctccagatcacggtaatggcgggagccctgacccggtgcctttgtatatgtcagtgtgcttactcttcccggcttctccccctgaaggcttaaggggtgcatttagtgttagatttcttattgtttggtttccaaatttagatgattttcgggagagcattgttttgcactttacttgcgcctctgcgtggtagaaatctgtgatgaacttgtgatttcgctctcatgtgatagattatagctctgggtttgaaacgtttgtgtgggaggctaagtgaatgatgattaggaagcagctatttgtacctgtcttgacaatgccatgaaatttggactcccattaatttttatcatgtggccatacctgtgaaaaatctagagaaataaagctgcccttggtattccttgcgcatctggttattgcaagttttggttgggtggtgatctcaggtaaatttggaaaattaaaatctatactccattagcattgacctcaaagcttcaggcaattattgaatagccattgggtacttgcaacttttggtgataagcttatttcgtttccttgctacagcttccatcagtgtcaaatgtgcaagtagaaccaattgtggtgaacattgataagcttgacctcgttcttgttgagaaggacaattctgaagatctttcaagcactagcaggcaaattcattcttctggctctggtctcatatggttgaatgagcacagtcatttactgatttcagtcttctctgtcattttgttttggtttgcagtgctttatcgccatcaccagctaaaaacagcggatatggatatgctgataaggtttatttctttgaccttgatgttcaacgtaaacacattccaaacttttactctgtaaaaaattcaatatgctgtctaaaaataaaaattgtcacttccagttatccatgatggttgcatccaatgcacctattttgctatctgatttgataattcttctatattcttatgtgatcttgtctgatattctgaaaagcaattctctgctcttttattacaatatatacaattttgaaaaaaaatacgtgcagaaaattgaactatggatagggcttaatttgctataccgtggttagattgcagatggaatgacagtccaagtcggtattgtgaaccttctattagaaacacatggtggtccacgtcatcaaggaggcgcaacttggtattcatctttgtttgaatgatttttggccctttttcttatggcttagctccatatctcagttcttgttcatttctcttattaatatctgtttcatgatgtagcttttccctgcaatgtttttctgcaaacaggaacattcattccatctttccttttcaggtcaccaccgctagcggctatcacatttcgtgatcttgtactgtacactacaaatgaaaaatggcaggtactcttgcaaattagattagcattaaatatagtaaatgattgcacttcagtacctgattagaatgccttttatataggctgtaaatctgaaagaagcaagggatttttcgaacaataaaggattcatttatatttttaaggtttggtactctccttttctctccagaagattaatgtttatttatgttgctaactgttctattgacatttcttaaaaaaaaaactgttctattggaaacataatgaactgagaaatgctacacttgaaaggatttatgaccacacacatttcttctttcaaattcacagaaattggaatggcaatcactgtcagttgatctgttacctcatcctgacatgttcacggatgctcggtttaactcttctagcagtgaagatggaaaacgagatgatgatggtgcaaaacgaatgttttttggtggtgaaagatttttggaaggaatatctggggaggccaacgtgagtgcttttgaacttcaggacatatcatatggaactcgatgtttttcttttcagtttctcttgaacttccctctttgtgtgcttggcttacacattgctttgaacatcagatcacagtcaaacgaacagagcaaaacaatcctgttgggcttgaagttcagctgcatattactgaagctctctgtcctgccttaagtgaacctggtatttggttacttttcatgatgcttgatcccttccctttctgaatgctgtttgaagtggtatttgagcttgaatgctattttattcaggtttgcgggcttttcttcggttcatgaccggggtatctgtgtgcctaaacaggggtgatgtggatccaaaagctcaacaggtttgccttttccatcatgcattttaatcactgcattgcatgcagtacagaagtaggatgtttattggttttctttgtgtccttatttcttttctgcttttcttttttgaccagcttgcagaagctgcaggatcttccttggtatccattattgtagatcatatattcctctgcattaaggatgctggtatgtaccagctctggaaaacttcaaatatgctatgtttactattctattctgactttaaaccattttgtcaacagagtttcagcttgaatttctgatgcagtctttattcttctcacgggtaaatttctttaccttccaatttattgtactgatgtcatctgctgatgatatgattgatttaggttatgtaatttatcttattgtactgatgtcatgacaatcgtttttaaatttgttgaaggcaagtgttcccgatggggggatttcaagaaacttgtcttgcataaagattgccgggctctttctgaggtactatatgttactccctctgtaccctaatgtcgtgaccgagaaaaattaccttttcccaaacgctagtgtattaatccccgtctcaggaaaagccggggtacaccacacaaacatgatacaaaaggcacatctttattatatcaataatatttacattattacaaaggcactttaggcctgacaatcaaaaataaacagcagcggactagcgggcctacggctccatcttcacaggcgctcaactggggtataagccaggactccacctaggacatcttctccaaagcttctcttactgaaggggggaaagatagagcaaggatgagtacaactacagtactcaacaagccacaccgggagatgcacgattaatgcaagggggtacaaggggtaataatataggggttaagttttgcagtaaacagcatttaaaagacacttagttgctcaaagctattttgtaaagacgatcctagagatacacaatattattaatcaagaccgtgaacccacacgaacctgccttaacccaaggcgtacgatgattcagaccgaactggcaacccgacctgggtcccagctcgtcccaagccaatccgggccaaccattccacattttagttgttaagcaagttttaagaattaaaccactaacttgggtacattgctaggcttgcccataatcgagggcgcggctattcgaatagattatactctgatcagaggtgtacatctttacccacaagacacatctttactccgcattccatggccgtggaacccgtcataaagaatgtgacataacccctttacccatcctagccatgacaaaagcaccgacccaacctcgcctacggccagaatcccgggataggtaggctaggattgaacccctagcagcagaacaccggccctgtgccatgacatctcgactaccgagccgcagcccgtgtagccttcatttgccctagagatgtccatcgagccccgatttcgtccatctctatccgtgtcctcttgccaggactagactgagcaccgagttaagccttacccattagacatgtggttagtacagtagtgctttgcaatagaggcccgaagactggtccttacggtggccgaggtgctcctaggaaaaccatgcacctcgagcccaacctaaaaccattttgggaggtttgaatagaggggggaggtgtgtgttcggagacctccggaatgacagaagctacgcgaagcacacaagcaaagctacaaccctgtaaagaagcaataacaatacataaaaagaaagcacatggttctttaggttataacaaacattaagagacttgaacgggtcgattcggagttcgtatggccaaggcatggtcatccgaagtttaatgctgttatatggagatttgcggattattataattaagctttgcaactataaaacatgtgtaagctctagcctggaaaagacaagaaggctgcgctgctgacatgcggaccccacatgtcaacctaagggaccacggtggaccgggtacacagagacagtccacgggtcgacgaaagcggacctcgtgtgttaaccgaggcaagtggccgacaaacggactctactagacaccacgtgggctgcacacgtggaaaccacgcggctaccgagcgggcacactaacacggtcaccacacgcacacacgaacgactaccgacaccggtacacgggtactggggtcgacaaccacacaacgggcacggggcaacaccgaaaggacgaggacggagcaacgagaggagggagtgggccgggaaggagaggagggaggggcggcccgggagaaggaagggagggggagggagctggtccgaggggagaggaggcccgagagagaagggaaaagggagggaggagagaaagactttgggctgaactcggcccaaaggaggaaggaggattatttttagttttctttttaataaactttcttaattgttgttgttgcttaataaatatttccggtgctctgaaaattcaagtaaaaatttgagggctccttttagaccaaggagaatttaacaaaaattctccgggccacattcgaatttttcttgtacgtattttagtgtttgccaatttcttttcgaattttaattaattctattattccttttagagaatgatttttatttcgggatgaatttatcaggacgtgacacctaatataagggattttgacattttgcttgcactgtttgatcactcgtcttattcaaaaaattttggaattattatttattttatttgtgatttactttattatccaaagtactttaagcacaacttttcgttttttatatttgcacaaatttttttgaagaagacgagtggtcaaacgttatatgaaaatagtgaatattccttatattagggggcggaggtagtacgtgcatccttgagtcctttttactggagattatatgcacctggaagttcatcgtaattcacttgctcagttacaatacatactaaattcagtgcattttgttgatgcctataagtatcacatgcattaagcccaacagaatttagttgagtgcattgctaggttaccaaaagatgcatatggtgcaaaataggatacattcacagtttaacttttcgtaagtaagggaatttgtgttctacctgtgctagaatttttgtttgagctatcaaagcaattgaagaacctctgttcgatcctcatgtactgacatgttatttctccagggacacattttctcgtccaccatgcacattgatacagccctctatgcaatctgttccacaagaacctccacctgtgcctgactttggtaagactttatgatacctttgctgagataaatgaattggtcaagtctaacgcctcctattgaattgccaggtcaaaatttttgtcctcaaatccatccatttgagaatcagcaattggaattcacgtcaggaattcctttattttccctctattgtcttcagctcactccttccccattacctccaaagtttgcttcaaaaactgtcatcacatgtgaacctcttatggtgtgtctccttaacattgagagtgaagtaatgctcaccctttttttctgcttaactaaacaccgcccatactttctcattcctaggtaaccctccaggagcaatcctgcttaagaattgcctcattcttggctgatggagttgtggccaaccgcagtgccatattgcctgattcttcaatcaacagtatgtcattttatattaaagaatttgatctctctattccattagatgctgaggaaatcacgaggtacagtggaactaagaatgtttgcccgcaatcatcatttatgggggcaagacttcatgtggaaaatctatacttctgcgagtcaccatcagaaaagtgtctgttgctaaaccttgacaaagatccagcttgcttccttctctgggggtaccaacctgttgatgcaagtcagaggaagtgggctactcgagcttctcatctaagcctctcacttgaaacctctagcacttcgaatgaacagagaacagttaggggctcctctccaagtttgtggaaatgtgttgagctggatgacatccggtttgaggcagctatggttacagctgatggtagccctttgttgattgtgccacccccagagggtgttgtgaggattggtgttgcttttcaacagtttacaaccaatacttcagtagagcagttgttttttgtgttaggtctctacacttattttggccaggttggagaacggatttcaaaggttagcaaaggtaactgctctgcgacaaagacatcagctgacaaacgtgagagaaaactgcctagtgacacagcagtgagcttaactatgaatagtctccaactcaatttcttggaatctttatcatcaaatgacttacaattgcccctggttcagtttggtggtgaggatctgtacctgaaagtttctcatcgcactcttggtggtgcctttgcagttacaactaacttgacatggaaaactgtctcagttaattgtttggaaggagaaagtgctatatttggtgagaatggcactgcagttactggtgaacctaatattttgttgcatgaaaatgggcatcccaatatgagagctgtgttttgggttgaccaccggaataagaaccagtctaaagaagctcgatttattgacatagacatcactcacgtaatgccttatgacatgcgggacatggagtgccatagcttgagtgtatcagctaaggtatctggtgttcgtcttggtggtggaatgagttatactgaatctttgctgcatcgatttggtatccttgggcctgatggtggtccaggggaaggtctcttgaggactctgaaagatttatcctctggtccacttgcgaaactattctcgccatctcacctcaccgacaaggaaggtagtgaattttctgtctttgccatttaatttgttaattcatgctggaaattttgttggtaagcatgcatgttgattgcttctgctcagttgcgagatatttttgctgtttttccttgtattattcatggattcttccccgttccccttgaattgcagatggaatgcccaattccaaagacaatgactacaattcgaagtttgacctggaggtgccagatgatcttgatgtgtcaattgagctacgaaactggctcttcgcccttgaaggcacagaagaagtaggagattggttatcgcctcatggcagtgatcatatcagtagagaagagaaatgttggcataccacattcacgaatctacatgtgtcaggcagaagtagtgatcggcctggatctgcggagaaggtgattcacaaaagggcccttccaatagaacgttttacggtatgtagtggattattttcatacttttgcatttctatgtggcacttttattttttatccagttcaattctgagacactatgctgcacttgcaggctggaattgaaggtttacaggcaataaaaccttgcctgagagatcaactaattggaaatgcaacatcaaataatcttcaaacaggcagtgtttttgataacacaagtagcattggtgaccaaggtgtcgatgttgaagcgaccatggtcatttgcgaagatgagattgaaggtcccaagtggacaatggataatgtcaagttttctgtaaaagaaccggtatgaacatcttctgaatatttgtccaaacctctcggaaattaacaactgcttcctgaactagttctgtttgtttgactcggcagattgaggcagttgcaacaaaagaagaattagagcatctcaccatgctttgtagatctgaagctgatgcaatggggaggatcactgctggaattctccgtctccttaagcttgataagtctcttggccaggggactatagaacaactcaggaacctaggtatgtgttccctacatgtaccctgatttattttcttgtagatgccatgctaccctgtgttttggacttttccccttcttttgctcctttttggtttgctatgaatttttactagtaatacactgctatcagctactccttctgtttcgtattataagtcgtttgactttttctatagtcaaactttgttaagtttgaccaaatttatagaaaaaattagtttcaaatatcaaattagtttcattaaatctaacattgaatatattttgataatatgtttgttttgtgttgaaaatactattatatttttctataaacttggtcaaacttaaagaagtttgactatgaaaaaagttaaacgatttataatatgaaatagagtgttctttatctaactcctttgttgggtcattaaatgctgcaaagaggagatctagttacggttttttatgcccaagtcgaaaaaacaatcctagataagacaaaactgtttcccaatttttcatcggggggttttgccttggtgtatactgtcaacaaatgccacctgggagttattttgatctgatgctttgtgcttcagcaaattatgcagcaatcactattatttggttatatgccattgcttttctttcttgtttatgttactgtatttttatattccctcgtacaatttatgctgttaaaactgattcttttttggaaaatgcttacctacttcattttctcaaaacaattttagattatcttatgaaattgtgatgtcccaggaagcggaggaatcgacaatactttttcacctaggaagttgagcaggcagaacagttttggcagcataggtactcctaggactcctaatctgcactcaactacagatgcaggaacgaaagagttactggaatcaacagttgcttcattacaaatcgaaatcttagaatccaaggccaaatgtacagccctcgtttcccaggcgagcggtgtggaggatcagaaatgcgccgaagacatcaggcaattgaatgacaagctagagagcatgcaatccttggtgacaaaattgagaactttgatctaagttgcacatagttttttgtgtataggttcgtgcagtccaaaacttggaagtggctaatgctgtacttcctcttcattattctttttgtgtacatctttatgttccttggggtgtatacaggtggattctggaataatgagctgacacgcagcaaatataaaattttgtagctggaatgtcacatgtagcactgtgttcaaaacttcaagtgcagtcattaggaataacatttttgtcatctgtatgtgactcatgtagtatcatatgcaaagttttgctgttgtcacatacaccatctttctactggtggactgggtgttttgcgaccaaaatatgtatacataaataattttcaaaaagaacatatgtactaccaatatactctctgttttatattgttttatattataagtcgttttgatttttatcttagttaaacttatttaagtttaaccaaatttgtaggaaaaaaatatagtagcattttcaacaccaaacatactatcaaaatatactaaatgctagatttaataaaactaatttagtcttttatatattactaaattttcttaaaaattaaatcaaacttaaaaagtttgtaaaaaagtcaaaacgacttatagtatgaaaaagaggagcaagtttttcctctgatatctcacttagtactaatatcagcagtgaacctttatttttgtcatgtttcaattttttgtatggatttatcccgtgcaaaaattttagtaatgagaacaagatatgaggggataaatttgtaacaaaaatatttgaagtacaataaacctattggacctagatatatgtttgtatataggtgtattttatcggcatactcaatatacacgaaggcaaatgggtcattttcatgcccctccatattggcaatgtgacatgtcctacatatgctaaattggcaatatgtaaagatttactcttcaatgacattttttgtaatttcatccaaaaagagtggcatctcaatagtctagttgtaaaaatcgaactgaaccaagggtttaaccaaataaaccaaaaccaatgcctagtccgaagatataactgacttgagaaaaatcatttaaacccagatggtttactacataaccgaaggaaaattggggtggcgtagggattgaaccccccacggtcaaggcccatgggttctttcacaaccttacataacccttaaatattttcataccaaaaatgtataaaaaatgaacgcatcgtattttagacctaaccctcaaattttctaatcaaaatagttgggctcgttgctacctctatttgcatacatgcgtgcgcacctgactatttaggttagttgctataatggttttagaaaacgaaacaaatatatattttatgttgattattaaaccaaaattctctcaataaaatatataattttattattttattattgaaccgatggttgaaccggtgaatcggtggattcattcaccggttcgaacaccggtcgggtttagagaggcaatccgccgccgccgcctgcgccgatccccatccgccccgcgagcgagcagaggcggcgctgccgctcgtcctgctgcttccgccgcatccacatccttcgccgccgccgccgccgcctgcgccgatccccccatccatcccgcgagcgagcatcctgctgcttccgccgcatcctggttagcacatcctctttcccatctctccctctctctttttttttatcgaatttgcgttaaccctagcttctgttgcagaaatttggcttaaccttgatgtttgtttgttcccaaaaagtttgggggtgttgaactgaaccccccatgccccatgttagatccgcccatgaatggatcatgattcactccaaaacactatggagcatcctgttcctggagaggagcatgaggaggataacagcatgaaagtggatgtggcatttgatggagtgcacagcccgttccggtacaggcacaagaaaaggtccaaggtttgggaggagtacaagcccatctttctgaatgggaaggttcagtttgcggagtgtctctactgccataatcgcctcagctgcaaagattccaacggcacaagccatctatggcggcatcagaaaatctgccctggcaaggaggaagcggcgcagaggcgacagaaggattcctacttcccatgcggtataccattcttgcctattctgggttcattcattactcaatagtgtagataagttaacattggtgtggtttaggatcttgagatgtagatattcctttataaaggcgatttacctcaggaatataaataacgtttccatattttatatgcacagttttggtgaatgagaacgatccagtttcaccccacgatccggtcaatgatgttattacagagacgcttagtgatataaactcggtaacacccagcggtaacagattcacgtcaaaggtgtggaaggagtttacacctgtctatattgaggggaaactccaggctgcagattgcattcactgccagaagcgcctcagtgcgaataagttcggggggagaagccatctgagtcgacatcttataacctgtgcaggacgacgtggacgtggagggggccaaattcatcagaagggtttattttatccttctagcgtgcctagtttgaagtccagggtgcaagatgagctctcacctgccttgacaaatgggaaggttcagatcgcagaatactctagcaagcttctgagggcaagtagctctggtgactcgacccctaagcccattcgagtggtaccagcagagcattccgtgccgactccagattatacaagcctgatgaaacagaggacctcatttgtgaccactccagctggtcaggaaacatctgatccagacctagtcgggatgatagctttgcatggttatcctttgtcaattgtggagcacgaagaaatgatgagatttgtaaagaaactcaaccctgtggtcaatttagtctctcgcaatgctatggaagaacattgcttgacactatttcagaaggaaaaggaaaatataaagggtaaaattgcacatttttcccgacgtgtctctctgtcagcaagcatctggactcctgatggacctgagacaacagtaaattacctctgtttgacagcacattatattgatgaagactggaaagttcataggataataataaaatttggaatgttttggtccgcgcctgctgatttggaaaggatgatacattgtatggaagcctgtgtcccagagtctgagagcggatcatataatgtcatattggatgccattagagattggaatcttgatcagaagcttttaagcttgacttctgttggtgaagttaggggtgacaccaatacttcattgctaaaggaaatgcttatagagaagaagtgccttcctattggagggacgctattcaatgttgcctgtgtggactatgtccttaacagtattgttttcaaagtgcaagcagatatacttcgtcttgttggtgacatagtaatggattttttagtgtcattgacccagcagcagcttctggaagttatttcacagacgggtctaaagtgtccacaagaagatgctaagtggtggcacaaactttattttagacttgaagtgcttttgcatttcaagaagtcatttccttctgaagaaagggtgtccccagaagatacaaaaactgctgagtccgtttgcaagattttgaggacaatttatcgtgtcattgaagttatttccagccctagctctccgacagcaaatatatattttaacgagatatggaaagtcaggacagttttgcaagaagaagcattaaatgatcacagagaaatagctacagtggctatggtgatgcaggaagcattcaatgagtattggcaaaattcatatttgtggttggccatacctgttgtgctagaccctagattcaaattcagtttcattgagtttcgtctgaaacgagcttttggaacagattcggcaagctacctatctgtaatacgtgaaacagtccgggaactcttcaatgaatactgccattctttgaatcaggcaagtgatgttgtttcaaacagtgaagctttgtgtgcagatgataatgattcgttggaagattgggatcagcatctccatgaacaagcaagtcgtcagctatcttcggagcttgatgattaccttgaagatggtttagttcctagaaaggatgattttgatattttaaactggtggatgactcatagtactaagtacccaacacttgcaactattgcacgggacatcttagccatgccagcatctgctgttcaatctgaagcagcattcagtagcagtggaccagtaattccaaagcaccagagtacattaaacatcagaacaatcgaggcacttgtttgtactcgagattggatgagataaaactggtaagattctataaattgctactcagctccatcctatctttgtgattttggtagtgtgaacacactgtgatttagtccatgttttcttattaccagaatcttgtttccttgttttcctgtattggaagtttggaaccatactatatgatcagatgaatgtcagaaaccaaagcctacaatgttagtaactttatatggaagtacatattagaatcttacatgttcatgtgcaatcttagcagctacatcactttaggatgttttagatcatgcttgtaatttgtaattgaaacattttgatcccattggcaatcatgaatatcttgttctgtgattgcatgctttggatcacttaataagtttgtgcgttatagtttgtgtccatataatcatgatgatatctcattaggaacttgattcctcacatctttttgctatatgctcttacatgacaaaagaaggtcgctgttgaaatttcacttattaaatcaatgcagttctggtatatcctcatccaatctattcatgtgcaattgcttgaaaaatggtatgctgcagtgaactgttgagatgggttgcatgcagctttcgccggtggaagatttcaggcagtgtatgatggtgcttctgaccaaggataaccgctctgatgatcgagccccaacatggtgtatcaagcatttgggagctgttaaacttcatttcagtcgagatgtgtatgcatataaatgttactcccatcaccccatgcatttgcctggtgtagtgcagatgtatgccgttgtttagccaaagttcaggtcagcccagagccttaggtcaagtaggaactaggagttgtacgacgagaatgttgcaaatatcctctgttatgagcaattaatctgtgttatgtgcagccttgtttacctgcttatctgaattgtttgagggtacgtaggcaatgcgtgttgctgtctggtcctaatggaccgaatttaggatgtggcccactattcagcactatcccgtaaaggtaaatgttgtttaaaggcccaacagctgaacagcataaccctcatagtttattagagaataaaaattaatttataggtaaaatttgtatatatgtgtttttataacaacttaaaaactaatactgaaaaaaaattatgttgaacatatttaaaaatcaacttcaaaattaaatttgaaaattcaaacttgacttttcatttagcttgcgatgggctctagcctctggctagcatagcatgccatgtctgggagggggctggcccattggtcagacacaactgagccttctttttacatgggccggaattgtaggcccatgtacacagcccacaaggctattttctgggcctctatcctcctccacgccggggagccttccgtcgatgaggctccccgacgcgctcctccgccgcatcgccgtcaggaatggatagttccaaaaacccatcgatttaccacatgttccattaatgtaaataattctacatgctaatgctaaaatttaatttctactcccttcgtatcatttgaagtgcagccataattttccacactcaactttaatcattcttcttatttaattttttttaaaaaaattaaaaacataagttatgaataaagtattattcatgttttattatctcataaaaaaataattatcatattttttttcaaataagacgaaatattaaaattgagcatgaaaactcataattgtacttaaaatgggacggaggagtagctaagtagctagctaaattaagctagaagaagtcgatgccgcatcgcttctgctggaactccggcagcagctggccgtcgggcccgaccacgacgtcgcaggtggcgtgcaccgggtgccagtgcgacccccagaacgccacgcgcacccgtatcctcgaccggaccttcaccgtgaacgccacgccgccgccgccgccgcccgccgcggcggcggcagcgtccctcgccatcatgtccgtggcggcgccggccggcacggcgacgccctcgaacccgaccgccgacgtgcccctcggcggctcgtacagcggcccgccggtgaggtccttcccgtcgacgaccacctcgccgtcgccgcggtactgcaccgacatgtacacccggccgaagaagaaggcgaggtcgtggttcgggttgtggatcgtcagctggccggagagcgccaccgggccgccgccggactggacgccggcggcggtgaacgcggcgacgtggaaccgcggccggtgggggcggacgacgaggtagacgacgaagaggagcacgccggcgacgaggaggagggagaggaaccacgagcagagaagcttggtgcagcgcgtcaggtgcggccgctccctcggcagcgggcgccggatgcggccgccggcgatgaagcccgcggtggccgtcggcggctgcgacgacatggcggcgtattatatatacgtgtgcggcggccggcgagcttcgacgacgatgggatggagctcgttggtgcagcaaagcatgggcggcaaagcatcgccggagaagatggaattcgggagaggttaaggaggtgtgtacgcgtgtacatacgtagaggttgcatggcaagttggtttttgggtttcttttgttgcgcgtacatgggcgattctttgaggagatagcaaggaacaaaaggggtagcagtggccggttttcttcgtgttttggttctctaatctcctacttattttatttgaaaactagcatggtggcccacgcatattgcgcggctagcatcattatattttctgtcatataatagcatatatgttttctcaatgtattattcaaatatattaaaatgactacataattttaaattttgtactacctttacaaaactactaatgtataatattcatattgtattttatatatgtgttagttattaattatttttaatatcaaattttagttatttgtaaattatattcctatatggactctaggctcttctttcaatattatttatttttaattctgaacttttattatttataattgtatttctatgtggactttaaactcatcttttaatattctttaatttttaatttcgaatttcaggtacttctaaattgtaatcttatattaactttagactcttcttcccatatttttttaatttcaaattttagttatttgtaaattgtatttttatacgaactctaaactctacttttaattttattatgtttattccgaattttagttagttttaaattcctatatggactctatactctacttctaatattccatattttttaattcctaatttctattattttcttaattgtatttttatatggactctatactctacttctaatattccttatttttaattccgaatttctattatttcctaattgtatttctatatagactctatactgtacttctaatatttcttatttttaattacgaaattatattatttctatatggactctatgctctacttctattccttttttaattctgaatttcagttatttcctaattgtatttctgtatggactctagtctcctcttctaatattccttatttttttaattccgaatttcaactatttctaaattatatttctatatggactctagtctccacttctaatattccttattttttaattccgaatttcaactatttctaaattatatttctatatggactctgccttttctttttcttcgattaatgtgagaatttctaggccatgagagcgaacgtggaggcttccttttctatttctttaataatataatagatttcatattagtaaaatatttgtgtttgattacatggaagctagtggcacggctaatcagggtttgcaattttgaaacaggggcttttgccggtggggctaaagaaccgaaatcaccgaaatttcggtatttttaggccgatttttttttgaaaatttgatgtactttggatgaatttgaataaacttttaccaaattcacaaaaaaaagagaaaaaaactgaaaatttcaggagatatatgtgcttgctggtgggggcgaaattaccgaaatttccaaaaattcgtcccgaaattgcaatcattgcagctaatagtgttttcaaagatcaactagtttacaaacatcgatggtaattcgtagtgcagatggccgcccaacctgcccgagagttgcctccatcatttgggatctaagtgcgctcgcctaacatacgtggagagaaatagagcccgacagtaaaatatatcactcaatttctattaaatactggaggtgtgcaataaggagtgttaagatttcgggcaactaaatttttcaaaaatttaaagcgggtttctcacccttggatgatatatatttcaatggctctcatcaatcctctattatttatttaaaaatgactcttctttcatagataaaagtttaaacaacattttttctaacataaacatgaaataaatttgcaattaatattacaaaattaccggaaaaaatgttcaaacttggataagcataaatcaaaaccatttacaaaaaaaaaatgtagttcaaatgaacttaaattacacgtagcactataattttaggcttagcaatgtacaattttgggtgaaaattttcagacagttcaaatctagcaaatacatgtttctatttcaattaaggccagtaaattaatactactatacaggtagatgtaaaagttctgttgttactgcagatgttgatagtatggcgcaaggctggaaagtgatgaagaagcgagacttaagtttgagaagttgaccgagtagatatgccaccgtatgtacacaccatgtggagctagcttaatgacttggtatgcttcttcccccctggctagggtcactccatgaatatccacttcacaaagtaaacttttctgaccaaatggccagcgagcatatttcggcctcaagtttcttctgcagccgacatgacttcttgcttgtcgatactgctataatgcagaatcataattagcccaattcgttttttgatttctccatttcaatcagtaacacttaacacccaaaatcatacagttgctggatagcggtacattacatcacagtacttatcaaacatgtaacaccgaaggcattacgcaacattttatttccttgaatgaagcaaatagtttactttgattgtacatcataatacaaacaaaggcataacaaaacatatttcacaataattctacatataccaaggaatatcaaacagctaacacttcagacaaatgcagttcagcggttgtatatatatttgcagcctaattcacaaaggcacagtgcttcctgatctccccctgggcgccggtgagcacctgcatgttccccatcttcaccatggacgccgcgaagtcggcgaagaactccgccgggtagccggcgacgccggcctggcggaggatgtagcccctggtgaaagggtcgagcatgagcgtctcgtcggaggtgaagagcgccctgcccctggcgatgtgcctgtagtagctggtgtcgaacgtcctgaagctccccgggtccatctccaccagcgtcgtcttgtcgccgggctggcacttgctcttcagcctcggcacgtagtacttgtccagcgtcgggtcggccatcatcatgccgctgaagttgtacagccggctggcgaaggatgaacaatgggaggttccaagagtgtgcccacctgtgaacaatgtgtcacttctcaaattgcatatgcacatttgtgatgagttcttggtaattaaacaagtttggattgcaattttgccatggttttgaatctctggctatagctgtttgagaagagtcttagccactatagctccattaagttcgctatagctgtttgagaaggtcaatcgctaaatatcttaacccgctatttaaaaccatgaattttgcaagtgcacaaatgagtatggtgctgaacaggaaacgatgttttgaccactcgaataaagagctatgctgtgtttgaggataaagtggtcttggtctcctggcttggttctgtactgtgccatgtgattagaactaagaaccacatagttttgtacttcccattttgttgacttggtatgcgcatatgataccttcctttattaacaagttgtatagtaattaaataagtgatcacctttattggagaatgctactgggatatatcgggatcagcagagtgtttaaaaggagcacaggcaacagaaccgagagttgcaactttcagtaagtacagtataaatcatctagggagctagtctatgaagattaaacattgaagttagtgaagaatagtatatacctagcagaaccacctgatcctttgcgtcaaggccctttgggatgaagaattgatacaagttccgcgtggcatcgaagaaggggggagggaggttgttcacagcatcatccttcactgatcttgtcccatccctccgcccagttggaacttcccagtgaggccctttggtctgttgcacaagggaagaatagggacttttctcaactatagttctagttactgtaagcagcaagaaatccaatagccacgtagaatatggtgaaaatcaaactgtgtggttttccactattgtcggcctaaaacagccaattctcaccacttagccaaactatactaacttttctaactaaagaatgaactaagattaatgaacatggaagctagttcttaccaagaagacaacatctctggctaccagagcaaggatatcagcacaggacacaactccagggcaggcttgctccagcttagctttgacacggtctattgtgccaaaacctcgcagactgaggtttggtattgattccttctcagatggtgatcctggtgtgctatccagaagtatagagccatcgcaaccctgcaaaacacatagaggcacatagcttagtaggataaactcaattcaaaatcaaaacagctcagagcatggtaagcagtatgcatacattcacaaaacaatcatggaaatgcatgcgaagtagagggcctgcgagacttggaactcgggatatgatcttggtcatctcatcacgaacaatgacctctgcttttggacatgtgtattggtaaaagccaatgtttagccctggtggattggataatactaaggagaactgtaggacaagagaaaggacaaatccgaagaggagtctgtaaggcatgttgtgcatgactactgtggaaccactgcctatgatgaaagagttgccttctatgattgttgaggcaaattataacttgcagcctgctttatagctcagttgcttaggttgtactatagtaaacaagtgacataaaccatttcccacagcttcattttatttttcctaatgcaacaagcagatggtctaagacttggagatcgagattttacaagccctatgagttgtgtgcatgtacttcaattgaagaatacgcaagtcttggatcaggcatctagatagtattacctggtaatattgcataattagttggtggtggtcatccttcgtggcttgtgcacttgtgagtaatacaggctcttgtattgatgaataggtcacgacatgttgctaaaaggtaatactctctagctgttctaattttttattttaaatattatatgggttgaatttattctggtaaagaagttcagaaggattcaaagatatgagataatatatcagtttatccgttgtcgtttgttccagaggaaattgtgtatgttcatgcaaagtggaaaagaaagaaaaacaatccatttcctgttttgttagtatttaagggaaccagggaatataatatggttgcctcgctatgacattatcactgctagtttctcttgggattgcatctgaacactaaaggaactgcccataataatttcttaactggcaccagtcagttaaagtaaataatatcaaagcaacaacccattgtttgatgaaatcaatcttcttcctttgaaattaagttgagaaaaaaaaaggttgcatgacagttgtgctcgtgtcaatgaagcaaatcaagggagaaaagttagaagagaatcaacatgatcactgctagctaattattgaatgccaaacgggtgcagaagcatctcaggcaatgtgcagatacttcattttgaagcaaaatttaggtttgatcaagcatataaacactctaagaaagatgagaacatgatgtgcaagttatggaaaaagattctctatgtttgaataaaaaatgcaagagtttgtgtaagtaaaccttcagtgaatccctatcatactgagaaaatcggtccattggtcagatattagttgcagcctttaagttaataaataactgctgggctcaagataaccttccgctgagctctccagagaataataataaaaaaaaggtgaaaacaagtcaggagtagtgaacagaaccaatggtggacaccatagtgcgtgggggtacagatgcacccctaaaacttgaaaaaacaccaaatatataggattacatgtacgtatacaatgtgcacttagataagaatcccaaagtgttaaaaattttgtatgtaatacatgtcaaactttatttttctttatttttttagattccattggtctttatagggcatattttaatttgaaaacaaaaattcaagattaaacattggccattgatttctcagaattatattcttaatagctataaagccaatattttgtgaacgcactttgaaatatgaatctatgggcacaaatttcacattaaatatatattaattatattaatttgattaattgctggtcaaaatatacataatttgacattttgaaatttaaagatgccctataaaaaatcaatgcaggttttttttttctgtctgttgtaatggaatcatggaattttctctatcaatattccatactatctactagtgcatcattacatcttcacccctattgtcaaaatcctgcaccacaggagataacaatggtttaagtgttcactaccacatggcttgggcaatgtattcaattactcttggagtaactgaaaagtgatgtcttttggttgttcaagaattcaagtctaagacattcacagcaggtaaagaaatttttagttgacctagctcaaaatgtgtgcttcactcaaacagcaagggagtgcaggacagttttgaccatgaagttgttcaacaatggtggacattgacaagttcgaccttttccataggaattaaacagtactccaatttttacctcatgacttgttcatgcacataagaaaaaaaatgccaacccctttagtcatgttcagcagcaactcacagtctagttaatacttaataaatgttttctacgatattcttataggacatcaaaattgcttttaaaagagaagggttaatatcccataattattctgtctaatcaacgttatgtgacttgcaaaaacacatctacagtcctaaacaattatgggactaattaagatttaaagcacagtaacaattcagaaaattatttatcaaggaaagtaacccacagaagtcagatgaacaaaaaacttacactgaacgaacatgatggcaggtgaatttgtgataggtcaataggtcatgagctattcactgtttaactgaacaggcagaaattggttaactctggagtctgaactctgaagtgtgttgcggcttgtcaaagtggcccagaatttgaggttcatctgatgcatctatcagtggctaaaaactgtgatacaaatttcttgcagtggaaaagtttctgtcatattcagatgacactgaaaccaacttcctttccatctgttgtttcatctattacttctctcgtcctctgtgcatcctcccatagactacattctgcatacatgtttgcaagaacagcatagtttacagaactcccaggatctatactaaaaaggttcttggctgcagtttctccaagaagcatgtttccatgcaatttacaggctccaagcattgcacccagcattgatgagttgggttttaagtttgtcttctggacaagtttccatgcatcttctaactggcctccacgagcaagaaggtcaatagcagagctgtaatgctcagctcttggatcaataccatacctgctcatcatggaagtaaagtactccatccctttgtttgtcaaaccacaatgaccacatgcagatagaagagaaaggaatgtcacatcgtttggcctaacaccatcttccaccatcctattaaaaagagtcacagcatcttctccagaaccgtttcttccacaggcagtaataagtgacgtccaagaaatcacattccgatagggcatttcatcaaaagcacgcttggcatctgaaaattctcctgcctttgcatacatatcaaccagagcattgtccaatgcaatatcacccataggctgcttcttgcacatatatgcatgaatttgtgtcccaaatcttgcagaagcaacgcttgcacaaaggcaaagcactgagcttaatagaacaccatcaatccataaacccttccgatgaattttacagaagagctccattgcatcttcactgtagtttctatccatggtgtacccactgatcagtgcggttgatgacacgagatctggttcagagatggaatcatatatcactcttgcgctgctcatactccgacattttgcgtaagagttgataagtgatccgatgacaaccttttcatcccagtaacccaatttgatgatgcaactgtgaattagctcaacattgacagcaacaccgactattccacatgcttttagagcacttccaagcgtgtaatggtcaggaatcatcgctgtcaattattttgatgtaaaaaaaagaaagcactttcaattttagtgccaataccatcagcaaaaactaccttgcaatttcatgctaggacataataggcagcatgattacaggaaaaatgctcaagattgttaaagcaaaaggagggacggcataccttctttcagcattgaagagaataatccaagcgcatcaccgtcatgcccgcgttccacaaaccccctgatcagggcattccaggacaccacatccttcttccccatctccgcgaacagctgccgcgcatcctccacggacccgcacctcaggtgcatgtccatgagggcgctctgcacgaacatgtcgcccgcaaacctccccttggcagcgcacgcgtgcacctgctccccgctcctggcgcacccggcccccgcgcacgcgctggccgcgctcccgtacgtgaactggttcggccgcgcgcccgacgcgcgcatgagcgcgaacagctccagcgcctcccgcgggcgcccgttcctggcgtagccggagaccatggccgtccaggacacgacgctcctgtgcggcattccatcgaacaccttgcgggcggcggcgacgtcgccgaaccgcgcgtagaagatgacgagcttggtgctcaggtgcaggtccggaggagaggcggacgcggcggcgaccctgccgtggacggacttgccttgccggaatgcgcaggagctgatgcagcactggagcagggaggagtataatggggcggtgggtttcgcccccattaggagcgccattcgcgcgcgcttttctccctcctcggagcaattttgatctcccgagactcaacaattcatgaattcatgaatttatggcagggtttggcaatccaataatatgagcacgaaacacaccaggagcaaaaatctgaatatatttagattcagttctactaaccggcagtagaaatgagcagctgcaaatatatttttcatgcaaaagggctagaaaactgaactatacaaagttggcttcaatccataaatccaataaaggccttctgaagaatcaaattcagtcataccaccatcagttatccatctagcacatgaaaatcaaagtgtgaaaaaaaaggtgattggataaattaaacgtaccgttatgattcaatagcatagaagaaagattaaatggagaagaagaaaaaatggagatgaagaaaaaattatgtgcttttgcagattggaaagcagacaaaagggaatgaccaaattttttaggctgaagagaagaagcagaaagagataggacagaggggacgacaccaaaaacagttgaactgcagccgcgcagggacgctggtcgctggagccggcgaaggagctccttggcggcggccatggcgccgacggacgtgggtggcagcggcggctggagtaggacgcgatggttgggattggggaatggccgaatgggccctcaaccatttttgggcccaaaccaattttttttcaattttgctatatctcactcgaaagattttttcttatctctcactcgattttctcacttaaatttacagtgcattttcttgtaagttacagtgtaatttatgaaacttacattgtaacttttgtaagttacactgtaatttttgaatcttcgcatgtaaattttaaattttgtattggatttggtctttttcttttttattggatttggtctttttctcgaggatatggtaatttagtgtccattatggtgtttcttaattactttttactttttattatatctatcggattttaattcaaagattaaaaatctgtgtgatacgatcatcaaaatctgtgtgatacgatcatcaaaatctttcgaaagatgtataggtactcccattttttttaggcaccaaaccgcaccagcccaattgtgaaatcaaccaacaccattagaattccaagcatcagaagccgtaaagactgaaatgcgcatgaaatcaacaaacataccaggatagataaccaaaccaacatcgacaccccaattccaagcatcagaaaccgtcaagcgcaaacagattgatcaacaggcacgcgcaacagtggccggttacgaccatgtgagcaatgcacaaacagaatctcatctcggatcaaacatctcagaaacattaacagaagtagaatgataatatcatcgattggtaccgatgcacagtgaagcaaattgtactagtatggataatagtatcaacacaacttagggactctaaaccagaacacaacacaaccatgacacgatgatatgacagacgagcggcataggtataatgaagtccaatgctgcaccacagcacacgctcagagaccaccacggaggcgcaggacaaggtgcagggtggactccttctggatgttatagtcggcaagggtgcggccatcctcgagctgcttgccggcgaagatgaggcgctgctggtctggagggatgccctccttatcctggatcttggccttcacgttgtcgatggtgtcagaggactcaacctccagagtgatggtcttgccagtgagggtcttcacgaagatctgcatacctccacgaaggcgcaggacaaggtgcagggtggactccttctggatgttgtaatctgcaagggtgcggccatcctcaagctgcttgccagcgaagatgagccgctgctggtctggtggaataccctccttgtcctggatcttggccttcacattgtcgatcgtgtcagaggactcaacctccaaggtgatcgtcttgccagtaagggtcttcacaaagatctgcataccgccccggaggcgcaggacaaggtgcagggtggattccttttggatgttgtagtctgcaagggtgcggccatcctcgagctgcttcccagcaaagatgagacgctgctggtctggtgggattccctccttgtcctggatcttggccttcacattatcgatcgtgtcggaggactcgacctccagggtaatggtcttgccggtgagggtcttcacgaatatttgcatgcctccacgaaggcggaggacaaggtgcaaggtggactccttctggatgttataatccgcgagagtacgcccatcctcaagctgcttgccagcgaagataaggcgttgctggtccggagggatgccctccttgtcctgaatcttagccttcacattgtcaatcgtatcggagaactcaacctccaaggtgatggtcttgccagtgagggtcttaacgaatatctgcatctggaagaggcaagaaaggattggaattaacataggtaaaaaaaagcagctggagaataagttggcaccagatcctacgatatcggtactgtcagctcaaaatagatgaacatatcaatcacatcatactacactacaattggacagcatcattaatcataagagcgctgctcacagctcacaccacatcaacaagcaacaaccaaaaatatcttcagataataacaaaactgacataagtaactacaggacaacagatctatgtaagaacacagaataaagccacctagttctagcatctgacagatttgatttgcacgagtaaagcaaataaaacgggtaaaaaaacacagtacaacatcagcactacagttcaactaggcaaagagccagatacaatacagattaaattgaccttagaacccaagctctacagttcaagtaggtgtacacgatacagatgtaattctctaacccagctccacacaattccaatccaaatccaggggaaaaaaactaagaacacaattccaatccaaatccagaggaaataaactatgtgtcgcctaactcaacctaaagattttaacctaacgagctattcatctattggaacaatatcagaacaatcccatccgaactaagcacaaataagtaaaactaaatctgatcacaaaactcaaactatgtggcaggatcaaaacataactgtgaactactcttattatccatcattagggtaatatatcgaaacaatccccatctgacacatcattagggtaatatatcgaaacaatccccatctgacacatcattagggtaatatatcgaaacaatccccatctgacagaacaatctcaaaaccaatccatctattagatcgatataaataacacagatccctacctcgattctcacgaaaccctaaatcaatgagagattaagaggattaccctaaaatcgcacgaaaccgtaactcgattaagaggtggatcaccctaaaatcgcacgaaaccctgagagattgagactaactcgcacgggatcctcctacgctttccaccacgagcatcaaaatcgcgagattagacgggcaccacgagagattcgaggattaggacgaggtgattgattagttaccttgacgaggcgattagagaacgcaaagcttcgctccccctccccttcggtcgattcgactcgctatgcgattaatggagagaaaacctctctatataaagcgtgggcaaggcggtgcgaggcagcatccggtgcggtcaccgccacgcgtacggcccaatggcagcaccacacgtgtccatgtagttggaggcgcgacacgtgtccggtcccggtacgaccatccagacggtgcccggaaccaactccgcgtcaggtcatgccgcctctctttgacgaagtcggcatgcctgatcaagaccgtacgtttccgatccaacgatcaggaaacatcgtacttgatctgctataagctgcgtgtgggccttaataatcctctggggaaatatttgtgggctgaaatgaacgggatattgggcctagacaaaccagggcccatgaattttacggcccaatagattgttgagacctaattggctaagcccaactcgcgcactctgaccaaccgatcggaagttcgcgtccacgccgccctgctcctccgtcgccgccggctcggcggctgacccccgcgccgccgcaccagctgcgcgcgcgcgcgcgcgcgcccccaccaccgcggcctctccctcccacgcgcagagggcacgggcagaggccgccgcggcgccgtactcgccggcgcttcgtcggcctcggcctcgggtcgaggccggtggcggggcctcgtcagatcgccccccttcctgtgcagtaagtatttcccacggacccaatatggattcgttgttctaatcgatagctgctatcagagatgggttcttctgcgtgatttacctgttcttcacatcctctgtcgatatggggttgggtggggttcgtttcttgcgctaatgcaagatttgaacttgcaggcgtgctctgctgtgtgtgcgtgtgtgtggcaatggcgttgatgcggcggagagtcgggggctacatttgctcggagctgtgtggctcggttatgaatcagaggctgtactcttcgagggtggactggaagcagcttcggcctatgatcctcaagaggataaagaaccgggcaaaggagtatccaatcaagcgcatgattccagtagcggaggaggtagtcaaggctagagagattgtcaccaaaggtgtctcgacgctgcttcaagttgttcccatacattcatgcaagtaagggcgagaaatgtggaatttttatgtatttgtctgtttgtcttaacacttggggaagatagtatggctaaacaagtgttttatttgtagtagatcaacttcaatttaggcatgcactaaaaatgttccagaacatccagaaatggggcaacattacaagattaccagtcttctatagattaccgttgttattgtgtaccttgattgcatatagccatgattgcttttcttgccatgccaagttaagagcagctctctctgatgtgcatgtttgatatcattttcttgattcctgtcctaaaatattattgaatctttctaacaccttgtgtttctattctcactgaaggttttgtcccgaagttcatattggagctgtagggcatgagatgcaatcctgtcatggtttcaagcgtatgatcaagaaccagccgcataaatggggtccaggatgcttgaatgacatccttatccctgttgaatccttccacctggaaaacacgttccaggatgagataaaacatgaccagaggtttgatttccctcgtgtcccagcggtactcgagctctgccatcaggcaggtgcagatatacctgatgaagtttggcataggagtggcacgtcatctgcaatagtcagagaaaatgatgaaaaacctgctgcttttttgccagaagagcttagattcataggtcagaggacaatagaagcatgggaaaggcttagattaggtgtgacaaaactcctattggtttacccatccaaagtgtgtgagcgttgctctgaagtgcatgttgggctgtcagggcacaaggccagaatgtgtggggtattcaagttcgagggctggcgtggtaaacacaagtggaagaaagccgatgtggatgacctagttcctccaaagattgtttggcaccagcgacctcatgatccaccggttctggtcgacgctgggagagactattatggtcatgcacctgcggtcattgagctttgtatgcaagtgggcgcaagagcacccccaaaataccattgcatgatgaaggcgcaaggcctagcaccgccaattaaatgaggccaggggatctaaggagttgattgccaaattagatcagcaccatgatgttatacaggaattgtacagatcagacatcaaaagaccaatgcagagaaactccaaggttgcaaatgttgtgattttgcccaagacattagttctttgaagactgcatgttatcagaattcaggaggtcagaactaacacaattatttatacccattgatctgagtgagagccctcagatgataacaagggaaaattgtttctgtggacaacttcgtgcatggtaatttatcgactatcagcattgttaagtattcagagcgattactttgctgccctttcatttgttcatcctccatcatttgccaagaatacgggtggaagggctttatgagcctgctgtttggtcttcttctcctctgcttgactactgtaacatcattggtttctgctgttttgtgtaaactttctcacattacctagacatccttataggcagttctgttataagttagccatgtagagacgccttgttgcaagctgcaacatatggtgtggaacatcacagaggaatgtaatatcacttgctgtattgtaagccctagtcaaaatccctccttgaagctgtaatctgtgtacagatttttacctggggctccttttgctgtgccaataattacagccacgttggctgattttttttttctggagataaatgaatggatggtgaagtttttgttctttgtatttgaagttgaacattacctcgagtacttgaccccatatgttgctgatgttttttcagttcaagtaatcttgtctctctatgaatgcatcattctggaaattaaagattacttggttggtatttgatgcgtctaacctgttattaaattttctctgcaaaacgtgtcactcaattgtacttcttccgtttcaagttataagggaactgttcactttgatgcaaaaaaaaccttaccaaaatttggatgccaaaattttggcaacttaccaaaattttggcaggattttttatatagttaccaaaatttagcagcaaactaaatgtagccatttttttttgtaactttaccaaaatttggtaaggttgaaaatgacatcaaattgaataggcccaagatgtttttgattttggtcaaagtcaaagtattttaagtttaaccaaatttatagaaaaaaatagtaatatttataacaacagcatagtaattgaataaattttcataatatatttttcttggattaaaaatattattatattttttctataaaattagtctaatttaaaatagtttgactcgtaacctgaaatgtatggagtaccatgtaaacactttttaccgtatgtggccgtaacctggaaggaaacattagcagaatttgcaaccgacatgatttccttggctaccaatcttccttctgcgcgtgcaattttggtacttccgtcagttccgtgtcgccgacgtacccggatagaaaccgtgagagccaagtttggcagcggcgtacgaggaggattctactcgcgacctgggtagtggggaccgtagatgcgccgtcggacggccgagatcacgccacgtctaacaacttatccgacgtggactccacgtacgacttggactcctcggcttgaacctttcgcgtcccctcataaatacacgcgaggaggcgccccctgattcgtgcaatgcaaaaaacgaacgcgaagaacacgaatcctccggcgatctcgagcgcaacgatccccagagccaagaaacccgccgctgccgccgtgtcgccgtcgtcgaagttggcgagcagcaacaaggtcaccaaggtgtcgccgccgccgccgcagttgtccgcgctgtgggccgccgcctcgtcgtccg

SEQ ID NO: 5226 - DNA, 40761 bp, Oryza sativa
gaagtagatccatcaaacggaagaccttttcacttgctccaacagactgcatcagagaggaccagttgtctccaatccaccatgttgacaaaattagccactcagcatagagtatgaattttgtcagttgctcagcagttagcttcccagccatgatggatatccctccaatcaacactgcaatgacctacacaaagcttatttgcaagaatacatcatcaacggtacaacaaattcatatcagaaccaggcattttatattttacaaaattgctaatttaaatatgttctgattggagtatcattatgaattgaacagaaacatcaaactacctgagtagaatggtatagatagttcaaactcaagctccagcctccataagccattgtttgccgaaagcttacatcatatagcttatctagccactttgcatatctatcagagtacaaggcatcgtgagattttgtttttgtgtgtatgtatgagcgtgtttgagatagagagagagagagagggaggtagagattgccttttaaactcctgcttttctgttccataaacccgtactgtccgaaccaaacttatcacctcttgagcaacctgatttagtttaatgtgaaaactgagatgaaaactttgccttatgaaatgctaccttcatccaaaaatataagggatttttcccatgggacagaggaagtagcttattgtaaagagtacaaacttacattgttggcacttgcagtgaactcctgtgcaaatttggctgctcttttctgatacctattaatcacagtatcataatgatttctctcgcatggatcacaggtgttaagcaacaaaataaaaacgtggtggtgcttccttgaactttcactactcaggtaatgtaatatgaaagacagctaacacagaaaagggagagacaatatacaaggtaaataagagtaggtttttaccgtccatgaactagcataatggtcgacaatgtcgcacaaatcaacatagtgcacattccaagtggccaagataagactagcagataaattagtgcgcctacaccctgaaataaagtgacaaaatggtacgtgagtttttgaagctactggttacattttcatacaagactactaaacaaccttttcacctgaagcaaattgcgtgagataagattaagatcattgccaatgactcgtgacacttgctggcagtcagaaccaagcctacttgtcaaatcaccaacagtttcttcatcaaaaaaagcaatgtcctagcataatttaaaatacagttaaaagcttcatacttgggtcaaccaaagtaaaacaacagaaaactttatgtacattaatgaaatttctttcagcagtaatattttttattccttttgttttacctgagaaagaatagaatcaaacagcatttctctcattcgtttgacctacggaaaattttcagatgatgaaggttagagactggtcaaacaaaggggcaatcgtgaggaataaacttggaaagttacattaagaaatctaacatggttttaccaatatcatgtttgcaacaccaaaacagcagcttcgcacaccactgcaaaattggataccagctagtaagcaaccacaattgatttttcacaaaaaaaaaaaaaaacatgcagaagacaaacaattttggtttcaatgcagattacggagtatcttgctaaatgcctatagtgcatttgacaggacactggtaaatgtagaaatttgtatttatgctaccctatagtgccatgagctaccaaatcgattcatcagcataatagaagattttcaatattcagacccattgaagctcaaagcatttccattcctgccctagatttggactaccaacacattatatgatattacattgtcaaccacaccatccatggaagtgatcttatggacctaaacgtctaacgaccttttcagttttcaccacaacaacaatgtgatcaggtacagttgtattgtggacagaaatacagaatgcatgcttgaaaatgcaggattaccaacttctttggtttttccgatgaatgcagcatcacctacttgttggcttctctaatgatcgcgttcacgacttaagcacagttttaacaaagcaaagaagcaataactgacctaaacactccggaaatcaaacacagaacaaccagaagcttagcgttccggtagaacacagcccctccgttctgcgccgagaagatggacgctgcgaggagatggggtatcgcgatctccgcgagctgcaaccacaaccacacgtcaccgcgttttagacccatcaacgagaactctgcagcagcagaggtcaaacccagaaatcgccattaccgcagcgccgacgagggacgcgaatccgacgaagacaacccatcggtcggaggcgacgagcgcccacatccgcctgagcgcggaggcggccgtggcgccgctggcctcggcgcggccgcccccggcctcctcgccgtcctcgaggcgccaccagcttcccccgggcagcacgttccgcagccgctcgatgaactccccggcgagggcgcgccgctgggccagcccgccgaactctcccccgatcgccgccgcggcgcggatcctcgtcggcctcgcccgccccggggccctcctcgtggccgacgccgaccgcagaagcagcgacggcgccctgggccccaccgacgccacgcccaccgacagcgccgccgagccggtggccgcggtgaggagcagcgccgccggagtcggcattctccactctcgtcaaaccccctctatccctcccctccacccccaccgcccgattcagattccgattccgcgttcgccggtgagagagtccgccgcctcggcgagcaccggcgaggtttaaataggcgtaggccgctgcgtcctcgccggagttggttgctctgccgtgcgcggcaccggcgccgtaacgtctctaccttctccggctaaattgtattttttccgcggcttttttaatcctttttctcttccacttttcgcgtgtgcttcttttttttttctttttcctaacgtgttttttttttgcgattttttctacgagaagaaatggatggaatgaggcgatgtggtgtggtggtggtattttgggggatttaaaacaattttctggaggagaataatcgtcgttggattttaggattggacacggagaaggattgaaagaacggcttcgtgcgtggtcgtggcattggaacatgaggtcggtgacacactgacacgggatgttagagaacaggtggtggtgccgtggtggtaggccctatatagactccatcgtttgtcatggagttgaggtagtgtttgtaaagtgctcccggttttaagctttaaagtagtgctactgttgttgtaaaaggtcaactaaccacttataaacgttgcagtatgggttagtataaaatattatctcgatcacaaaatatgaaaatataaccacatttaaatagattggatctatcgtactatgaatctagataggggatttgtatgattcacccgttcaaaggttgctatattttgaacgaacgaagaagtaatttaacatagagcatgatgatatatgtcacaccacaaacatttcagttcaaattttatcttcacgaggaaaaacaagttctaaagaaaagctggaattgaatgagcatgggggcatggtacgatgcatgggattcgatcttcgtcaagagcattttcttacaacatattccattcgtttcaatttgatcgtcacccataatagccctactcctattgatcagccaatatataagcgtggaactcgagcatagtggttgaggttagctgttgtaagctacgagattagaggtagcttgtattgtgttatctctgtttcttattggtggttccccactcttctcttgggccttgtatttctacactcaggtgccatcttatccaagtagaagtgtagaactaggatgcaaggatggatacgatccgagtggtcttggtcgggtcaaagtacgattgtattttttttctttatcggggactcctttattttctactacggactctaatataacatacttgtttccgtatatataggacttggaacatggtgctcccaccgaggtatgtacacgtatgtagaatatcctatatttaagaacagtaaaaaatattatgttgacgggtgatacccgtagaccggatataaagggtattggggtacgttggtacaaggatctacgtagtacgacatcaagcaaacaaaagacaagaattatactggttcaagagacaagaattatccagttgatgtgggattatatggtagaaaacacaggttacaaagagaacaagggaacttgtcggatccggcgagattgtagtcgagttgattcaactagctctcggtgacttggctcctcgtaagctccggcttcgtaggctgtggagattgtgttggctctgagattcaatgcctaaaccctccccggggggccccttttatatcgcagatctggaggtctccacatagaactcggagatatcagaccctatacgatacgccaacgacccagttctgcctaagtaggattcttcccatctgtagattccgtaaaaggtttccttagaatatacaggaaatatctgcatgcgcgtgggtatgccatatcgatatgtaacgtatatcgaagggtaaagggtatgcctaacccgtaaccttgacagtagcccccgacttctgcttaaaatgaactcgtgcaaccatttgcgacttcgggtgtcgagactattgtcattcccggtgcgaggaccgcggagatagaccgtagtcgagcacgccatttgaagcccaacggtcacgagcgaattttaaactgaagtccaaaaaactgccgcgcgtaacgggaccagaaatttccggcgggcatctctctctgttccctggaattcgcaccgtcggtagtgcgcctatttaaaggaattttgggaatccattttgaagtccgccaaatctgttaaacacacaccacctgcaagcactctttgccttctccgccgccgcaagaaaccctagttcatcaacctaggctcgttttccggcgaccttcgatcagcaacggacctcggcaaatcggcttccaccagtgcaacgttgaagaaactccaggaggatggcgctcttcctggccgtggaaccatggagagtgaagcaggaggtactaatcctcagcccatcttgggtcgcatggttgcgatcgaagattatgttctctgcggttttctccctcctccttccgaatttcttctcctggttttgaatttctatggtctttctcttctccatttgaaccccaattccatcgccttccttagcatctttgtgcatctttgcgaggcgtacatcggggtagagcctttccttgatctttttcgcttttactacgaactgcgttggatggaatccaacagggtatctggttgcgtcgggttccgacttcgggatggcctgaagtcgcgttacattcccttccagtgcccttcttctcgcagcaagtggaggaataggtggttttatcttgagatcaaggactcgaaccctgtcttcgtggttcccggagatcaaccggacaagattccgtcttggaccgccaagccccccttgaccccctctcttcagtcgtttattgacatcatcgacgatctccgagtacgggggtttttcgggatatgaagtcgttgcagacttcgttggtaggtggatccagccgcttcaggctcgggcccatccagcttataactattccgggccaaaggacgtgacccgagtttctcctcggggtatctttctcgcattcatcttgacatacttgtgttcgcattcctcttgacttatcgtaggatggttctcgattaacaggtctgagcggcgaaaccgtggagcgtcgcgtcggccaagtgatgatcagcgacccgaccacggcgagtgacatccctgtgcccctttgtgaaaagggggcagcagaacgtgatgaagccatcaacgtaagtatattcgatgaatatcccgcattctcctttcgaaatcactttatgacttgattgagcgtaggcccttcctttgactgatatcatcggaccgctcacggaccatcaggtggcgtcatctctgaaagtgaaggtcgtcaaggaggtatctgatgctgccaccactagcggtggcaatgttccaacaaagccgaggaaattctcgtctgtaagcggacaatgtcgcaaggtgtcgaccccctcggtaatttattttgttgttaaatcatgcagcaagaaggatttttccttactttgcgttgattgtattccaggcctcagatgcgtctcccccacctccacgacgacaacgcattgtgacgatcggcgagaagtaagtagatgaattcttgaatccccgcgcttcttatttgattgttgtctgactcgtggtcgtcctgtagggaggcgcgggcaaaggctgcgcaagccaagtccggaggagcttccagtgcgtcgcccgtcgtggcctcgacggatgtcgtgcccgcagccgggagccgggaggcgacgcctagtggccccgtcagcgaccccgcggcaggtcgtgatctaccagttgcagtcctcacctgggaggagctccaagtcgagatggggcgcctcctcgaagccggtgctcgcagcatcggccgcgaaattgcggaggcgaggtcggaagcggcgacggtgaacgtgcgtgctgacagactggtgcgcgagttggctgaagcccgtgaagacctcacgaagatgagggagttggcggctggcaacgagcgacaacggaaggggcttgaggaccgaatgtcggaactcgggaacaacctatctgagatctggggctcgttgagggtcacctacaccggccttcaccagctcgctggggaatgcggcgtcacgtccacgatcccggcgaatcccgatgagttttcgctgacctcctctctcgcggaactggcgacggcaatgggggaaatcccctccaagcatgcggccaggattgcggaggagacgtcaaacggaatctacaccggggcgtgtcatgtcctcgcgtgtgtaaggctgtcgcgtcctgaactcgatctgcgcgagatcttggaccagggggcggccagcgacacgcgtaaggaggtgatggaagaagtcggtgatctgggggagtctgttctccccctttttgaagagtaggacttcttgtatttcctagataatgtgtaaaactcgaactctgaccgcctttgtgagtgcgattactatcccggcttactttggtatgctgacctcgggaacttttgtcctcttgtagagatattgatgacgaggatgtccagcagcgcgggcagcccgagtcactggcagtaattccggtactcgagtttgaaccacacgtctcgcctgaccatgtggatcaaccccttgatatagagggaaggatggcgacgacttcctcaggttagtagtcccttcaccccttaatgcccatctgactaggtcagccatgttcccgaaagagatgtacagctcgacttagtgattatcacgtttagcagatctcgagggtgcccttgctagccaagatcgtcgtatccaatactggaagcgaagtttgaagtggcggagctcgagagaaccatgctggccgtgaagaaagagcaggctgtggaaacgctccgaggccgtgaggtatggtttaactcgtacttgaagagttgctgcacatccatggccagagtatgcagggagcttcgagtagtccgcggagatcccgatgagtcggcggccaggtacatctcgtggcttaatggggcctgtgcccaactcgatggaatcggtaagcgtatcgacgaggccttgaagcaggagtgtcgtcgatcgagccgatatgccggggggcatgtgttggcttgcctacgagatcatcgcccgcacctggacctcgaacatcttcgtgagggttttgctcgttctcggagggctccggcggagatagaccatctggcaaggtcaatgtcgttctcccatcttagcgacgaatctgcttagtgctgccatgcatccggttagcttttgtacctccttgagtcttgtaggcgacttcatgttctcgattgccttgatcttctcggggtttgcttctatccctctgccagagacaaggaatctgagcagcttgcccgacggtactccgaacatgcacttctcaggattgagcatgaggcgatatcgtcggaggttgtcgaacgtttcccgcatatcgtcaatcaatgagttgcctgtcttggttttgacaacgatgtcgtcgacgtaagcctcgacattgttgccaagctggttgctaagtgcgccctggaccgtgcgctggaaagtattcccagctgttatcagtccgaacggcatcttaacatagcaaaataccccaaatggcgtgatgaatgctgtcttctcttcgtcctcttttgccatgctgatttggtggtagccagagtaagcgtcgatgaagctcaataactcgcaaccggctgttgaatccaccagttggtctattcgaggaagtggaaagtgatccttggggcacgccttgttgaggtcggtgaagtcgacactcattctccattttccgttggccttccgcaccatgactggattggctagccactctggatgaagtacttctctgatgaagccagctttgagaagtttgtcgagctcttctcgtatggcttgttttcggtctggtgcaaatctccgcagtctttgctttactggcttggcatcgggtcgcaccatgagtttgggctcaatcacctccctggggacccccggcatgtcggacggccgccaagcgaacacgtcggcattgtcgcggaggaaggtgatgagtgcgagttcctatttctcgtttagtgtcgccctgatcttgacggtcttatcggggttggcactggagagtggaacaatcttgatggcgccgtctggtttcggcgtcttgtttgtcttggtcactttcttgggtggctcagtcgtggcgggtggactgggcgtttgctcgaccatgtcgaggctccgcttgtcacattgcaccgccagctttgcgttcccctgaatagtgattgttcccttcggtcccggcatcttaagcacttgatatgcataatgagatgcggccatgaacttcgcaagtgtagttctcccgatgatggtgttgtaagctgtatcgaattcagcaacatcaaaggtgatctgttctgtttggaagttgttggcttggccgaaagtcacgggcaacgtaatcttgcccaaaggtctggacgatgattggggagtaattccatggaagggttgatcagttggtgtcaactcgttttgtggaattcccatcgcgtccaaagtgctggcgaaaagaagattgattgagctgccaccgtcaatgagaactcgcgctaccttgatgttccgaatagtaggttcgaccacgatcggatatcgtcctgggataacggcggtcttggggtggtcttcttccgagaactctatcttctgctcagaccacttcatcttgggtgtagccccctgtcatgtcgaacagacttcatgttccactttcttgtattctcgcttggaggagtacgttgtggaaccgctgaagatgtgtgagacgtggaggtcggagtctggatacgctaagtccggttcgtgaggagccgtctcttcgttcgtctcgacaacgcgtactcgcttgcctttttcaaatgccatgtgcttctcgagcgactttttgaaaacaaggcaatcttccagagaatgtctgtccgtcttgtgtatggggcaccatgatttcgttgtgtcactgctttgtgggtctgggcgtttgggagggttcgcgtattctgctgcgaggacttccgcttgagctttccttttcccgtttttgcgatttttcttcttgcttgactcagatgtgtccatggctggtttcttctctcccccggtcttcggcctatcgttcttgcgtcttagcgcatcatcagcgtgggcgcatcgctcaacgatctcgaataatctccgagtggttgtgatgcgtcttgtcgccaactcctgggtagtgtagcgatctctgacaccggatttgaaggcgcgaattacagaagcatcgatgatttcaggaattgtgtttctgcactcgttgaaacatcgaacgtattccctcaatgattcactctagttctgtgtcaacgcgtgtaggtcgtcttcgatcgcgtggcgcttgtatgttccttggaaattggcgatgaattgttgccacaggtctgcccacgaagagattgagtagggaggaagatgcatcagccatgaacgtgcagaacccttcaacatggtcggtaaatagtttgctaacgcgttgtcgtctgcttcggcagcatagagtactgtggagtagacttgaagaaactcctctgggtcggtgctcccatcatacttttctattgctccgggtcagaatctctcaggccatcggacatcacgtaaggaacgaccgaaagccctacacccagcgttgggggcggtgggttgccggcggtcgtgtgtccttcgtggatgtctgtctgacgatgaggaggaggcggatgatgacgatgacgatgggtcgcttggttccggtgtacgattacgaggatgacggcctggatctcgacaatcctgtcgtcgtcttccgctgttgtctcggcgccgatctccatcgtcgtcgtcgatacggcggcgaccatgaccagtattgtctggcacccgtcgttcgcgatcgttgtgatcgtggtggttgtcgtggtcccggtcctcgtttgagcgatttcctcgatttccgttatcatggcgccgtgaagagacatgacgccgagagcgattcacgttgtctcgtgtgcgtcgtgcttcccggcggccgttgatttgatctcgaagatcgccagtgccgcgaggtggaggggtagcttgttgaggtgattccctccgttccggatcttcaccattggcctctccagttggtggctgctcctggtgtgctgcggtagcggcttcttcaaacgcgttgctgaggttagtcaccgattctcgtagacgttctgtccaacgctcgaggtcaacgttcagaacgggatcgtaaggagtttccctcagtatcgcttgaacggccctgatgtgctgggctggagtagtcgattgattccccgcttctgtgttggcgtgcgctgacgtgccaacgtcatcgatagccaatacctcccgcggcgcgctcgttgtcgatgacccatagtcctcaaggagatgtaagaccgatggttcgtgaggatcgatatcgattaccccaacgaatcaatctgaagttggagtcgctccttgttccttgccgttatccctgatggggatatatgacttaggagactgagctttcatggcgccgagaaagactttgcagctcgagaggacatgattctttgtcttgtgaataggacaatagacatcccgagttggagaagtacgctgaattccacgttctttgcaggcgcgaatttcagcacggacgttgaggaaaacccagcaatcttgcagggtgtgtttcttggttttgtggataggacaccaagaccttgtggcttcgtaagtcatctttgtcggctcgtggttcatgtcggaaggacaaggtttggccgtatcagaatccttcttgagcttggatgtcatcgatattccgttctccgtctcgacgggaggatttttcgacatggaatcgccttggttcgtagccactgcgttctcgtctccggtcattggaggaccggttgagatcggtgtcgtggtgtaaaccgggaagacgatttcgccgacttgagtccataccagcattgttgaagcagggagtacttggctgaggctggtgctgacgttgttgtcgacgaagctggatgacatagtagtagaaccttgagtaccaaggacccctacctggcgctccactgtcgacgggtgatacccgtagaccggatataaagggtattggggtacgttggtacaaggatctacgtagtacgacatcaagcaaacaaaagacaagaattatactggttcaagagacaagaattatccagttgatgtgggattatatggtagaaaacacaggttacaaagagaacaagggaacttgtcggatccggcgagattgtagtcgagttgattcgactagctctcggtgacttggctcctcataagctccggcttcgtaggctgtggaggtggtgttggctctgagattcgatgcctaaaccctcccggggggggcccttttatatcgcagatctggaggtctccacatagaactcggagatatcagacccagttctgcccgagtaggattcttcccatctgtagattccgtgaaaggttttcttagaatatacaggaaatatccgaatgcgcgtgggtatgccatatcgatatgtaacgtatatcgaagggtaaagggtatgcctaacccgtaaccctgacatattatttaaaagatattttacatgtatgatttacaaagtggatcatatataatagacttactaccgtaaacgtgtggatagccaaatgggtcgcccgactcggcccgagcacaaccaggccgaggctgagttcagtcaagtcggcacgacctgacctacacaccaggacgggccatgcccgtccaagtgttgcaccaacagcccatgaacgactagaaggcacgaaagcccaccatgctcctccttggaaaaagtctattttgtctccctgatctctttgggccaactctcatatggctcaaaataagtatattttgaatccctcatctctttgagccgtgtcgagccagcccatcgcgccgaggcagaggcccaagcacgacccaaaggtctggtcgggccaacaagggcctgactgcttgggccaggcccaaacccatgccattggccgagccgtcgggcctagggcgttttggtcaactatacttctttccacccgatgtactttgattttttttatttttaatatatttttgaaaataaactatttgaaaacttattttcagctctgaacctttttagcttgccattttaactgacatggtaggacaacgttttggcactttcaacagtggcgtatggtaatggcagtgaagggagaaaataaatcgcggatggcaatggccaaaagatttatttttaaaagtaagattttcatagggtttgttttaaaatttttagttaataatggttagaaaaaagatcgagctacttagccaagcctcataaattctgctctgttttctccctttagtgaatatactagtagcagctagcagagctcctgtttgtcttatgaaaaagaaaaaagaacagagaaacatccgcaaatgtaacatggcaagtttcggtgtgaaacgagttcaataggttaataaaaggaccaattggataaatttgacataagaacggttatggtcgtatactaaaccaagtgctagcccgttaattaatttggtcaaacgcatgcgtgtaagtactatgggaagatgctctctcaaaaaaaaagtacaacgagaagataagtttggtgataagccagctcaatgcatgcatacgaactttgatgccgaaaaaaaccttatcaaattgtcaaaattttggtatagtgactggcaggatttcttatatagtcacttttttgacaactttaccaaaatttgataaggttgaaaatggcatcaaagttaacaggcccgaaaattcccattagtggctctttactgaaccagtgtttttctaatgttgacttcttttcctcgactcaaaacgataacttcctcatttcttattactacatattctcgaactgctaaaatatacatcttatataaaaatcgttgtacataaaattttttaataaataaataaataatatttctaatatataatatttaatatgtaaacaatcatgcgctaatgatatgttccgtttgggagccacaaatagctctagccaaactacattcgaattaggactaacaaactttatatagcgaggttcacataggtcgactcaatctgtacgaatacaaacaggagctcatgcattcctacagaagagtgtcctagtctcttctctgatctctcttgtacatctgatcctctacatttttttaaaaaaaaaaagcagtgtaacttccggctcgaaaggagctccctagccgttgttgccgctgccttcccaaacatcttctccgccgatgccgctaatgttgttgtcaagctacggtggcggtggcggtggctctctctctctctctctctctctctctctctctctctctctctgccgcccaacaacatcacgaagcagataaggtcaaaactcggccatcaaaatacaaattggattggactacgttggcttcgctgccatgtccaacattacttgtcatggttgcctaaagccctcatcactaggtgtgatgcaaaattgattcaatctggtcgtgcttgccatggccgttggaggatggttgttggctttgtttaaaactgagcatttgatgcttccttcctccatgtttcaaatagaaagtgtttcttccattcacctgatagaggcaaataaaggaggccaaagctccatcctgatggctacactttgatactatttggtctttgtcgttggtgaccatatgaggatgcatgctactcaggtggtgtcgtggcaacctccattttgatcgggaagattggtcagcgattgttgaaatcggtttagaagatccatctttgattttttttatggtagcagttaatttcttgtccatggtgcactcgctttaactagaaggtggtacagagtgcaagcaacaatgactccagggtgaaaaccttgagatgtaatctaaattcagcagtgtcagctcttgtttgtcatctcatcgttgaaggtgtcgtttgaagtgttggataaaaatccagccctatttttggatgacaatgtggtagacaggggccaagtcgttctcgaaggtgcttggatccgagtaggtgcataataccgaggtttgttttcgttacggaattgctaaaaaatcgtgcgatagtttttttcaaagaaatttgtcaacgcgctttaactagaaggtggtacagagtgcaagcaacaatgactccagggtgaaaaccttgagatgtgatctaaattcagcaatgtcagctcttgtttgtcatctcattgttgaaggtgtcgtttgaagtgttggataaaaatccagccctaaatcgatcccgccaccttcatttcactcaggtgtctcatttaccaccaagctagcattgtttttgtgttccaaacccagttacgtacaacttccagggtgtagttacaatgtaattgcttcgcaaaaaaaaaagttacaatgtaactggggtgtagctagacatttttttgccttaaaatctgttgacagcgctataggtagacccttggtaatgtgtgttgagttgctccaagataatatatgtctgtcttcgccttccccccccccccccccccccattcccattacccaaaaaaagttgtatctcctagcttctcaccaactaaaatgcagatatcataatttgaatatggtagatggagttatattttcacgactttatcatcgcaccagtgatgttttccccttccgattgtccactcgatgcatatgccatgataagatccgctttccactttttctctgggggatgaataaaccttccatatatgtcccaatgtaaggtatagctatagctagaaaccatgcgcacgaacgaaattaagaaacgaacgcacaagaggacagggcaccaatagtacgtaccacaccactaccaatcattacaaaaacatatcataatgtaggaaaagctacaaaatatatacactaattaatagcatctataatgttgtccctgtagatatctgcattatgttcgcgcaacagcgcaccacgggatccagaaagaaattcgccgaaacaggcacatcattgccttatccttcacgaacacaacacacacctaagcctctagatagctatatccgtctatcgctctacctatcctgtccccttctttccttcctcccataaaaaaacaaggaaacaaacaaaaaaccaaaagggaaaaaagtggaaaaaagagaaaggcagaaggtccatcaacatctggtcgctcgatggggtgatcgatcaagcgcacacagttccaatcatgcatgtgactaatgtctacgcgacgaggctctgcagtgcgcgcgggcagaagctaaggttaaaccctgtttggtagagctacaactcctaaattttgcttcaggagttgagtctggagtgaagttatagagctatctaaacccaactccacatctctaatttattttgtgagagaactccacccagctccgatcacattttaagtggagcttaaactgtttggctgagctctaactccaggagagatggagctagagctgtgccaaacaaacccttaatattatgagaagttagtatagttaagaatttggagaagctgacaaaccaagcttccagtttttgtgtcaatttctagattctactgctgtagttttttagaatccggataaaaatttaaaatctgaactgtttaaaaaaaatttcagtagctagagattctacgagaaattacggctgacagaagctcccaatcaaacccgagataagatgagaagatgcggggttacgtggcgttgtgagagagagagagagcctcgaagcggggccaactagtttatcataaaaccgagcgtgccatatcgccttgtttccacaagcccttagcacatggcgcgctctcgtcgctccagcctggcagagtgaggcgaagacaagagatcagaattcagaagcagctagctctccaccaaacaggctactcttttactttagcttggttaatttcgtccagatcaagaatcttgctaggtggagagatgcaccaccaggaatcaattaacctgtgcaaggggttagtcaaactcaaacagcttgggcgggtcatgatgagatcatgcatccttggtccatggaaatttggccatgcatgcatgtgcaggcttgtaatattctagacacatgcatgcagggatggtcaatgtttttgatagcatatgcagccgaaatgccgaaattaatactatatactctagctagccgagatgggtttttttatgtgctagtattagtagatccacacaaaatatgcatgtaaatcctaaccagatgctcggctaaccacgcagaaagaaaaaaaaaaaaggtagtaactatattaaaaacatgatcctatgtctgcttgttagccgcaatggacacgacgattaaggtaattaattaattccataattcgatgcatgtacaggacgacgacacactacaggggttcaacgatgaacaaccaaaccatgcgtacttaagcgtcactggtacggggactacgggttactgatcaaatatcatccctagctagcgctacgattcacatgcacaacttaattaatttttttaggaggttttaccatcggttataatacggagctagctagctaataattaaccttcaaatggactgaagcttgctgctgctgctgtcatctgtttcttcagatgctaaccgccatctggctcatggaggcggcggcggcggcctcctggcgagaacgccgcacgccgtgcggggacttgcccttgcagccgccgccgtcagccttgcctgccgccgccgccgctgcggcttcggcactgtcatcgccgccggtgccgtcctcggcgccggcggcctttgtattggacgagacgccgggtttctccggcgagccatgcttatgcttacctaccgcccccgacgagttgccttgctcctgcgccgcgcgcctcaccttcacaccacgtatcagctgctaataattaagagataaattaagattacggttaataattaattagctgctgcttgcagaaattaacagaagtactccataaacaaagatactgccaaactggtcatccgaattaaagacaaacagtggcatgcagcaactatatatagcttattggcactcaaaatcacatccaactgagttgagttaaagagtactcgaaagaagtgggaagggcaatgatggatgaacattacatatttgcctgacttgatatcggagtagatcacaatgaaatcaccctcctgcagctcgtttgaacgaacaaaatcacctgaaaaaacatatgacaacgattaatcaacaatacttgagagccacaaattaaggatggaagttattggcatggcttgtgactgtaaaatttgaataattcaaaagtttgctattcacctgtgttttcgagaagatacatcctgcttttgttgttgggccaaaacctgtgttcatgaaaatcaatatccattaatgtcagtgaatcaaaatctaagccatcatgtattcgaataacttgtgcatatataatattgccaatggaaataattaaattaattaatcaaaaacatgagctcagcagaaccagcaaaaatcatatgcataatgttagtactgaaaacagcaggaaaagatcacttttatttttttgttgtatgcacttgagcatcaacatagaacacgatgaatgcatgctcctatttgactcccagattccaatgatatgttcgtatgacccacttgcccaattgggaaagggaccatcccatagtcatttactatttctggttcagaggtttctatcccctcccaattaacaaagaagcaagtggacttaaacaagcttaataagcaatcccaaatcatgcttgatgcttcgatcgaatgttgattactcaccggtaccgcatgttccacacctgagacgtcccgatgtcttccatggggatggagacaccatccctcgtcttcagctccggcaggtgaacctctgcttccttctgaaaccatccacagatcaagaaaggggagactttttagttctaccatgatcggaaatgtgaagagaaggttcaggcaaattccgtctttgattaggggagaaacatcaagtatgtgagtgtgtgcaagtgggatccttccatggaatggatttgtgccaagtggggtagtggatttggaaggagaaggtgttcgagatggtggtgactgtctcactttggggagcacgatgcggccgaggctcccgacgtcgctctgcttcagcaccttctgcagcaggaaccgcaggttcttgtccgtcttcgcctgcagcaatccaatcgatgccgtttaattagctaggttgataaatattggagattctatccctggacagcgatgtgagtgagtgagttttgagtgtgtggagtgtgtgtgaggaggagaatcgagttctcactcgcgtgagatcctagctatggtggatagcgattgatgtcaatcgtctgcatgcatgcacacctgccgcttctctgaagccgtcgagcgctgaaggctctccgctccggccgtcgccgccgcctgcggcttcggcttcggtttctccggcgagggtttcggctgcttcgacgtggcgggaggaggattgggcttgtttgataggggattctggatgatctgggccgccggcggccagatgccccagctccggcagccggccgacgacggggtgaccggcgccgagtgcgcggcgcgaggggagggctcctgtggatggccggagatgtggatctggctcaggttgagctgctggctacgttgctgctgcaggcaggagaggcggcgctgcctcgccatccgcttcttccgggcctcctttgtcgaggacggctcgactccggcgaggcgtggagagcacatggcgtggccgccggagtactgcccggggaatccggcggtgaacggcggtggcacgaccgacggcatggtgtaggagctcgtggaggagacggggaacggcgcgaattgctgcggccaggccatgttccctccgcccgacgcatgcatgtcgcccgccgccgccgcggtcggcggggagaacggctggctgctcacgaccacgctgctcttgctgcagctctgctggaaagggaacgggccggcggcgcctgggtacatggcgtcgccgccgtacgcggctggcggcgtgaaggcctggtagggcatccaggatgtggcggcggcggagcccatctcctggccaccggaggggaactcgtagccggggtttgcgccggggctggggagctgagggtccgacgacgcggcgccgtcgtcaatcgccgtgcgggggcgcttcttctggaggtggtggttctgcacccaggtgaggatgagcttgagcagctgcatggtgccctggcgcccgccgccgagccgcgcggccgccgcctcgatggtggatcggcggaggcggatgctgcggaggtcgtcggcggagatgtactcacggttgctcgtgagccactccatgaagaacgccggcagatcgtcgggcgcatcactcccctccatgcatgcgtcgccggcgtcgtctcctcccccggccgcctccatcaccgccttcgtatcgccgtcgccggtacagtcgtccgcctgatgcggttgcccggacatggcgtcctctatcatcatgccaacgtcgtccgggaacagcggctgctcggcctcccacgggacggacagcgacgcgaggtcgaggagctggtctatgtcggcgagctcaccaaacccgtccgccgccgaggccggctcggacggctcaccgccgcaaccccctcccgccgcggtggtgaaagcgctggacgagttcgacgacgacgacgacgagaaggttgagcttgacggggaagaaaggcacgggaagtccgggagcaacgggaaggtatcgtcagcgaaaaagacgtcatccctcgccgcctcacccctgatctccgccgccggggccttcccccgtccgccgccgccgccgccgccgccaccctgcttccccgggttcccgtgcgagtgcggcgccgacgagccggcggaggcgtccatgcagagtggaggcgggcggggggcggagagcgcgagatgtaggcgaggcggggggtttggctttgtttgtctgtgtgcgtgtaggtgtggaggtgggtgcagttactgagaaaggagacgaacaggagaagcagcgggaggtggagggtgggagagtagagagagaagagatgcggctgcggcccacacgtggcggccgccgagggctgtgggaagcgctccaccgcccacgccagcctctcctcagcgaccgtacctttcgccccccgcacggcacggccacgtcccactgacccgtgggccccacatttcctctgggcccacttatcattgctgggggctgcgtttctggtgggtggggttccccttttttttcctgagttgtaacggtcaatgacagtggggcctacgtgtcagtgggaagtacgggatttcggcgcgtgctggttttgaccgccgcggcagagggggagggagaggagcgttcttgcctgtggtccaatgacatgtgggacccaaaaggaaaaccatagagtggtagggtcgtgtgcgcgtagcgatttatgcgcgccgtaggatgtccgtgtcgcgtccgcgccgactaaggggctacgcgtccggtgtttccgagccgtccgatccgaaccaccgcgtgatcgaacggacgccatcttcgggaggagacctgtgtgctgtctggattaggaatatggggtgcgttttttctacgcgcacgtacgaaacctacacgagctggagatgatgacgtggaggtgtgggtcgcaccttggttacgatgacgtgggattttaccattggttgcagtggaggtggcccgtgtgaacacatgcagcgaacggcccagctcgatcgatcaccagcagccgggaagcgtaagcgctaagcagaggcatggcaatgccatggcatacgtgatcttgttctggccgttgcgtgtggaactgtgggtggagcatttgctttgtcttgttcgatcggaggatgcggctaggtaggatacatgttttgcaggggtaagagcaaatttccactttctctttgcttgtttgcttcgcaacaaatgcatttgaaaatgacagacaggcccccaaaatcagattaaaaaatatgttttctttggtgtccttagtgatgaggagcacccaaataacccatgcgacatcatccaaggattttattttttttttgcaagtttgtactttaaaatgagccaataaatctataatacacatttacgactacgtgtccttttcaatatccgtggaatcaattgatatattgattcatggatgcaaacaaaaacaattgtaaattttgggtcattgaacgatatatatctctctaaaatattatttatatcaagatgacgatatgcatgtatctttcattattaattgttcgctcaagcatatcgtatcctttcgagggaatgaagcatcgaagctcttgactcacatccaatacattgtctaattcaataattggatttgaacatcaaatatattccatgcgttgtgcaatttacaaatcatttttaattagtattttactattctcaatctatattatcgataatatgtattttactattcgatagcaactgtaaataaaggtcgttgggtgttacaggtcaacaatcatttgagcgatatggtaggttgagtgtttcccctatgttgttttggcataactttcatattactatgacaacaaggttattttgaagagttaataccgccacgtccattgtgcatatttataaaaagtaactatcaaaacacaactaaacccgtagcaaaccacatgcatatatattgaataagtgattttgtaaaaaaatatttatagattttgatatatgagggatacttgtaaacttatgtatataactcagccatgtcatcatctcaaataattttagacaatcggattaatatatatcacatcatttatacactgaccattcgattggaaaataccggtttgcaacattggaatactactatactttagtcatgattgatacaaatttcgatttaaaagtgtagttgcatgaattttgattcatgataatctatactgcaattatcatttgcattgtgatatattcatgattgatgacttcgatgctcggccacagggtttgtagcgcgcaatctatttgagcgtagccatgtagcattgtaccatgaacatatcaatatgtggtgacttcatgcattaaaagaagatggacacgttgtaaccacaatacaactttcttatctcccaacaacttatattacgtgcggacgtatataaatacaagaggctgcaacaacattttggctctttgtgattcattgatccgaggtaaggtcataaccttacaatggttcaccaccatgtatttttcgaagtacacccatgactacatctatacacgtacgcacggtgtttcgataaaacaattttgctatgagtatataggcttatggttcactgaaagacacacactaataaaaagacacaagatttggctcgtgttttggattcacgaataaatctggaaaatattttcaatgacatataaaattttctactatccccataaaaaaatgtactaactttctttgatcatggaaattaaaccctacaacaagattaacgcatatactccatctatctcgatatatatatatatacatatatatacatatatatatatatgcgatgttgttaaatcttagatatatatttgattttattatgtatataacaaattaaagttattcataatatatcgtaataaaagtttgtaataaaataaaataataattatataattttagtaagataattgaaaatagcgtaactgtatcattcgtgttagaataaacagaggaggtactcctaattcctttcactggagaccaaactacatcatcgactcatggcgtcgtaccacagaagcactagctgctggcaaagccgtagatcagtgggacgtggcggaagccaagccgtcggatcatcccagcgaggaaaccacccgcgaccgcgacgacgcaacagcaggaaaacccaaaaccggtcggactccacagcgacccctccgccacgaagcagcacgcaccaaaaaaagaagaagaagcgaagcgggggcgaattgaggcccaaatacttgggtggggtggagggccgagcgcgagagatttcggagagcagcgcgaatcccccaaaaatccacccccaaatcccaattccaaatccgacctccctcctcggccagatctcgccccctctccccggggggcctccgatcgaatcggcggctgcaccgcggccggcgattcccgggaggaggaggaggaggaggagtaggaggaggggatctcgccgagatttggattgggtttggtggttgggtgggagggagggagctggggggtgtggccagccatggcgtcggcgcaggtgtcgtcgtcctccgccgccgccggtgcggcgtcgtcgtcgtcctcgcggaagaaggatctccacgcggggaagaagctggtatgtctgttgcttgcgatagacgtagtcgttggttacccgatgttggtagtttaaccttctggaaatgctggatctttttgtccagacacgtttgattgaatagggagcattgaccgctttgcgttagagatgtagttccatcgatcgttttgcttatggtagagaagtcaaatgcgcgcaaattacccccgtcatcagcacgctcagtttgaaatgttgaattttcgttacctagatcttgctatttcatcaactgatcctgagtgatgatttgatgcgaaattaagttcaagttggttgtagaataatgatgtcgtgttttctgatatatccagctggcggagtaccgtaagaagaagaacaaggcggcgaagaaggctgctgaaactgcagaccaggcaacggcgcctgttcctgatacactagagaaccctcctccaaatgccaccagtactaactcgggagacaagttggtatcggacgtggatgtgaacacaacaagcacatcatctgtgccaccagtctacgagaatggcccaacgagttattccagaggtgacgagcccttgtcaaatggacctgcccctgtaaatgtgccagtcagtgttagtaatcctgccccatcgcatgatgtcagtagtgttggagggagcaagatttatgggaacttgagcttctctgacttagttaatgggcataatgaggattggagaggcgatgctgctcggaaaagggaggaacatagtcctgacaaggacgtgactttaaaatctaaattgagtgcctttggaaactcagatgaggtctcccattcttcagatgaggtcttgctgagtcagggaagaaatccagtcttgagggaagtaagtgacactgagcagtctagttcatattcatctggcagcctttttggaaagttagaaggcacgcaaagtcagggttactctgcaaacaatgatatctttggtcggttccgaggtatatccaagccctttttcatattaaattatgctatctgatgagtgatgataacttgaatatgtggcacttttaactctttacttttgctgctatgcagccacctctaaagactcttcccaagcagatggcttagcgtatgccagcagccgggagtatggaagtgccttcaataattcttggaatacatcaaattccacacctgtttgttttgataaacaggatccttttatgtcatctggttatccaactacatacaatcgatctcggccatcttttcttgattctattggagtacaaagagctccaacaactgaagtcccatacgtggagcctgcaaaggctagtaaaccatttggcaactcgaattctgagagttcattttttcagccaccaaatcaacaatccgctggaagcaatgatgtggatggttctctaaaatcaggaagacaagaatataacaacgagaagggatcatatggaaattccattcgtactgattcctttccttccaaagatgaacggaatctgcaccatagtactcaaatgttccaaaacttcacaattcctgggaaagatgatgattttgctgcactagagcaggtgatgagtgctcgatctatgttttcattgtctgtgctttcttgaggatatataatattttatatgtatgtcaggaatgacctagtaaaattggacattggacatgatattgagagctgtgcatttattaacaaaatctaaacgcttatttatgtttgtttgaattgatgacgcttacacctgaatgctattgtacacaaaacaaaagtttagctgaagttatgtctgtactagccatatgtccaaaagataattttaaaaagtatatgcttcataatatgtaacaacttgtttgactgcgtgctgcgtatagttactgttctgcgtggtgcagcttctgggtctatattctagacagaacgtccaaatcttgtgatggacgtgccatattctactaaattaacagccttatccttgattatatatttttacttctcctgaattgcatgtactttttgttatttacgagtatccgcatcctactcatgtctgctctggtttggctgttagctcattgaggatttgacaaaagagaagttcgccttacaacgtactcttgagaaatctcaagaattggctcaaactttggccacagacaactcagctttgactgataagttcaaccaacaggtatttccaaatctccattttggtttttggagttggatctagtatcctcacaaacttttgccatttattatgcaagtccacaacagaaaaacactttcttcacaattaataaaccagtttctgctataacgtagtatttcaatgtcaaagtttcattctgcccgtttctctgtctttccttgttgctctgccttattcacggtgaatgatattcaactagcataacatgcttgcaaaagtgtctctagcaactagaaaatgctaaatgagaatggaatagctaagcaatcacccaaaatttaccttacagtcaatacttcttatctgatcagtaaatcatcaattcttttacagcattggtataaggacagaatcaatactgattagtcatatttccagtcacttattgtcttgtgtatcatatttattattttgtttgcaaatgcttaggcacaagttatcagcaacctgacatctgacatggagagattgcagaacgaaattcaagctcaactggttaggcttattccaccttttctagcaatcattaagattctgtaattccatgcttgctatgctgacatgcttttgttctgttggttttttagtagtactatcgctgtgtaatttggaaatataatgtgctagttgcaagacatatgttagcatagaatatgacttatgaaatgtagaatgtctccggatatgaggagctagggaatgagttcataagatcacatggttcactatgtacccagcatgcacaatatgtttagattttggtgtttgactaggcaactggctgaagtatggcgctgaactattgcttgctaaatgcctaattcatatgaaagtatctccactaaatgtttaggttacttagtgtacatttgacttactgatgtttctggtagttagcatcatctgtgcactcagtgctagtatctatcaatatgaaacttatgatttagggccagtttgaatgtgcatattgcctgagcttacttaggggcacgcaacacagaacatgttatcagtgcattattaattaagtattaactattataaacttgaaaaatggattttttgaagaaacttcatatactttttttttttgcataaaacacaccatttagcagttcggaaaatgtgactaacaaaaaacgaggaagttgtagtttggagttgaagttttctcataatttgtatagttttcttaccaactccaatttttcaacagctggcacttgagtctgtcagaacggaatatgctaatgcccagctagaatgcaatgctgcagatgagagggccaaagttcttgcagcagaagtcattctacttgaagataaggtgcttagctatatactcgtctgcttcctctctaatgttgcaaatcaacctaaccttcttagtgggataataatattgacactgtttatagtttttgaatgctcattattttgagcaatgtttttttggagtatgttattatactataccttgagtacattaagccctagaggtgtcacaggctcacagcaacaaatcaaagtataatgacagatatcctatacacctgcaggtaggtaatgcctattatattcaagttttaatgcatcagatgtaaatatataatatcccttgatatgccaaacatgcagctgctgtttttttatctaacacttctctttaaggcactatttatcaaaagcgcatgcagtttgatatatcgctattttttaggctcttagactgaggtcaagtgagttaaagcttgaaaaggaaattgagggtttgagctctgagatttcttcatacaggtgaggttttctgctatgagtgcatggtatgtgttttacaaggtggggagatcaattgataagtgaaatgggcttcaaatataaatgtgaaagaaagtttctggtttttctcacattggcattcttgaaattgttatgcgaaaaaaatatgtgagtcttgtgttaacatgcaaaaaacatgacatgagtttaagtttactgaactcacacactgatcatccgagggtactgacagtgtttcctttacgattttcttttactatgcacaggcgcaaagtttctagtctagagaaggagcgtcaacatcttcaatctactgttgaggctcttcaagaaggtagttaccgttttactctgatgtaaaacttttttgaactcgttctttatcccatgcccaactcaattatctggtgagtcctagaaaatcattagttgtgttcacatcttgcacgcacatttttgttccctattatttaagccccatactcacacatcctttagtgtcacttatttttggctgtcaaataactaaaactaaactagaaatttatctgtaatattctagttggaataagacttgcatgtgtgtgatagacttaatttatgcatgaatattgccggttgtaaacttgacttcacattgatacttttggacagaaaagaaactcctacactctaaattgaggaatacttctgtgactgagaaggtcaatattatagaaaaaccttcagctgataaaagagatgcatcaactgcaacagaagatctaggtatgaatgttgatctccccttttgtttgatatctatgaatatgtatttcaattttcaactagtagtctgcttgacacgaaatatgcatcttcagatacaggggaaagcagctcttcagaaacccttaccagtgccattgacacagtagaagatggtgaaacatctgtatcgcggtccaataatgtggctgattttacttatttagaagaggtgtcttctagcatcccacatgatcagcttagaatgatcgacaatatcaactccttgatgtcagaggtaatctctttgatgtgcaaaaatccagtgtggttggtactttatatcacttacattgatcgattgcacctaaataaccttaaaccacagcacttgagtttcatagcctacaaaatttacttccttgttaatagtaattgttgcattgcagttggcagtggagcgagaagagttgctgcgagctttgagaattgaatcatccaattgctccaagctgaaggttttgttcatttcgcagcaactttgtttctactatttttgattcattgagcctatatttcttcctgtccagagcttcgatcgacccaatataaatgcgatgcatgtataattaagcactaagcctctagggtatacaaatgcctagggtcttgtatagttgcccaagggactatcccagctggcttaacctaccgggccctttcctccggatgaaatcatgtccaaatcgagggctattgtgtactgtaactttgtcatggtgtatctatcttatgcagtccattctttgtcttaaaggaattgaacaaggatctaacgcaaaagctggagattcagactcacagacttgagctgttatcttctcaaaggatggctaacgagaatgtccttccaaagccgatcgacacacgctccatcaatgatgcaactttgtatgctgatgaaggagatgaggtaatttagtttctgttatctaagcatctaacagcaaaactcacagatcacataaaagaacatctctttttcattattgttataaagccttttcatgtgttgacagcttgattttttttaaaggttacaacttatctgatgtaacatatttgattgcctttctccattagatcattgttatgattgtctgacgaaaaatatatacaggttgttgaacgggtgcttggatggataatgaagctcttccctggtggtccaaagcgacgaaccagcaagctcctctagtggaaagtagagttttggtataccataatgttttcttttcatttatatatgatatttttttgccctgttttggtgatagcatgatgagaagttgtatattggaggagagccccttgatgtaaccattcttttttctacagaaaatgaaatgtatggtttgacttctgtggagctacacttttgtattggcaatgaacagaatagctgccagcaggaaaaatacgcccccttatatattccataattatacgtggggtggaggtgtatgttgtaattgctgtatccatttgttatttcattcacttgttatccctagctctactatctccctcgttcattttctcttctgttatttgctgcaacttgtcatccgatttcctatattgctctggctactggttacaccggaagtggaagtgtggaacacacataaggaaaattatggtcctaaatcctaatccatatttatcgttactctaattttcctatggaaccttgaacaccatagcgctctctctctctctctctggtaattgtgccttgtagtttgaagactcgttatcaatgcagtgaaaattgtggatgcgatttatacacttctactcctagcaatccgaagccaaggctaaatgacaataacaatagaaaagactcaaaattatttataaaatgaagttctcaaattataagccgtgtcacaaagaagcaggcctgacatcctgtgtagtacactataatccacttttcagccatgcagcttgtgaagtacagaaatggacaaatcaaacttgcgattcttcggtcgactaaaagactttcctgttctctaaaagaatgcgaaagtcgatttttatccgcatgggatagtatgatctgaccaacgaatagactaaaatataacaagaaataatatatgatgactatttcttgttatgggtaggaacgcttagatagaacttggtgttcctgaaatcatcaaggagtggattatatccatctttggtcctagtcttcaacggcagtccaaactcttccatgaaggcagcagaatcaagctaacgatagttgacaaataacatcatactcgtcagtgcaccgaagtttgtaaaagatgtgatgcaagatgaactaggacactaggttgcatagaaaacaaaactggcttaaatagtctgaacttacaatgatggttctcctcgtcttaactggtttaaatgcaccggggttcttttgctgttttgagaaaccagagcagtcatggtcgatcttctccaaaagccagaaatcggttgggaagaaaatatctgcgtcaccctggcaagtaacataaccgagttcttttaataatatataataacacatagcacaacaacttaattaaacacatagcataacaacttaattgctcaaagttatttagttctttttccccatggggttggacagtagggtcaactaagctacgacatgtttgcaacgaatctaatattcagatataacagaacagaaacattattcaaacctgagcctcaagatagttgcgatgatccaaagtcctcccgtccttctgcaagcaggacacaacatcaacgaggtgtcctagagaaattgccttgttggaaaaacgcaccaaaagtcagtgaaggtcttgtcacctttgaagaaaccaatggagctctatcgccaggtatactgacatcaggaagatagctgaaatctgaagctataagggacatgcttggcaaagcttgatgtaaagtatctagtattttctgcatatgtcataacacatatttcagagattctggcagtaagctgacaaactcatcagcatatgatcacatatagaataacagtttataacctaacaagtggaagtgggttcaaaagacataccaagcatccagttggtaaccaagctctccgaggctttgggaatacttttgacacaactccttttgcagcaagtgataatttgtctctcacagacactttctcttcatttatgccagtaatctcgacacagcgggaaactagtgggtcttgtaatggtttgtatacctcagagccttgtgaactatttttcataaaaggcaaccatacaaatttaatgaagtctgtcctcattagttaccaggcaatatcaatcaatacaactgtccagattccagaagcacaagggcgatcgactatgttatactagaggggtaaggaatcagcccttcaacaataatatatcgaaaatgataaatttatctaacaagaatctagtaaaagaccagcatgagagcactataaaacaagcagaaccttcccttaatcttctgttgaagaatataccttttttcctttccaaaatataaagtatgtatactaagaataaacttatcttatgtagcactgtgcttatatatgttacaaatacaatacagtaatatatagaaaagaaatcataagatcaatagatcattagccacgaggtaacagaagagaattcagtaaaagaatttcactacagactgtcagacttccatcattttttttttacccacaagaagcataagttcattcatttcatcaaattattccaaagtccagatcatttcattgaacttgcctaaagccgcacataaataatcggtataagagcaaaaaagatactttcatatattgtctgaagcatacactctcaggaatcagaaaaaggaaaacacaaacctgccatttactttttcaatccatacttccatccatggagagacctgatctggcgaatagacaaggtcatgtggtagattgtcaagtacctgacaatacaccaaatgaatgttgctgttgaggctgctgccatcatgtctctaagatatgattgcgaagctaagaagtccatatgataatctaattcttcacttagcaaacaaaatgatactagcaaccagtgtttccctacttgccatcatcagtcagtccagactactggcatggtcatacaatggttaataagtgatggttggtagaatgtctaaagaggatcctatatctggttgttatggcaatagtgagggtacgtaaaggaacagcgcccaacgttgatacagtgttttgtttgcaatatcattggcaaagagagagtaatcaagagtttatgtctgctataactttataacctactcttacatatcctttgaaacacaaaataacacacagataaactcgacactgaaaaaaggtatatttgcagtattcacatcttgaaagcctaaataacatttgaggtgctgctacacattctgccaagctactaagttagtgcaaaccagccagaggactgcagctaagcgtcaattaataacaggaaaggtggactgtaatgatggtatattgcttctttgattcatatgagacatcaaagaaacaaccgagcagatagtcaaggcagtacctcaagcattaacacccaacaaggttgaggatccttgcggcctgtaaaatatgacaggaaagtaacccaaagtggtcaaggaataaaagtgcaacaatataaagatcagaagataaaatccgatataagtgtgatttgacatggagggattagtgggaagtctgtgtaagtgtaacccacacattttagactgagcctatcagcactacatcaaaatatggtgtaatagcattagctgaaaatttgcaagctgaattatcaaagttcatacattattttttaaatagaatgcattttagagtagattgccctacagaggagcagggacaagaagtcagcttaccccatccagctctgtcagttgcgtcacgacactcaaccatgaactttgacaaatggcttcgcacctcaccaacagtttccaattgcttctcagctagagaggaactaatttctactgagctagcaaattaagataaaagcaaggtcaaagcatattcgatcacataacagagatcataaagtgaaggaaggtttccttacatgtatttcatagtattgtatactttcggtggagcatttaacatcatgtagtcaagtatgcattttgcacatgtgccagaaccaccaccaatttcgtaaatctgatccatgcaggggaaaattcatatggtttggtgaaaaagaaaacagatgactatgtgccataatattataaggtaccttttctccaaaaaaaaaatttggcatgagaactgcagtaatattactagttgagaaggaatgaaaaaaagaaaaggaaaatggtgcagtagcacagccatcatttattaaatcatatgtgagcggttatggcgcttgtaagagcaaatgggtggatggaggtctagaactatgctgaggaggaagttaagaatgcaccttcagtgggactgaaagatttgctgtacggaggattgatgcagctattgcataggcataccatggctgcaccagagaaagaccacgcatcaagggtcaaactgacagaaaaatgacactacatgctattgaacagcttaagaaaacaccttgaagagctccactggagtgaaccaagcgatgtcatgcttcttgtacaacttatcaaggtactgcatatacgcactcctacctacataagcaaattacttccgtttctagtcaaatatccaagatattaaaacagcacaacacagaatcgtaattggcaaacaatcaatggagttcaacagtcgtggaagaaaaacagaagtcccaaatttctgcatgagaggaacagtggcacgcgcaacgtgttcgtcgaaatgccacctcggcaaacaaatgttagaaccggcctaatctgattcccgcaatgccggaacacacacaccaaactcccacatccaaatccggtccaagcaatagaatgatccaagaagcaggtagaaaggaggattaccgtcgagctggttgaagcggatgctggagtcgagcacgcccacgggtcccgaccgcttggagaagtagccatggttggggtcgtacagcgccgacctcacgaagtcacgcacctgcgcgcacgaagctcccaccaaatcatcacccgctacaaggagatctcactgcgcccctcccagcccgcgaaacctccgccccgagcgcttaccaggatgggcttgttctcggggacgatccccgacgagaacatcgccgccggataccaccgcgccagcgtcgccgctcgccggagcgccgccgggacggacgccatgtgcggcggcgccatgggggagtcggggagtgagtcgctgcggcggcggcggcggcaatgcccacgcggttccgggccttttccccgaaagaaaagaaagggaagtccgattcgtgttcgggcccaagcccaacacgagtccgagtcggagtcgtgggctgcttgggccgtacggcccgcggcctatttaagtcgcgcgagaggagacgcatctcctcgcgcacgcgcacgctcgagaaattgagagattcattcaattcgaagggcgggagagaaggaaggggagagatgatgatgacatcagcgatgccgccgggcggcggcggcggcggcggggaggctcctactccggtcaccggcgtcgccggcgacccccgccatgagcagcgcatgaggctggtgaggaaggcgagcgagctcgcgacgcggtgcgccgtccccgtcgccttgtccggcccggccatcggcggcgtgtgcgagccgctgcgctggccgtcgatggacaaggcacgggatatcaacaatcggtacaaagcgctgccggagaacggtcggaggaagatctccgtgggcgacgccgccgacatcgcgaaccaagccgcgacgcagcagccgcagggcgtccccgccggcggcgagtcggccagcgcggcgggggtggccgctgccttcggcgccatgaccgaagaggagctccgggagcttctccgatccatcgactgctccctggcggccgcgagccacgcgatccagaaggccgccgacgaggccgaacagaagctctcgctccagcgcgcgggcacgctcatggcggtggactcctcctcccaggacgccgtgccgccacatgccgcgcccatggacatgggagacgaggtgcagggcgcgcagccaccaccggatcggtggttcgaagaggaacgagagccggtaatttgctccaaaaagaaaccagagccgtgctccgccccgccgccgccgccgccgccggcgaaccggaacggcgtcgcctacgaggccgaacaaaggcgcgcgtgcgcgctcatggtggactcccaggaggatgccgcgccgccgccgccgccgccggcgagcgggaatggcgtcgccgacgacggcgagtacatcaacctgggcgggtacatgatcgagcgcaaccgattcgaagcaatctggcgcgaacacgcgatccctcctccacaaagcctcctgccggagtcgttgccggacgacgacggcgagccgctgcggctgtggtcgttcgacgccggcgagagggtaatcctttgaatgtgcccgcgttgagttggcctctagactgattttgttgttgataagagtaatgctatatttactttatggccgtgtggcttgtgacagaagtaagatgtaatctattttcattaaaaaaacactttaaaaaatctgtactagtcttaattagtagttagttaggggccgtttagattgcagtcaaaataaatctaatgctaaaattttagtagtttgacaatattataaaaattgacagaatttcttatatatttactaaagttggacaagaaactaaatgtatgcacatttttaataattttaacaaaaatgatatgatttaaaatgacatcaatctaaacaacccttcagttagaaaagaatgggcttaaaatcaagaatcaatcatattttatccacatcagcttttcaagatgctttttctagacaaataacagatttttgtacgcgtataattttccttttgagaaggttttgtatctaaaacagtttcatttatgcagagctcgagaaaacagcacaaaaaaatgaaaacggctgcgaggggaagatcaaagctcactggacacctgtgttgacgacattctgtaccggctgaagggtcttcgatcgatgatttcacttagatagcagtgcagtggtctgccttttttgtgaacttgatgtttctgtaaatttctatgtgagattcagatgttgctcgatctgtagctagttcctgtcttccagctgtaactgtaactgtaacgagaattaacaggcaaaagaactttgttatggggattctttaataaagctggataactaggtgatctgttcatctaaaaagtagtcgtgggactgatcgagtttgctgtttgccgccttccgacagttgaccttcatgtcgccgccgcagttgccttttgctgaaaattggatggaaaacgtgcatcgagggatgggtatttgattgatggataattggatgtcatcaaacaacaacatggataatatggagcatgctgggtggcttaccactagcttgactctaggcattgagagacaacacaaactgtcaaagattggtggaagacactagctaatacggcatgagtttgagaggtttgcgcaccctcatcctcctcatggtttgggagatatggaagaaaaggaatcaacgaatctttcagcacaaggaggctacatcatctttcctcttcgccaagatcaaggaagaggcgcggacttggacgatggcaggagcaaaacgtttgcgggaccttctgcccctccatatataatatataaagagtacaaagtttttcatttctgatccttaagagttgttttttcttccactatattcaatgaaaagtcatgatctagtgccgttttgcttaaaaaacaacatgattgtagttaatagttattactccataaagtgcactttttttaagtgtaaataagtaaataactgatggatataattggaatatcgtcgaacaacgattggccctttttttcttttcattggcgtttagatcgtttgacgtagcgacgtccggggtcgttgcgccattcgatttgcatcggacggaaaagagggagtacagcgatagaaggggctattgctcggtccgcaacaacaaaaatcaagccacgaagattgtcctgggcccatggaaacaatacgacggtagcattgattccgaggagttcctctacatccattctacaagtgcaaccgtatatatcatgtctaacctgaccgtccgtcttatttaaaaaaattatatacttttattattaaaaaatagtcacacataaagtaccattcatgttttatcatgtaataaaaaatatttatcataaaaaatttctaataaaataaatggtcaaacattggacataaacaatataaaactacactattttgggatggagggagtaccattcttaatgcaataggggcaaatgacaatgcagtagcgaattatctatcgattacgttgaactgctcatccaccttatgtcatattctcgatcaaccgagcatcgtttttatataacgggtaatattttcaaccgctactgtttttttatatataaatgttttttctaatttctttctgcatcgtactggtgtcaacactgagtagtttaaatgatgaatatgatcaattatcgaccgatcgatcattgtttttgaaaagatgctattgattctgaatgttttcgaccgttttcacctcttttaacttccataaccatgaggatactccatacaatctctactattataaaaattaaagatgtttttgtcggtactttgacacgttatccgtgtatggttcggtttttaagttcgttcgcttttggaaatacgaatctgtatttgagtcaagttttaagatcgctcgcttttgaaaatacaaaaggagtcgtataagaaatccccttaaaagaactaccatgctaacttgagatgatcgaactcttaactacacatcatgattttctagaaatatatatatatccaagtaaattcccaccatgaatttcaccttaactaaaccatacaacaataataatattaaaatagccttcgtccgttgtaacatacgggcattttttaccgttattttcagggtagttataaaaggcacacggtcgaggacgatcttcacgggttcccgaacttccaaaaaaaaggggcaattacttatttgaccctgttttgaactgtaattgatgatttggccctactttttgaactttgcttatttgaccctccttttcgagtacgaagctccggtctgaccctattccgtttgggtgaggtgacggtgttaattttggggtaaatagtctattttgcccttgcttatttgacactgttatatcccttttgtttgcttgtttgaccctattttgttataccgtgtatatattcaacaatgttgaaatatttgtaataatttttgctcaagtaacagatttggcattaatttgacagatttgaatcattttgtgaaatttgacttaaatttgacagaattttgtgaaagtgaaaataaattaaataaaatgtgccccaattatgacagatttggcataaatttgagaaatttgattcattttgaaagatttgactaaaaattgtcaaatttgaggcaattatgatagattttgttaaaaaaaaatcgaacagcatcgacgccatcgacctcgctctctcggcagtcggcatgacagtggcgaacggcgcgcacggcggtgcggccgacggtgagcgggggcgggcggtggcggacgaggcggagaggcaagcgggcggcggtggagaggcgggcgaggcgagctgcggcggacgaggcgggcgaggcgagcagcggtggagaggtgggcgaggcggccggc

SEQ ID NO: 5227 - DNA, 27281 bp, Oryza sativa
tcattccacactgaatccagcaccgaagcatatcaaatagatgtgatggtcatccaatgcaaatggttcagccatggttttatcatcctggtagcaatgaagatatcaacttgttcggtccaaattgcaggtttttattgaaaaatacaggtactatttcaatagtaaaaaaggcatagttctttaatgccgagatgacaccagctagaaaaatatccagcatgtgcacagaaggttaaataagtttaagcactaaaaaaagctggagttttaaaaattaagaaatcttgctgaattcacttgccttcatggcctcgtttattagttcttcatttgtcagttttagatcaaaagtcattttctggaaaacctgagacaatatcataacatctcgcattgctctatgcgcatcgtcatgcgagacgatgccatagtgttctctcagtgcctccaagcttgtacgacgttttttccctgcaacagaatagtaacaatatgtaacttcggctagttattattaaatgaatagaccaaatagcacagatagggaacctaattgagaaatgaaaacagtaaggcagaacaaaataaaatgagatgtgtccctaactgggccccaacatatgtacagctccaagctactgctcctaactaggacaatatatcagcatttcacttttctgttaatcctcattatgacatacactcaaagcagtacatacgggaacttccagaaaagaataatatgttcgcttttcgacaaacaatacaatgtcatataaaaacctcaagaacggtcagcaaattccaagaactacggatttgctaatagcagaaacatggaaactgagttgtactactaaaccatacacaacatcctaacagaagcactctttttgcatggttaaaagatgaagtgtgggtttcatcttactcaatatgctcctggcaagcagatagtgagtcgtaattaaatgaagaatctagcttaaaaggatgaagatagtgagaatgacacactccaaaatgctgcgagaagtgtgtcctttttttcgcatgctcaaatcaaattgaccccaaaatatacagtatcttcacatgcaaaagacttagagtgagagtacttaccctctgctttcaccatcttttttgccaagagaagggtgtcaaaaaacagccaatctgcaggaagtggtgctgaacaacgatcaaactcctgagcaaggaaacgagcatcaaattgttttgcgttatgagcaacccacagaactggcttgccaggagcttggcgacttcgaacgaatgccaatagtagtgggattacatcactaaacctgtggtagtcatattaagataacattcagaataagtgaaatagtaaattaactgttggtgaagtgagatatgcataaccagttttccattgcaaaaactaacttattcctacaagcaaataatttacaataaaacctgccttaatggcatgcatgcttgtgaaaaagagggaatacagagctattgcatacattttccataactaattcaatactatggtctgttcacagcatcatgttgagtgacaaatacatcagggcatgttgacgacgactgttatcaagacatgtgatgaagagattaggaataatatggattcgttggatgcaaaacacaccttgggataccaggcctgcacacgagatcagtgccaattttaatgagatgttcaacgtagtcaggaacagtcctttcaggattaacaagagtttcaaaagtgctattctttcctccagaaagatcacagagtgcaaactcaactattctatgatccttatggaaatagccagtagtctcaagatcaaaaactagaatagttgctgccgccgcaacttccttcccatgttcctgtacttgtgttgtgaaatgtcgtttcccacagcttctaggatcaagcaattctacagttgataatccggcttgttgcttaagaaatctgacagggaagctactccatatactgttcctcagctgaatggatcgaagaatcgatgacattgtgcacaggaaatccacttaaaaccaatacgcagagccaaacctgtatacattgtcccacacaactaccatgtcagagtagatggcaagtaatcaacctcacagtgtttcgatatgaaatttaacctcccccccaaaagaagacttatcttccaaagtcaatacgttctaaacgtagcaaacgaaaggaactcacaagacaggataaattgcattaaaaaaagggtaaatttaaaaaacgatgttttcacgcgcagctgaacttccggaaggcatgaggcctgcgtgcgactcctgtcgacacacatcatccaatccagcaccccctatagttgagacaggcttgagcatttcacctcttaaaataaaatggactaatttttcagtttcacggaccaaccaggaagataggctcgcagctatgaactcccgcaacctcccccagcgagaaacaaataagaaatctgcaggttcagtacagccagtatccctcccagaaccctactcccaacagtcccaactccccccaaatctcctccccccgcaccctacccagatcatccaggcataacatcaccacgagagagagagagagagagagagagagagagagagagagagagagaggaaggaatggagtttaccagcgccgacatgagcgtacgacccccgccgagatgcccacgcacgccgccacctcccccgccgccgagggatttagctaggggtggctgcggtggtgaactgattgtgtcgcgcggcgcgtgatgcggcgagcgagacggggtggggtcagttaacagaggtggtgggggataacggcgcggaaaaaagtccatttgacaaccttaaaatatgccgcaactaattcctatccctaagcgagtaaactggatagtttctcgaagtattgaaaccagtgtaatttaactccccagcgattttggaggatggttttaacttctctagcagttttggagaacggtttttactgacgtggtggtgttgacctgattttcgtcccatgtgggggcttatgtggtattagaattaaaaaaaattatgtgggatccatttaccatcactctcaaaacatattgcaagacccccatcctctctctccaacccttcttcccttggcttctccccttatcctcatctagcatcggtgcagaggctgcgcgcggcggccaggcgaggcaacaacagcggcgacggtgatggtgtggagttggctcgccgatcccctccttccaacaaccatggacgacgaggaggagcatggcgcagcacggcgcggcgttgctgtctcccttgtcgatggccccatctctcttatcgggagccttccctcctctccgtccttcaccacccctcccccctcccagcggcggcggtggagaaggccgagtgaggcggcagtggcggtggaggaggctcgctacctctctctctctctctctctcccgaggacccttcctcctcctctccatccaccctccaccctctcttcactgtaagtgcggtggccgatgagttagcggtggcgcaagtttgggctcgcctgacagagcggataggatcaaggaaaagggtggggagctagagtaggaggctggtcgaggatggagtggagcagcgcaggggagcttggggtcatgctcccaagcagcaagggtctcccgcgacggagatggacaggagcatcgcgagcggcgtcactaagctcccaagcaacatggacgtgggacgtcgacaacgctaccgggtgatagagacagagtcggtggtgggagtcggatgtggggaagggtgacgaaaggggcacagagaggtgaggaaaactttggtggaagggccacagccgtcggtgaggaggcggcaacagagagtgacacgaattgcgttgcttggtatgtgaggaacctcacccacaatgacatcgtgaactcctcccacacgcgtgcttagttgggaagattctcctctgcgcgtgcccaactgacgactcctctcagagcacgacctcccagcgagatcctccccagcgcacgactggccagcgagctccttccccatgcgcagtctcctggtgaggtcccccctcacatgttgggataagggagagagagaggggggaggaagaggggttggagagagaggatggttgtgggtcccacaatatatttgagtgtgaatgacagatgggtcctacagatatttttgttaattctaatgccacataagtgtcacgtgggatgaagactagattaacaccgccacgtcagcaaaatcgccctccaaaacctctgagggagtcaaattgcactggtttcaatagttaaggagtcatctgatccagttttctagttaaggggtacgaattagagtggcctccttctgaagggagtcggagtagactttttcctaacggcgttgtgtgactgtgcggtggggcctttcgacctggtgagagatgggccgaatctaacggcccgttcctccgtggttttagtcaccgaaccccattacaaccggagtgtactgagtaagcacggcctgagtaagatatttgggccaacatttatgtgctaaatcttctttgggccaaggcctgattaaatttagttcctactactgtagcgagcaagcttgctttcttcagttttcgttgcagtataaactataagctgttaagttcgatcaaaatcaatcttacatttaagatccaaaccgatgtgatgttttgttaatcatccaaatcgaaatcgagacttatcgtcagctagattagaagctaagcgtggggctatacgctggcgttttcatcagttggttctgaaggttctttcagtatcaagtgtactgtctgcatcctgcagtgcagcagggaatagagttaacctctctctaattattcgtcctcctttttgcaaggatttttttctgtcttacagatgaactcgggtgaatccaaaagaaaccaaattgatcgatcgatcaagatcaagtacagtaattcagtccaactccaaccactgtgtattgccactccatttctacaattctacagatgcacaaatctctatttttctttcatttcgtcagacgtgacgcaaccttcacgagcaagcgtgtgttcgtcgtgcttgcataatgctctacttgtccacatcacactgccccgtcgttgctgccgtccttatcccccgtaggatgactgatccttgtcttctgacgaacagcaacaacaacgcatgcactgcactgagctgagctggatggattgtatatcctagtatgtagacccgtatctgatagtatattgagatgtgaaaggaatacttcatagaatctttgccccatggttaactattgcagcatcatggaatcacgatcctgtagagattagttgtcttttttacagagttcggtgtacaatctctgtaggtgcagtgctgtccgtaggagttggtggtatttgctgtcatcctgaagctttaaggtgttgtttggttcactcccaatcattgccaaacctccatgccaaacatagctaaatttgtggcttataaattgatgaccacaccttaggtaacttttggctaaaagatgggtgtatgacatgtgggcctttgaattgaaaaactttggcatgccacaactttggaagtgaaataaacgagtatcctagaaagtgtagcaaagtttggcaaagtgagggagtgaaccaaatagcccctaagtagtttcacaaaacagtggctgaaatacaaacatgtttatgaatcttggccctttttctctctgacttattcatccaattattaaatcatatttatttatcgcattattgaaacgggctatttgcgtcttcatgacgagagttttcgaagaaaatccgtaacatttttaccatggtaagcaaacaaagactatatcaaaactgctttggagcaaaactatgggctcttcctaagaacatttttttaatttctgttaccagttacaattgatgtttaattaatttgtgtaaaagaagcatatgctggcgcgagtatgtcgcatgattttttattttccttggcctatctggaagcaacatgtatgtgttattacaaaaggtaagatcagccaattacttctcagtagtgggtaagattaaccaattacttctcggtagtttctcactcttgtactccaactgggtgtgttagcctttctcttgtgacatggaaaattgtattcaaaagcttggaaacaattttctatatcaatttgatctgtagataagattccatgcacgcgcattgatggtgcagaaaagaatttttagttcgtgccaattcacagaaatgacaatgcaataaggcattcgggagcttggtactgtttgtttgttctttaggtgccagaaacaaagggcagaaatcaaaaacttgagatggtcactactatgtcctgtccttagcaaggaacatccatgtgcaagcgtgctgttcttgcagctgtccaaacaaaaattccaattcagagaggccactagcggcatatgcaacgaaccagcaatttaattattgtacttgtatagcataatttaccatgaaatctgaatgagaaaatttacccccctgtataagagcaaataatattttccgcattacttgtacaattttttttctcctgttatattcaataaaattagcacaatttagtgtcggttcattaaaaaaaagaatgagaaatttggggtcattaagacttaaaagaggtactaaaattttgtgtatggagatttttttttggtgtgctgggagtgtatgagacccgtccatcacttctaatctaataattaatttgacacctcctgttatctaggtactgaaaggtagcaatttttttcgccggcctagctagctagccgatgtattaaggaggagagggtttagaaactgtacagggatgtacaaacagagccaaaagccaaaagtctcacaccaaaagccaaaagtctcctactactttgggactgttcctcagttacaaaagagatagtaatagatagagaagcataaatacctccattatttgtagatgtcacttcacatcaaagaagaattcggcttaatctcatcttttagatgctagaagatccttgctgtgaatggctatcatcgcatatttgacacaaactgcaccaatgctttcttcattccattattagtccttagatatatcagacgtttgatacaacacgcacacatgcagatatgctgcctgcctgcctcgtcagaaattaggaacaaactctcctggtccttaaaatttactagcttcaaatttatcctaaaataaagttattttttttacctacacccatatcatctttcatttaattttttctatctactttatattcttaactaattacttccatcaaaaattctaactgttttattaataatttatataacaatataacgaaaagcttacattttaggacggagggaatatccgtttgatgcacaacacaggacagcagcacagcaaccatctgagcctttaaataccccacaccacgagacctcccctgctccgctccaagacactcgcacgcagacatcacatccattccaggctcgatcgcttcgatccctttgcctgagaccgagtaagccatttctccctctgatcctcctgtgaaaatttctcctaacctttgtgattgtttgcctggtttctcttttattcttgcatgtgttgtttcagtttcttgtagcgtgattcttggagataatttacaaggatgagggttttctgttatttcttcccgaatctttgggatcagtcagatctgttctttttcactgtacagttcatcagtaatactgttggagcttcgattggaatcaaagtttagattctgcaaaccattcttcttgattgcatggcttcatttaatcatgcttcttctttttcttcagtttttttaaactgtactgtactagaggcagttagagtataactgttaatggatgaacttggtggctgaacttctaatggtgatgacttgagcagagaaatggagctaatcacaaacgtctccgagtatgagcagcttgcaaagcagaagctgccgaagatgatctacgactactacgcctctggtgcagaagatcaatggactctcaaggagaacagggaggccttctcaagaattctgtaagctaccttccaaaatagtaggctttatctctagaaaatatattagacttttagctagctgtttctatctggtagcacactgctggatgaactgtgtttgttttatttacatcagcagataataattgagcttaaagtagtgcaattgaaaagttcttggaaatatttttttcaaaaggatcccagttccatattttttttgatgtctcatgaaaagatagatgatagatatggccagaggcgtctccaatcctagtggaaagcttacaagtccgtgattataattaactttcggattttttcaagtttctgacaaggtttgagtgtaagtggatcagtttgcctttgattaatgtaatgacatggcggccaaagtggacaaacaacattgagtagaggacaaagatcagacgtgtcttgtgacatgtggtttgtatggtcaaagtagatgacagtttcattaagaattctcatacaaagatagtactacatgacaacattacttcttctcggtttcaaaaaaacaacattacttctgcatgtgaagatatagatcatctgcaaggctccagctcattgtagaaaactaggcttgcattcgtttcttttagacttgaaatatttctcttcaaactttgctgctcccagtttctatagctatcctggatatatactgtcatactgatgctcatgctagatgagaaatactctagctcagaaaaaaaaacacgaatattaaggaaggatctaatataaaataaatagaaggagtgaggtttcgaacccaggccggctagtccaccaccttgtggctctagctcagaaaacgtctgttgacaaaatagtcatactgcattatcttcaatcggatacaaggaagtctcgcacacgtgatatatttgaatatgaaaggtattgatcacaagattcttgaactttactttacccttccctgaaaaatggttccaggtttcgaccgcgaatactgattgatgtatcccgtatcaacatggctacaaatgtcttgggcttcaacatttccatgcccataatgattgctccctcagccatgcagaaaatggcccaccccgaaggtttatccaagttgcattcacctaattctttcctctttattttttttttcaaagcaatgtttctcatggagatgtttatctgacatgcaggagagcttgctactgcaagagcagcttctgctgcaggaacaataatggtttgagagatatccaaaagcttgttatgttttttttggtctcaaaatgattaattcagtgttctgatgctatggctcaacattatgttttttttttcagacattgtcttcatggtccacttctagtgttgaagaggttaattcagcagcgccggggatacgtttcttccaactctatgtatatatttttcttcaaaaatacttaagatgtaatgaggagcagtgttttcagtttctaaaccttagctgagttacctctgtctttactaggtttacaaggataggaatatagtacggcaacttgtcagaagggctgaattggctggttttaaggcgattgcactcactgtcgacactccaaggcttggtcgcagggaagctgacatcaagaacaggtcctaatctagcaactctgtacacaattactgtatgctttaccacgttccatactgtcatttcatcaggggctttacagtcttaagtatgtattctgaatttccgatgtcttgcagattcaacttacctccacatctggtattgaagaattttgaagcgctggatctcggcaagatggacaaggtttatctaaaactgaacccttatgcatctatatatgaacaaaattttcttatattcttaaatgtgttttatgtttttattcagacaaatgattctggccttgcttcctatgttgctagccaagttgaccgctctctgtcttggacggtatatgcttcgataccatccttagttttgtgcaccaaacaatgaatcagaaactgggatactgtcctggttcttctggcacttctctgtggcaatgagatgctgatgctactgatgcacaatgcaggacgtgaagtggctacagacaatcacctcgttgccgatcttagtgaaaggagtcatgactgcagaagatagtaagtgcagtttcagagttctggttgctcattgttcattgttatggcatgccatggtctgatggctgatgatcacatgaatttggtgcaaaatgcagctaggcttgctgtcgaaagtggcgcggccggtatcatcgtgtccaaccatggagctcgccagctagattatgttcctgcaactatcagctgcctggaagaggtatatgctattaattgctaacccagctactgtcataaaatgcacttgtaaacatcttcagaggaatcttcagtgcaactgacatattcagaaattctagcaagaaacttccctgaacttccatgatctatactgaaagtgtcgagcaaactcaggtcgtcagggaggcaaaggggcggctgccggtgttcctcgacggcggcgtccgccgtggcacggacgtgttcaaggccctggcgctgggagcttcaggagtatttgtttgtccccagagcctgcattttcaatcaagttagtacagtaccatctgaatttacagcccgcttaacgccatgagcatttgggtgttcgtcagattggcaggccggtgctgttctcgctggccgtggacggcgaggccggcgtgaggaaggtgctgcagatgctccgcgacgagctggagctcaccatggcgctcagcggatgcacgtcgctggccgagatcacccgcaaccacgtcatcaccgacagcgacaggatccgccgctccaggctgtagaggctaagctctgcagcggttgcagtgatcgaattgtccatgtatggtatgctagtccatttgagatgctactgctagtagttattgtgatccctcccacatttgatgatgccgggtaataaggagagggaggaggctgggatgtgtgcctccaggtgtatgtgttcggtgttcctccgtgatggaggagtatgtagcagggaatttgtcactgttgctgtcgttggcagggaatttggtgattcagagtagtttgtgttggaaaaaggaaaatctgtccaattctgtctcgacactgactgtgatgctttgcatcgtcatttgtcgtggacgaaacgaagcttttgcctctgttcatgatttttttaaccttttttattttaaaatttaaagataaacccttccaaaacttatttccaaaatataaaccttctcatcacatcagccagagtaacgtggccaaataacgctgccatgtcagcgagattggcgtgacaatattgttttgccacatcagttcagctagcatggtcaaaatgttcggattttgaaaataagtttgtgtagggtctatttttaaaattgaaaattaaaggttaaaaagattaaaaaaaattctctgttcatagctcaggaaatcgtttgctctctgataaatgggccccaggcccactgtcagtttcacatacactcctccccagtcacctacgaattccgccagcggcagtggcggcggcggcgctcctcgccgccggccgctcgccgcctcaccgatgccgttcccgcgcctccccgcggtgtaggtccagttcctagcagccagcgcttgctgcctgctggcctttcaactgcctccaaggctccaaccctagcgcggcgccatcatcatcccaatcgtccgctacagcctacaaatcgcggtgatggtcgcgtcagcgtcgcaagctaccgaactagcgccgcttcgtcgtcctgccgctgcggcttgcagggagagacagcgagagctgtgctgatgaagtgatgaaacttgtgggcttgcggcttccaggaccaaactgcaggtaccagcaccaatttttattccaagaacacgcgtgatactctcctctagtaaaatacttcagatatcagtcaatctttggtgtcttgctgatggggaaaatctgattcttgaatacaaaattagtacacaagtaaagatccttcctacctccaagatattctcccctgtcactgtcggtagatcaccactctcttcctcatccacacagatgaacacaaagaggaaagagcataaaaaagccccccaattcctccttccagttcaagagtacaagaaagacacaagcacagacaaaattcctgagccctgccccccgttgcttagtaaacagtgagtcctcttgctgatctatcgtgcagaaattccaaaactacacctttggttttagtatacttctttttcatgcatgtcttttaatttgatggatttgtgtgggggaaaatgtttcgcttgagcttctcgcatgctctattcctgttttatttcatcaaattttgtgaatctgtaagattaattcgattcatgggtaattggtaagcacgacatctgtgccattttatatcgtataagcacctttgtactgatgcatattacataagggccatcattttttttcatgttgcttttgccttccatactaagctggtcctgtagcattttggagtttttatggctgtgctgaagataataatttgagcagggagatggctctggtcacaaatgtgtgcgaatatgaagaacttgcaaagcacaaactgccaaagatggtttatgatttctatgctgttgacgcagaagaccaatggactctcagggagaacagtgaggcattctccagaattttgtaagttgtgctctaaattggtagggaatatctgaaaatggagatagggaggtcctgattttgtgttatattcatagaagttattgttaggatgtagcttttagttattttcatttgacattgtgttttgattttgaaataaaatatattacccattacttcgtctttcaaagtatattatggtgtcctttgtggataaatgatgttaggtttcagccggttgtattggttgatgtgtcctgtatcgacatgtctatgagtgtcttaggctacaatatttccatgcccattatgattgctcctacggctttgcacaaattggcacatcctgaaggttctggtttgctacctttatatctttcttttggcaatcgcatatttcaatgagaagttcctttagggatatttatctggaatgcaggagagcttgctactgccagagctgcagctgctgcagaaactataatggtttgaaagatcgtaacaaattttatgcattttgatatctacgtctgacacattgattcaccaactagtcatattttcagacattgtcttcatggtcatcttgtagtattgaagaggttaatttggcagggcctggagttcgtttcttccaactttcagtattacactattttctttcttagattcttcacctttcttctttaggatttatgctcccttacttcttatcaatgtcttgttcagatatacaaggacaggaacttagtgcaacagcttatccaaagggctgaaaaggctggctataaggcaattgtactgactgttgatgctccatggcttggtcgcagggaagctgatgtcaagaacaggtcctcatcgtgcaaccgtagtgtttgacttgtgcattatgcattatttaatgaaaatctgtaccctgcatcaatatccttttcttaaaggcacctttattgaaagaagaaactccaccgcaaactcattatctgcattatactttacattacattctaggttcaccttgcctcaaaatgtcatgttgaagatctttgaggggctggatcaagggaagatagatgaggttgtctaaaaactagtgccattgtgtgaagtagtcatgattctgtttaacaatgccctgaatcattctatttatctgatgtttcagacgaatggttctggtcttgctgcctatgtcgctagccagattgaccgctctttttcttggaaggtattgcagtgacactatgacttgtaatttccagataacaaccagttaatatgaaagattttaaccatcagaacaatgtcatatctcagacaattcttaatgtgaatgaaaccgtgtgatgttgatgactcatcctacaatacaggatatcaagtggttacagacagttacatcattgccggtcttagtgaaaggaattataacagcacaagacagtatgtcctttgctttcaattaccttgtgtaactacatgcctcattatccaagctgcagatctcacaagacatttacaaaaatgcagctagaattgctatagaatacggtgcagctggtatcatcatgtccaaccatggcggccgccagctagactatcttcctgcaaccatcagctgtctagaagagctatgccatatgtaactctcttttcaatcttaatgaaatttggtcggctccttcaccgactcagcaatcagctgtgtagaagaggtatgccattgataacccaatctgcacttcagcttattgtgcttttaaacacattttaactgaaaacagcacgaatctcaggttgtcagggaagcaaatgggcgtgtgccggtgttcatcgacagcggttttcgccgcggcaccgacgtgttcaaggccctggcattgggagcttcaggggtatttgtaagtcccctagctagctactgcttgaatgaaagatgatgctgaattgctcatgacacggcatctgcatacgcttcttgttctgtcagattggtaggccggtgctgttctccctcgccatcgacggcgaggccggcgtgaggaacgcgctgcggatgctgagagacgagctggagatcaccatggcgctcagcggctgcacgtcggtgaaggagatcacgcgcggccacgtcgtcaccgagagcgacaggatccgccgttgttctcggctgtagtgtacccaggtttcctttgcgtttgcgttcttgggagtgttttggctgactgtggaaaattctaatttgttttattgtgatgttttctgatctattatatcgaccctctcatggggtatatataggagtacataggggatagagacttggagtataatacaagtaagagtagatttatctctaggattctatctttaggactctatcttatctctaggagtcaatctctaggatatatcttatctctatatttgtatttgactcttatctctaactaacacattatatttctaacaaaagacatctttgcagattgcaattgatgtgattctgtaactttgcgttcattgtcagatggagatggttgtgtttttttagaaacttagtacaatcaggcatgtggagaatggtaagtatttagaaacacaattcaaacataggcgttcataaccgcgtacgtataacatactcacctatatgaacacatacacatggagaatgacaagttttttaaaaacaaaattcaaacgtgggcattcataacgtatgcacacacataccctattatactgaaaaaaataattagtcgtagaggcgagcatctgtacatcaagacaataattagtcgtaaatgcaaacacatgtgttgactctagaacttaattcggatggattaatttgaccataagaaaccaaactagttgaattacgccgtaatacagataaatcctaatagatctattttagaagatgataagttcataaataatatccaaattcggcatggttcacattaaaattagaaattatagacgaggaaggaaaccaatctgctgccgtgttacacggtaaccgcagtttgcaaccgtcaataggagaccctatccactacgaaatccgttggatccctcgtgctccgcaatctcagccgtccgtttccccctatagtcccccttacctccccttctacagttctacgaagtacgatccaaacaccagcggcgaaggcgacgaagacgagggcaaaaacaccagaaggggaaaacttttgctctcccggcgatctcgagatctctcaagatggtaatcccccatccaatttctctctacttttcctcggatttgcgccgcactcccgatcgatgtcttcgacgcggttaactgcgatggatttgcgcgagatcggatcctatggtctagaatttcgagtcgattaggcttttttttgggtggtgttttgcgttgggtgatttcagattggaagtagaacggggggacgaggattctgagaagaatctactggtctttgtcgtactgaatgctctcgatttcctcctgttttgatcgcgtctgtgtggtttggtctggtcaggtggtgctgcaaccagatccgtttctgagcgagttgacgagcatgtacgagcggagcacggagaagggatctgtctgggtcaccatgaagcgatgtgagtgcgcgctttcatctggcaatctggtttgtgatttgggtggctgaagaactgatgcttgagttgatgggggttgtttgatatgtgcagcatcgatgaagtgccaggcaaggttgaagaagatggcggcgaagggagaggcagtggagtaccggtgcctcgtccgtgccaccgatggcaagaagaacatctgcaccgcggtacagtgactgtcctattgtcctttgctgtgctgattttgaattattattttgcttatggttgttagttttgtgcataatggttaccgattatctggtattcgatgctaattatgccaccaggcggtaagtgaggaatgtgaatatgacattaggcgcttttggtattgcactaaaacctctcggatatgaaatttcggtactgagccagtttatttggtattcaagtcagcaaggtatattgttttaagagatagataaaagtatggaactgtagaagtgctgcaataagtatgatccaaactgtgaactgtatatatagtgaacatatattgtagattggtctatgtagaagatatacagtacgttggtttcttgcttaagcttctcacaagcatcctttcgcggtaacatgtgtaggcactcgtgaagcatgatcataaacagcgaggtaccgtagaatcagatgcttactcataggacatcttaactcgcatcctattgaagtagaatgtgtaacataatcataagttggaacagactatactatcacatgcttagttgtagcatggtaaattgataataaacatgaatgaactttgttcaatagacaaactagccaagaaaacgtttagtgccattcatggtgttaatattgcatgtttgcctgccctacactaccgcagtctcattttcatcctatgctaagataactctcaagttggtgtagatattgagtatgaaactcatttgtgtgctcttgccaagttttgattgcattaagtagtgaggtttctcattaattgcaccatcttgcattttctgaaagcgtcatcaagttgtttgagcttaaatttatatggtgaaagtattgtttctaatgataagactgtagtatcgatgggcatccactggccactttttcccatgtgattaatctttaccaccaaacagttgggtcgataatctttttccacaagagtaagaacgccatgataagttcagagtcccaagatctatgttctgaacagtttattttctcctctaccctatatgtggtgaaaattcacatggtgatgtgaggtattccatatgaaggctaaaaagttggtgattatatctcccatgctgttcatgtagatacagaataatagctggtttggaaccatgtgtgtccatatctatttgtccctgctaaattacatttgtcaaagctcgcccaatggagcatttatttgcccctgctattgcaataatgcctcctaggggtcgatagtgcaattacgagctgaggtaaactactatatttacttagatgttagtgatactatgtttttttccttcaatactatttataggacagtcatttgcaatacttttttttttgtaattttgatgaaaactggatatctgagttgactaattacatgttcgtagttttgatgaaataatggatatttgaactgattaatgatggatttattcatctttctgaagccataaacattagccatacttatttgagatgcgtaaattattctcctgtcacttccttagctttttgggctacccaataagtctaacttaaaaagctcgccatgtctttcagctctctgcaaaggagtacctgaagttccaagcttcatatgccacagttcttaaagcccatatgcacgctttgaagaagagggagaggaaagacaagaagaaggctgcagaggttgagaagataccagagaaggcaccgaagaagcagaagaaagcaccgtcttcaaagaaatctgcagggtccaagtcgtaagttactgaaagaatttgctaagcccttttttggccacaggcctgagtaagatgggtgtagtcaagacattatcctccattttactcttattcatgtctgcgagatgaagcatgtgaatacctttatagagctgtgccgtcgacattagcaatttttgaagcagctttggttgtctagatgtaagccgccctggaattttctatttctatcatagaaaggcatctcttaaactgtgcctgatctgatcgtcaagttagtgcaactttcaattgacagaattacgtctggaacatgaagttatgcaactaagactgcagaaggaaattgcagaactgttatctggatgtctgtgttccttcaattttgtttttctggttggggagaaaaagtgtgaaggtatgtctgtgtcacgattcccacatgcaagtggtgatcagaatataagcagattccatgtttaggttggtgcataagcaaacggcgtactactatgggcctatttggtagagcttcaactctggattttagctctaggagttgggtctggagtggagttgtagagctgcctgaacctagctctatctctgagattttcacccttctattttaagtggagctgaggtgccaaacaggccctatctctcagcaattgctgcatcaacatggagcattggagggccgtatgcccgtatcctgtgtatgggcacagcattgtcggttcctagctatttgttctgccatcccccggtcccaactgattctcgtatcggtccagacaagtccaaaagctccaagctccagtttttacaccatttcgtttttctttaacacggttagaatttataaaccatatcatgtggtggtatttttgtccagagattcacctcagaagtggcgaattttttatcgtaccaaattgcagagacgaatctttgctgagtaggaggcagcaaccactatgagcagccgtcaccatccaaccggacaaaatcccatcaaaaaataaacccaaagaaatcaaaacaaaagcgagcacccaccgatgatcactcactgatctctcatcaccaaacgcctccgacctcgctcgcgtcgcgcgccgcgcacccatccccccggcctcgccaccacccactcccgatcgcccccgtcgccacccaccccctcagaaatctcatcttttccgcctcctctcgccaaccaaacccgcgaaacccccacaaacgacggtggtgaaagaagatgagagggctactcgcgtgcgccacgctcgcccgccgcgccgccggcgcgacgtcgacggcgcggcggcacctggcgggcgcggccgaggcggcggaggcggagctgaagaagacggcgctgtacgacttccacgtcgcgcacggcgggaagatggtgccgttcgccgggtggagcatgcccatccagtacaaggacaccatcatggactccaccctcaactgccgcgccaacggcagcctcttcgacgtctcccacatgtgcggcctcagcctccacggccgccaggccatccccttcctcgagtccctcgtcgtcgccgacgtcgcggcgctcaaggacggcaccgggacgctcaccgtcttcaccaacgaccgcggcggcgccatcgacgactccgtcgttaccaaggtcaccgaccagcacatctacctcgtcgtcaacgccgggtgcagggacaaggatctcgcccacattggggagcacatggaggccttcaacaagaagggcggcgacgtcaagtggcacgtccacgatgagcgctcgcttcttgcattgcaggtgagcggtttctgtttcttgccctctttcatctggggaatctgttggtgattttagtttgcttaattgattgcctcaattgattatacatttcggaaagggatttagcaattgattatttctgggatttgggaatgtcatgctttgagatgagtagtcaatacatggataaaaggtccattcctgtcagatataaggtgggatgtgtagtcactagttagtggatgatggtaagcgaagaaagattcgcttcatatgaagtagtaattttcttgcctacttgaagaaaaactacatatcgtttttattagctggaggattagagaatataagctgttaggcttgtttctttctgcagttttatttgttatattgtcaacgcagggtagaagataaggcttttttcccaggatgcacaatgccttgatgtgcatatgagcaataggtagtaaggcagatgtttgaattttgatggcgtgttggtggaaacatgcggtgacttattatttgttgtttaatgtttagtggcattttcatgatcagtaaatttgatttctggttgtcaaacaatagttctttgctaaatcattattttatttgttatagtgcttttttggaactgactatatattgatttgttgaggtagtggttgagcaagtttgtgtgtccttttcttggttggtggaagtaaagcttcttctagtcctgtgggtttatttttagtgtaatacagaagtgtctaggccatattgtcacaaaacaaactttaagtttcctatgcaatcacgatacaatacacataacctggtttcccttctatagcaactaatttcatcaagaaagaggcagatggatgtctgtgcaaatgtatattcatggatagaaacattgcgcgacatattttgtactttcaaattttcatgcaagattgctgcagaacttgtccctcaattcctactccctcagcctttgtggggttttatcatagtgatcagctttcactattacagcacgtagaaatttaatttttcctgacggcattacttgtttttcacacgaacagggacctcttgctgcaccaactctccagttgctgacaaaagaagatttaagcaaaatgtatttcagtgacttcaagatgattgacatcaatggatatgcttgctttctcaccagaactgggtatgcttcatttgatcctttagccaagttgttaacaaccatgctactacctttgttttgtggaattattttgaacactatgtcaatattctgagaatttcttacagttataccggtgaagatgggtttgaaatctctgttccatcagagaatgcagttgatcttgcaaaggccctcctggagaaatctgaaggcaaggtgagactgactggtttaggtgcccgtgacagtctccgcttggaggctggcctctgcctgtacggcaacgacatggagcaacacatcacaccagttgaggctggtctctcatgggcaattggcaagaggaggaaagcagaaggcggcttcctgggagcagatgtgatcctcaagcagctccaggaaggcccaaagatcaggcgtgtcggtctcctctcgcaaggaccgcctcctcggagtcatagtgagattgtgagcaactccggggagaacattggtgaggttaccagtggagggttcagcccctgcttgaagaagaacatcgccatgggctacgtaaaatccggtttgcacaaggctgggacagagttcaaggttgtcgtccgtgggaagtcctacgatgccgtcgtcaccaagatgccgttcgtgccgaccaagtactacaaaccctcatagatttgtacaaaggatgctccttcggttgaaattttctcatgcaactctcttgtcgctgcttgttctgcagcaccgcaactgtaacttctgtaaggtctcatcttacagcttgacattttacctctgcccatctaataatatgaaatgtgatatgcagtatggatcctttcccacaggtaacccatattttgtcttcagaactggttgtctgcgttggcagttgcaaggccaataggccatgttccccgtctgcaacagatgtcgcagaaagcaaattcagcatctatttgcctcctgtgtttgtctataaactcagatgttcttcaagaaaagaacacttgatagccaaacattaaggaaatcgagacctgtagttccttgatgcaaaagagaataagaaatgtagagagaaaacaaccatgaacttgcagaaaaacagtggacacggttccaattcatagatctgggtgattctgcgtcagcatgataattccacttcagcgagaggctgaagaagctctagggaagaagctgctgaactgttgcgaccgggcctactggtgatggcaccacaggtcagtgaagcaagccatcggtttaaaggggctgtttagttcatgaaaagaaaatttttgggtgtcacatcagatctttgaccagatgtcggaagggctttttggacacgaatgaaaaaaataatttcataacccgtctagaaactgcgagacgaatcttttgagcctaattaatccatcattagcacatgtgggttactgtagcacttatagctaatcatgaactaattaggcttaaaagatttgtctcgcgatttcccccctaactatgtaattagtttttttatttatctatatttaatgcttcatgcatgtgttcaaagatgtgatgtgatgtttttaggaaaaaaatttggggtactaaacagggcctaaggtttaccttcctcttcgtctactgtccgattaaacttaggcggctgagattgagggagaaccagaggtaaaggtgtctttgcattgggaccctcatacaataccgtattgctttacactactaggtccccaaaaagttggatgtccaaatgtcgttctcgccatataccgtccgatctcacataggcggtggatattatgttgggggactcggagtaacgtggcggtgacttttcatagcaactctcgtactgcactgtatgcgtagagcataaaagttggatagctaccaacggtagcgatccagattgccttcaacatgaacaccccacctcacgcagtcacgctcacgagctcacagcaatttgggttgttaagttgtttgggggattgggatcctctgtcgtagcatgtaatacaacagatagttatagtatattgtatatagtatatagtagtccctcctttcctaaatgtttaacgtcgttgattttttaaacatgtttgaccgttcgtcttattcaaaaaatttaagcaattattaattcttttcctaccatttgattcattgctaaatatacttttatgtatacatatagctttacatatttcacaaaagtttttgaataaaacgaacggtcaaacatatttaaaaaagtcaacggcgtcaaacatttagggaatgagggagtattagaggtattgtgtatttttgaatgtgattatagatggccatatggcatgaggcccatggcccggtccaaggcacgccaatttggcccggcccaagtacggcacggcccgacagccagaccatgcttgggccgctcccttggcacggtgggctggcccggcacgtcactgatcgaaaaaaatagtagaggaacgtaaaatagacttaattaaccatataaggcgaggcccaaagacatgaggaatacaaatagacttatttccaactatatgtgcataacccacagagtttagggagcaaaaatatacttattctgtggagtaaagtgctactattcttttcttttcagaaaaaaaactgtgtttattaatcaaggacaattacatgagttacattttctagtgggtaaagttgagagaatagctagttttacataaaagcccctaagtgatgggtaaatacacttcaagaataacatatacgaaaaaaagacctacaaagataaaataaaaagcaatcaaatccttgcaacaaccacataggcgatggcaagatcctcgcagacgacgacggcaggagcaaaagaaacatgtttagttgcaatgggtagagccaaggagcatacccgaacgaggcctcttgatagaggttgaagccaccttggcccataggagaaatcatcagccacattttgcaaaacaaccgtcagagacgaattagacaaccactataagtatgtgagacttgctgaatatggagtaaacaaccgatgcaaccttttgttagacatgctagaggacaagctttcaacccaaagcaaaactcccaattgaaagcattggaggtgaacccaacattcactaggcagaaagatgacgctagcaagaacgtcaatgaggttcgccatgtccatcaagctgagacataaaaatcgaacgtcggtgaccctcttgaggtacacaaagaatgggatgaacccgagaacgaaaaagatctgactaaacctaaacctatctctagtagtgggaggaaggaaccagaaccctctctcctccacccacacacacaccacacgatgaccagaaggccaccggagaaggaaggaaatgggcaagtagtcgagttttttctgcttaagacacctagagcttttaaggcgaagggatcaaagtgctactactttactgcatttattcactgttctcctcgcatcaacaatccccctctaggttactatagaggaaccggatcattgtttaggcgagacgattcttcccctcccgggaagaaccgaagaagcgcgctctttcaacgccgcactgtcactatcagagctagggatggcaatcgggcgctgcgggcacgggtatgggtaggtgtgcccatgagattatttgtgcctgtgggtatacccattattacatgacgggtaaggatggttgcccatgcccatcgcccgcgggcgccttgtgcccgcggtcatgcccgtttacccaccacaacaaaagcagtggaacaaaaagtctacaagcttctaagttcgaatcgaacttaaaacatcaaatattctccgcctcggtgtggtatctctcctctggcggcgatagagtaagggggagagaaataataagggaaataaaagggaaaccgtagaaaacaaagaacgtggcttatgtattctagtggattttgctcttagcctacatataagttagattttgcgggtaaacgggcaaagcgggcatgggtagtgattaccaatacccatgcccatttactcatcgggcatagcttttgacccaataagatacccatgggtataaaatagagaataaacctaaccctaatagagtttttacccacgagtaaacggacaaacgggcacaattgccatccctaatcagggcgggcaccccacgactcaggcccggggcatattcagatattctcgtgccaccggtacggtgtgccaccaagtctgccagctacacggaattgggcaaatagcgcgctgcagcccaggccaggcgcacagaccacgacgactcgaaggcaacagcggcggccgcgcctgacctcctgcgctagcctcaccaggccgcgcacgcgtgtggcgtcctcgtcaattccgcgagctcattggcacgcgtgtacgatctgtcgcgccaagctaggctgcaccacgccccgttgccgcggaagcctcacaactcacagcgcaggtaggtcgatcggttgggctccgtctctgcacaattagtcgtgcgcccacatgcacgcgacactactacctgcgatcgagccagtggtgtggccgctgccgcttgtgggcgatgcgtgcaactgcacccgcgggccgcggcgccgatgacccaagtctcgcttcgcgggcgcatgcacgatgatgcgactggttgcattgcgaggtgcgggtgtcagtggtgtgtgggcgatgcgtgcaagtgcaacctgccgcagacagccacagaggagggggggtctacaagctgcgcggccggcgcaggggagaggcagaggcaggatcgcggtccatcactccactcgtgagcacgagtacatgccatgcttgcttaattaccctgcctgacatcgttcactcgccgggggtccaaacgtacgcacgccgcctcccccggcccctgccaacttatgcttcgtgtcgggcaccaaactctacgattccggagtaaattttctgactaaagttactcggatatatatcaaccttaattttgcatcctctgttctgtttgttccaactgagtcatggtcaatgcaactcgagcacatatctcgtctgatgccatgttgcttccaacatgggaatattttcgattcctatcaaaattggaactatcttgttacagcatccctccttaaatataagagattttgattgaatgtgacacattctaatacaacgaatctagacataaagcctgtctaaattcgttgtacttggataaatcatattcaaccaaaatcatgtgtatttaggaacagaggaagtaatttcaagccgaattcaagaaaaccttaaccgcgaaacactagtaccgcttccaccacctctctcctggatttttcacattttggtccttttaaaaaacttatttcgcaaatagacccctgaaaaaacttatcccagaaatggtcctttttggggcgccagagtggctggcgccgtcttcaacaggacggcgccagcctctttggcgccgtccccctgccgacgtggcggggccatgctgaggtggctagggggag

SEQ ID NO: 5228 - DNA, 61136 bp, Oryza sativa
  unsure (1)..(61136): unsure at all n locations
acttcccaacttttaaactgtatacatccaacttagaatagtttaatgaattgatggtaaaaatatgttgcgattcttttgcaggacagtgtatcgagaaccacattatctactgttattttgtaatacctgcacattaaaaataccatctcaagggccatgataaaagaaaaaactcatccaaaaaaaatgtaacatctgccctttgtttctaatattttatggaaaagaacaaactaattacagaagtggtaaaatctaaatgctttctatgcagaaaataggtaacataaacatctaccgtccctctaataccgtgagactcatgttattattagagctgctggtattttcccctgtttgtttggtttcagaggccctatgtgcaaaatacacaggttgtattggagcgggaagtgctgcctgttcgttctccaacatgaaaacaacagaagacatgagtggcctactatttggattatcttgcacgcacaacaggcctatgtggatacatagtaaaacctcgttttttgagcaactctcagcaatggatgagtccaccaaatccatggtcttatcatccttccataatctccatgcctgaaccaatagaatagggtccatataaaatcagtacagttagtttgcattatattcctcccaatcttaatgaaatttggtcgccggttccttcggccgacccggcaaaaaaaaaagaaaaaaagtttgcattatatgaagatagatcatttcaccgtacttacataggccaacaagttgggaaaatccatcagctgaggtaagctaatcttcaaaccgcttacaatctccaagagtataacaccaaagctatatatgtcagacttgactgaaaagaccccatccattgcgtattcaggagacatgtaaccgctgcttaacagttttagcaataagtaacaaatattgtttcaggaaaggaaataaatatcattctaaacactaacacataaatcactcactatgttccaacaactcggttagtatttgcttcttgctggtttccgccaaagattcttgccataccaaaatccgatatcttaggactcatatccgcatccaacaagatgttgcttgttttgagatctctatgaattatagttaaccttgaatcttggtggagataaagaagtcctctagctactcctttgattatcttgaaccttgttggccaatcaagaataaatttacttgctggatctatcaacaatggtgaataatgctaattagtaagcattcagccaattatatctggatcatgtggtaagtttctgaacagtaccaaaaaggaagtgatccaagcttttgtttggtaagtattcataaataaggagcttttcatctccatgaatgcagcaaccaagaagcctaacaagatttttgtgctgcaatttggcaataaggaccacttcatttgtaaaatgctctaatccctgtgtggaacctgtactgagtcttttaaccgcaatttctttgccacctcccaacttgccctgtataataacatcattttagcatgataaaatgttgtaggtttctccactgttgcgtttgtctgtgtaaattgttaccttataaaccttgccgaaacctccttctccaagcatatttgaatcactaaaattgtttgttgcagtgacaacatcttcaaaattaatacatgggaattcctgattttgctcatatacttcatgagaagctctaaagtttcctagcatcgctctattctgattttcattatttctcttttcacctaataggaacatcaatatcataagtacaattacaggaggaaaacatgatatgagtcggtgttgagtattggctcctgctgtaccttttgatatccatttccagacaaggtatatgcacgtgagcattagcacgcatgctataatggggactacaaccttgactacatacctgctctttttatgacctattaagagaaatgaagaagctttcagaatttctaaccatagattgcaggtatatgcatggatgttgcttttaattggatgttcaggctatctaagatctttattgtcatttgtcaccacagggataaaaggtgggcatacctggagagtcggccaaccggaggtacaagttgtcaccaagattgttcctcgccatgtcaacaagctcaccaacccaaagcaagcaccttgactggctggctgtggtaccgggagagccggttatggtcaagttggtgtaagcataggccgtgcatgagcagtttcggctacactcagccgcgcactcctcaaagcttctgtcctggacataaaagaacttgtcagggagcttcattccaggcatggtcatgaaatggttcccttctccacatcttaattgttgctttctccggcatccacttgaagagttggagccgttaggctcaaatccatccgggcactggcatcttgggatgaccgacgtgaagtcacagtaaccgaatgggccacacgagccgtagggatcacaatcgccaatggctgctgggcgttgagaatagattgcccatgatgacgagttgacgttccaactcaggagcctgaaggtgcccgtgtagtcaagcatgatgcgcatgtatggtgagccatcagaggtggtgtagataacatagaactcatcctgtgtgtttacatatgtttggtacatgaaggaggtgctgctgccatatgctttgccggacacccacacactgtcaagcacaatggagcggtaatatggcttggtcccgtgccagacgaagacctgaaggtctgagctggggtctccgctgcatgagaagtcccccgttgttggatcatcaaggcccttccaagctacaagccgcatgcctacttgctccttgtacctcagcagaatcttcatgttcgacagaatggtgtcagttgggtgatcgaaactttgccatatggttacattgtttgacagccggagaaccaagtttcctgagtcgagcagcactgcataagctccgtcacctccggtgacatttgccattgtcgtccagacggtgcgacctttggaatctgacaatacaaggtcagaactattgctgatggcgagcatcgctgatgaaggtgtggtgattgggttgtcacggttagcaacccaaacgtatgttcgctctgggatgttgttataccatatgccgaggaataagctctggttggaagtggctggggagaagaaaccgagtgcaaagacgccgctcttggagacgagcttgccgctgggggagatcaatcgatttacctgtgtcagctgatcatcgcatttgcagaaagagatgagcagcaagtagatgagaactgggaggtaggccatattcatctggcccttgttcttcttttttggacaagcaaggcaggagctctgcaaaatcaaaattagattatgcgattaaaaagacacagagtcttacaaaagaagagcccgaggagaggcgaggcaactggaaaagaagatgtacatctgataaaaaggagaactgctctcgtagctcttgaaattaccaggctaagctctgctaagctctatctgatttaactcctgcacaattgggcagctacttttgcttctccctctggctttggtgttggaaattcttctgttccgttcctgccacaccaaccaccaaggttcttgcattcatcttccttttccttccatactttggctctaaatctcattaggtcttgttcttctgtttcctagttgccttcaaaaatgtaaatgtgaagaaatagagcatatgtatccaattatcagatgcatactagatgatttcccatagtcttagagcatggttggaccgaagaaagcaaacatacggccaagacatttctgtccttccagatcaggatgcacgcgcaaagcgaaaacgaagttcggatacgacgagaaaatcaacgagagcgaaaccgttatactgttatttttttttcctttttccttttttacctttcccgggacggcaaaagaacctggccagaacagtacaactgtaactaataaaacaaggctgccaacaagtacaatagatcctgttaaaaacggttacagcaaaaggagaaatctctagttaatttctgaaagtttactactccctccaggctgataatacttgtcgttttggataagggtgtagtcaaactttataatctttgattataaatcatttttaaaatatttgtcttttaaatatggtgactatatgtatagattagtcttaaaaagtactttaatataatcgtatatttgttaacaattttatacatattataatgaaaaataatggtcaaagttgttttttagagaccgtgcccttatccaaaacgaaaagtattatcaaaccggtatgaaacaaagaaatcagcaatcagggcgatttggccgtatcagtaataagtaaatggaatatatgttccgctcaaaaaaaaatagaaatcagcagtcaggcgagacgcaaaattccttcttgatcttctaacctccagactccagaggcgtattggattcagattggaagatttttgcattaacgttgtttccaaataagccagaagaccaaaatgatctgagagttgaacgcggcacgttgatgatctgcgtcatgacatcgacctcactccacgattaaccaaattccatttcatggcatcggtagcgctgtactaaccacccgtcagccaacaagtctatagttgacgagacctcatgggaagtcctagttacatacctcatttttcgttaagaaacattaaaaaaacaaaataacttagtacaggtagcttaacacaaaatagtttagagcaaatagctggcctacaatatatatgtttttttaaaacacagtataacgttcacacactcacctctataaacacatatttggaaaactgagacaacacatatgatttttgcacgggctattaaaatagattattttacatagaacaaatagcttagaataaatgatccaaactatttgaaaaaaaagaagatcgagcgtgggagtaaataacatgtgacaaaaattggtgaagaaaaaaaaaagaacaatctgtcgccgagacctattttcttccgtcaaaagccgaaaagataaactatcgctacaaaactgaactctcgatagagatcgagaaaagtcgacggcagcgaaacctcgcggcatatgcagatatgcttttgtccttgccatggcgaagtaatctcatgctcttgctcagcactcagcaggtggaataagttcactttaggtccctctatttgtcggttggtccgattttcgtctcttggccgcaaaaccggatacgacccattccccaacttacgaaaaccggacaaacgagatcccttggcagtatagaggacggtttttgccgacgtggcgcctacgtggcttatttaactagatcttcatcccacatagtgttaaggtggcgcttacgtggcaattttatcccanaaaaaaataaaaaccgtagaacccatatggctacatgtcagctacatataaaaataattaaaaaaggtggggccatgtggttccacatgtcagcctcctcctctctatcccctctctccctctcccttacgctgaaggagaaggacgagcggcggcgggcggtggacgttgctcctggccgcgggcgctaccgacgacatgggcgtggtggcgtcggggcggtggcagatggcggcggcggtggagacgtgcgacggcgccgtcagggagtgcgacgtggacgacgaggaggaggtggaggaaatggcgttgatgggggcggccgccgccgccgacggcggggagacgctgatgccgcggccgacgaactggtaggtgagctacgcggtgctggacgccaacaaggtgtcgtgcaataagcgcggtcagtcctactaccagaactgcgcctcacagaaggccggcaacccctaccgccgcggctgctccgccatcacccgatgcgctcgcaacaccaactgatctccctcttccttcgccggcgtcactgccgttgccggcggcggcaagtgaatacgctgctctcatatgtgtatgtacatatcgactctatccaaagcgtacgtgagcaactgctactgctgccaaaaaaaatcttcagtttctctctcagctcgatctatacaagccaaagtggtagcatgcattatattattggcctgaacctaagaatcttttaaagagtacagtaagtaacaaggcattcacatctttcctgtaaatggcgccctggaagtagagcagcgtcggccggtcatcgtagccggcggagtcgttggccagcgaagttggggacgacgtgccggtacggcgcgatgacgtccttgtcgaggccaacgacgctgggcgggtacctcccgaagtcgcagagcacgaagacgcatggccagagcttgtagcgcgcgtcgagcatcccgttggggtggtgcgcgagcacgacgtggtccctcccgccggacctccgccactcggggcgcgcggcgaggtaatcgagcagcctccgctgcaacgtgcgacaaccggtctccccggcggcggcgccggccgcccccatcaacgccatctgctccaccttctcctcatcgtccacgtcgcactccccgacggtgtcgtcacacgttgccgccgccaccgcggccattagggctgtcaaaaaagctcgagactcgcgagctgctcgagctcgactcgtcctaggctcgattcgagctcggctcgagctccaaacgagccgagcccgagctgtcccaaagctcgtgagctttgtcgagccgagctcgagcttctaacgagcctagtaatatatgattttttattgctatttaataaattggtagatcaaatatgttatttgtatgccttgtattagcatcgtatgtttattttattctttttcctcttatactaatatgataaacaataaattaaatttttttaaaaattatcctttgaaatatacattgttctaattaaaaatcgagctcgatagtcgagctcgagcttgatcgagctcaaacaggcttagttcgagcttatatcgagctcgagcataggcaggcaagctcgctcgagctcggctcgttgacagccctagcgccgatgtcgttggcggcgcccgcggagaccgggagcaaggccaccgtccgccaccgctcgcccttctccttgcaggcttgcagtgtatgggagagggagagaggggatagagagaagagggaggctgacatgtaggaccacatgggcactacctttttaaattatttttacatgtatctgacatgtgggtcctacggtttttattattttttcgggataaaattaccacgtaagcgccacgtcaacgccacgtgggatgaagacctagtcaaaggagccacgtcggccaaaaccgccctccatactgccgagggacctcgtttacccggtttcgtaagttgggggacgggtcgtacccggtcttgcggtcaagggacgaaaatcggactgaccgacaaatagagggacctaaagtgaacttatttcctcagcaggtagtcaatggtagagttgggctgtaaatactcggcccatctcgatgatgctggaggtggtgctcgtcatttccttataggcttcatggattaaatcacacggatcgttgatggaactaaattataaggcccgcgcggnaggcccaaggcccccccaaaggcccccgggttaaaaggaaaggttttaaagaaggccaccgagccggcactggggcggcccatccgaagtggaggccgttccttccgaattcccgatccgctactgaagtggcgaagatgttgcatgccaaggcgcggcgaggcatgagagcgaacgtcctccggccagnacgtggaggccggatcgagaatcaagccggtggcggttaagcagggagcagcgcgcatcaagggaagaagcgcggcaggtctctgttgaacttgcacacctctcaaaggtgcagtgcctatctaatctctaataccgattatagggttctaaccctagccaaagattgggccacgtggcgtctcaaaaatcaagttttgcgcctttgaaaatatgccacgtgtctcctttctctcctcccccaccgttcgatcgagtatcgacggttaaatttcgctgcgatggacctctttataaaactgaggtttgaaaaaaatgactactataaagaggtagggggtcttggaaatgtaggccgacacaggtcgtagctgcagtgccgaagtacctggcacccccacccccacccccatccccatgcatgcgctgcatgcaaacctcgggtgattatccatctaatccatacaattagctcattaattagttgcaagttgagcctatatctagctgtccacctgagttaattaacatatcaaagcgatgtggttgcaagtctccaaaactaaaaaggatgaatagaaatgatgtcgtgtcattcaagtattgagtaaagttggtgctatttagtgacatagtttaaaattggttctttttatgctatattaagggtatgttctgattgtagccaaaataaaccttaccaaattttggcattggcggcaagttgataatattcccaaaattttggcaggatttcttatgtatttaccaaagtttggcaacaaactaaacgtaggcacttttttaacaactttacccaaaaaatggtatggctaaaaatggcataaatctgaacagcccctaaagtacattcagactcggacatacactctccatcctaaaataagttcaattttatatatgaatctagaagaatgtgttgaaatatataaaaaaaatcatatcaacaatcattttatgtatatattagtgcaaacgacaaataaccacaaaattcaaaatataattatacgaggggcgactacgtatattagagcgaacaaaagtcgactgggcgtgaggccaatctgccactctgcaggatttaagccaccaagattcacatcattgtctaccgaggcgttgatgagttcttacgtctcgtgccaccacccctatctctaaatcctggcttcgtcattgtgtagctggatcggtcgacccaccctgtctaggtacaataaatctggttaaggaaaggaaaacaatagtaggattgcatatacactgtacgactcatgttccctaatgagaaaccagattcgagcgtttgtcaatgataaaccatagaattctcctttaactgcattttctaagaataaacagcatgacatttatggtgatgccatcctattacgatatccttttcttggggtcaagggcaacgtacggtatcctcacttatctgccatgcatctctttttaccatggccatgaagatgctctgccctgtatcacggtaagccgagaaaagggctgatggatgagaagataatgcgcggccacgtatcatcacggtaagccttctttgcaggttgcaccaccttgctcgtctatggactcagctgctagtcagccttttaattgcccagagcaaattatactttggttcatattttatttctaaagttttagtttgcacggcaactttttaatattttccgtttgtactctcgatttatagtcaataaagtcattttcatccgtcgttagtaatccgtaatctgttgagaacgcagcctgttgtgctgggtttttctgtctagtaggtttttgaacgtacaggttttcctaatttcctttgtgtttcatcccgatatgacggacaaaaaagtatctgcatacacgtcgcttcctagttccttcggtctcaagattctggaaacaatgtatacgtacgtcagtaacatatatactgaatgataacaatgtatatttctgtgtgcttcgtgcttcgcaggctcgcagctaagcgaagaaacaaggcagaacaaatatggcctgcctgagccacaacctcccagttttcatccacttgctactactaatctctttctgcagatgcgatgaccagttgagacatgcgaagcgactaatctctcctagcgacatgctcatctccaaaggtggagactttgcgctcggattcttctccccggccacctccaaccagagcttattccttggtatatggtatcacaatatctccgagcgcacctatgtttgggttgccaaccgcgacgacccgatcgctgcatcttcatccgcgacgctctccatcagcaacaattctgctcttgtattgtcagattccaaaggccgcaccctatggacgacgatggcaagtcccaacagtattgtcaccgaagacgacggagtttacgcggtgctgctcgactcaggaaatttggttcttcggctatcgaacaatacaaccatatggcaaagctttgatcaaccaactgataccattctgcccaacatgaagtttttagtgagatcctacggacaagtcgccatgcggttcatcgcttggaagggcccagatgacccatccaccggggatttctccttcagcggcgatcccacgtcaaactttcagatcttcatctggcacgagacaaggccatattaccgtttcattctgtttgatagtgtctcggtgtccggtgcaacatacttgcacaacagcacctcttttgtctataaaacagtcgtgaacactaaggatgagttttacctcaagtacacaatctctgatgattcaccatacacgcgcgtcatgattgactacatgggcaactttaggttcatgagttggaacagcagcttgtcctcatggactgtcgcaaatcaactcccaagggcccctggctgcgatacctatggctcgtgtggcccattcggctactgcgacctcacgtcggccgtcccaagttgccaatgcctcgatgggtttgagcctgttggctccaattcttcttcaggatgccggagaaagcaacaattgagatgtggagatgaccattttgtgatcatgtctagaatgaaggttcctgacaagttcttgcatgtccagaacagaaacttcgacgagtgcacggacgagtgtacccgcaactgctcgtgcacggcctacgcctacaccaacttgaccgcaaccggcaccatgtccaaccagccaaggtgtttgctttggacaggggagcttgccgacgcgtggagggacatcaggaacaccattgctgagaacctgtacctccggttggccgattctactggtatgcccaccctttttcccctgcgacgatagaatagctcttagattagcagtcctgaattttgttcacttgtgttgataggacacacttcaaactcaacagaaagaaaaaagaatctagtgaaggtggtagtctaaatttagcatgcctgtttttgaacacgaccaccaggttactatctcccacaagcttgcaagctactgtatgtttgacgctgtaacttctgttcacccacattcttcacagggtcaaattctacagtaaacagaaagaagaagaggcacatggtggtaaatattgtactcccagctatagtgtgcctactaatactcacagcgtgcatatatcttgtcagtaaatgcaagtcaagaggtactataagcagtaggacctgcttaattgcaaagcgtgcatatatcttgtcagtaactgtaagtattgacattgttgattttactataaggcgtccgacaaaacaaggaaaaaacgaaaagacctgtcattcaacagttgagcactattcatgatttgtgggatcaaaatctggaatttccatgtattagctttgaagacatcactgctgcaacagacagtttccatgacaccaacatgcttggaaaaggaggttttggcaaagtatataaggtgatatataattttaccttgtcattctgtcaatgatatgaggaatagcgatgtcatttactcctattactttaataatgatgaaatcacacagggaacattggaggatggcaaggaaattgctgttaaaaggctcagcaagtgttctgagcaagggatggagcagttcagaaatgaactggttcttattgccaaactgcaacacaaaaacttagttagacttcttggttgctgtattcatggagatgagaagctgcttatttacgaatacttgcccaacaaaagcttagataaattccttttcagtatgttcgaccaatccaaagaaatactcttgcttggttaattatttgtttgattctactatcctaactgtgttctgggcagatcatacaacagaggctacacttgattggctgacaaggttcaacattatcaaaggggtagcaagaggacttctttatctccatcaagattcaagaatgaagataattcatagagatctcaaagcaagcaacatactgctcgatggagagatgaaccccaaaatatcggattttggtatggcgaggatatttggaggcaatgagcaacaagaaagtactagacgagttgttgggacatagtaagtaacttctgctcttgccaaccaaaattattcaaatacccaggttctggaaattattaaacttctttcttattcaaatagtggttacatgtcacctgaatatgcaatggaaggcaccttttcagtcaagtccgacacatatagctttggtattttgcttctagaaattgtaagtggattaaagatcagctcacctcatcatcttgtgatggattttccaaaccttatagcttacgtaagtgttgccggtacccaatgcttcaaaatttaacaatcaaagaacaaacataacattgccagaacaaatattgaagttattctcttgtttcaggcatggaacttatggaaagatggaagacaaagggattttgtggacaaatcaattttggagagctgttccctcagcgaagtttttaaatgcatccatattggactcatgtgtgttcaggacagcccaaatgctaggccactgatgtcattcgttgtgtctatgctggagaacgaggacatgccacacccaattccaacacaacctatatattttgtgcagaggcattatgaatcagaagaaccaagagaatactcagataaatctgttaataatgtgagtctgactatactagaaggccgctgaataaatgttttagcataagctctaaacagatggatggttgtatagtacattagtacggaatactttctccgtttcacaatgtaagtcattctagcatttttcatattcatatagatgttaatgaatctaaatagatatatatgtctagatttattaacatcaatatgaatgtgggaaatgctagaatgacttacattgtgaaacggagggagtagtaaacaatgaactgaaagatattggaaagaatgcattccgtaggtggttgtgcgcttgtgctacttgtttttttctcatctgctttgctctatcaatatattaggaagagctaatttatgttcaaaaattgaatagatactcctctaacagaataatgattagagatccacacaagtgatcatttgccatgcgtcttttcttttgtgaaatatattgagcaggtatttgaaaggtcatctaattaaggatggaagaatctatccaaggcgaagtgctccagcagcgcttggggtctatgtttatgtgtggcgggtggttccaatccccgctctacctcacgggcttgactcatgcatgaatcagccatccccagatgcccaacctagaaccaaaaattggaggcttgggtcgaaaaattagttaaaatcatgcctgcccgtgctgggttcataccgtctgcaccctggacgcgccgccgctcgccacacgctctccctcctctccggcgcgcccgtgcagcggatgatgtcgcgactcgcgaatggccgtgccgcacggagtcggatcaactcaatccgcatcgaaaaatcggaggtttgggggggagggggggggtgtccggaacttggcctgctccgtgagctcgcgcaaccgccaccgcctgcatcctcgatccggcctccccgtcctggccggcggccgctcgctctcccgcctcgccgcgccatcgtcggcaacatctccgccacttcgcccgcgccgtcggcttgcagtggcggatcgcctcctcgggtgggccgccccagtgccggctcggtgggctcttactccacggatgggctgactccggcgggcggaggcctcattgaggcccattagtccatcaacgagctttcaccgacttgggccggcctgctttgcctcacctcctgccaacacaggcccccactgatgggtttgggccataggtgctcgagatggtccgaagccgccgaatgcgcctctaccccagttaggtgttcggccgccgcccgccggagccaccggagtagagggcaccgagaccgcggcggggcggagtcgcggacctcctggggttggttcgtccgccactgcgatggcagtggtacgccgcgaggtggtggaggctttgcagccttgcagcctaggagaggaaccgctagtggatgcggcaatggatcagctagcgcttacttccccatccctgggagcgagaacacatgcctgacagagtggtggttgcaggccagaacatattttcggaagtgctacaggacaaacttcgacagcgcttgtatgctgatttgctggtagatttggaaggaaagaaatgcgcgtgttttcgaccaaagatcgagaagccctaaccagttagcagaggctatcaaagaagagatcttagtgtggaaagaagcaggctatttcgagaattgcagttcttagttttctttctgttgtgttgacgttccagttctttagtttgccgggctgtggttcctgccacagtctaattcgacacctgtcgttgcaagcgaaaactacttgtactttgattttattcctcctaatcttaataaaattggtcgccggttccttcggccgacccggcaaaaagaggaaccgctagtgctgacgcgctgttgggcaagcggcggcggcgcagccgccggcggcggctgagggggaaccgaagcagacgcgcaacctccggtcgtgacgtggtttcgccgaggaggttcaggttcaggcgtgccatttcaacgcccctcgagtgcaggtactagtactactactgattaaaacagtgatgaatcacatagatgcggattcgtattcttcgtttttttatcgcctagtgcaaattgcaaaaatgcacccaggtacccaaccttccagttccaataatttagtgaaatttgacgacgaaaggattttacctttttcttttcgtaaaacatatagggcgtgtttagttggtgaaatgaaaatttttgggtgtcacatcggacgtttgaccggatgtcggaagtggttttcggacacaaatgaaaaaactaatttcataactcgcctggaaactgtgagacgaatcttttgagcctaattaatccatcattagcacatgtgggttactgtagcacttacggctaatcatgacctaattaggctcaaaagatttgtctcgtgatttacatgtaaactatgcaattaatttttctttttatctatatttaatgctccatatatgtgtccaaagattcgatgagatgtttttgagaactaaacaaggccataatatccgaaaactgttgaatatgaatgataattcataagcccaatgacccaaagagcaatcacattttcactgggacaattttgtttcctgtaaatttcattccgtagcggttaattctataaccagctcattctgaaattaaagagggacaatcatatgatcagatcaagtgatgaattctgcaacaagttgattctgaatccaaacttctaacgcccctgtagtgtggtaaggctcatgctgtttacagatttgttggcgtcctgtctcgtcccttcggccatataattccttggcacgaaatatgcaggttgctttggagtaggacgtgctgtggtctcattctctaacatggccacaactgatgacatgaatggtctagcacttgggtcttcctggacacataacagtcctaagtggatacagagcaaaaactcgctaattgcatagctttccagaataattgagtccacaaaatcctctgcatttccatctttccacaagctccaggcctgaacaaagagaagagagtttctaattagtgcaaaactttagctgttgaaactttgtgcactatatgtcatacaacttacacgggctataaggtttggaaaatccattgtcagatgaggtgagctgatcttagagccacttataagctccaagactaaaacaccaaagctgtaggtgtcagacttgacagagaagatgccttccatcgcatattcaggtgacatgtaaccactgtttaaatcatgtcaccaactgagtgtaagtagtttgaatgcgttcaagtatatagaagtttgtattttatacacaggtagttgaagagttactcactatgtcccgactacatgcttagtgtttgcttgatgctggttgctaccaaagattctcgccataccaaaatctgatattttggggctcatctcctcatccaataaaatgttgctggctttgagatctctgtgaattattgtcatccttgagtcttggtggagataaacaagtcctctagctactcctttgattatgttgaaccgtgttcgccaatcaagcatagacttttttgaatcatctacgacggacattatgaaaggaaacttattgttgttcaggctttgggaaccctctcggcctctcccaccaaaagtgaaaaaggtaaaaagagaatatataattattacataccaaaaaggaagtaatccaggcttctgtttggtaagtattcataaataagaagcttctcttctccatgaatgcagcaaccaagaagcctgactagatttttgtgctgcaatttggcaataagaaccacttcatttgtaaaatgctctaccccctgtgtggaacctgtaccgagtcttttgacagcaacttctttgcctccttccaacttcccctgtatagtaaaattattttaacaggataaaaattataaggcttgtccactgctacaactcttagtgtaaattgttaccttataaaccttaccaaaacctcctttgccaagcatgttggaatcactgaaattgtttgttgcagtagcaacctcttcaaaattaatatttggaaattctaccttctgctcaaaaagttcgtgagaagttgtaaagtttcctaacactgttctcttcttattttcgtcatttctctgtttgcctaataagaacatcattatcggtcagtagttacaggaagactgcatagtgttagttagtattgagtattgaccctcactgtaccttttgtttgccacttcctgacaaggtatatggatgtgaatgtcagcaggcatgctataattgggactacaaccttcactacttttttgttctttttgttggcttcagaagtgtaccctatcaagaaaagtgattttttttctcagaattccatgtacaagctatctaagggtatcatcaatgtatatggcaaaagtagtctatatagatgggatccacataaataaactttacctatagcaatcctcacaatgtatatggatacaatgtgacattaggagaagagagagaagtagagatagataatattatttatgtcatatgggtagtccatatgcatatggataccttttgctattttctttatatagactagttgcacaatattactagatgactgaatggaatagtttattccctatggactacttttgtagtacattgtggatgccctaagagttatattgcaactgcaggggaaaaaaggtgggcataccaggagagtaggccaaccggaggtacaggttctgaccatcaccaaaaccagtcctccccgtgtcgactagctccccagtccaaagcaagcaccttgattggtctgccgtggtgccggctatggtcaagtttgcataagcataagccgtgcacgagcagttgcggttgcactcagccgtgcactcatcaaagcttctgtttgggacaggaatgaacttgtcagggaccttcattccggacatggtcacaaaatgattcccatctccgcatctcaactgttgctttcttcggcatcctctcgaagagttggtggtgtcaggctcgaacccatcgaggcattggcaccttgggatggctagcatggcatcacagtagccgaatgggccacatgaggcgtaggtatagcagtcgatggtgctcgctgggcgttgtaagcgaactgtccatgatgacgagctatcatcccaactcaggaacctgaaggttcccatgtaatcaagcatgatgcgtgcatttgctgagccatcagaggttgtgtacctaacatagaattcatcctgtgtgttcaccagagtttgatatatgaaagaggtggtgttgctgccgtatgcttcgccggacactgacacactaccaatcacgacgaagcggtaatatggcttggtcccatgccagatgaaggcctgaatgtctaagctggggtcgccactcaaggagaattccccggtggatggatcatttgggcccttccaagcgacaagtcgcctgctgacttgtgccttgtacctcagcaaaaacttcatgttgggcagaatggtgtcagttgggtgatcaaagctttgccatatgattgtttcgtttggcagctggagaaccaagtttcctgtgtcaagtaacgctgcataagcaccgtcgcctccagttatggtgatgttcgttgtccaaagagttcggccttcggaatctgacaagacaaggttagagctattgctgatggcgagcatcacggatgatgaaggtgtggagatcgggttgtctcggttggcaacccaaacatatgtgcgctgcgggatgttgtggtaccatatgccaagatataagctcttgttggaggttccaggggagaagaacccgagcgcaaacaccccgctcttggagccaagcacgtcgcctgggtggagctgctttgcttgtgtcagctgatcatcgcacttgcagaaggagatgaggagcaagcagatgagaaaggggaggcatgccatattcatttggtttgttcttcacttgcctgtgactgtgaagcctgaagaaataacttgtctggtcatcacattcactgattcacaaatagctttggagtaattcccgtgagtcaacgtatggccgagactttttattcgtctacgggtctatgagtggaggtgcacgcgcaaaggaaagtgttgctacgaaatcatactaagggtttgtttagttcatgctaaaattgaaagtttgattaaaattggaacgatgtgacggaaaagttggaagtttgtgtgtgtaggaaagttttgatgtgatggaaaagttagaaatttgaagaaaaagttgggaactaaaatcaccttggagagaatgagaaaactcgtaaaagttgcgagaagtcagcgctgcatgcgtgcgtaacccgtttagttggtggcattgacgcatgatgagtgcattatgagggtggagctgctttgcttttgttagctggtcatcacagtacacttgtgtgcaaaaacttcctacaacgatttctgtacacatgattgctgaagcttaagaatagtccgaaagacctcaaggacacgagatggattttcctccgttcatcagaaacccgaatttttcagtgttgacggcgttctgacgctgggacatggggataagtacactaatcaacacaggaatagctgagaagaaggttcagggggccacaaacaacagcaaactctctctatccaatgcgatttcttgtgagctgtgacatgccgagccaagcacgagacggtcagttcaggctcggcccaggtctgtcgtgtgaggccggctctgtgtcagatactacttgtgaaactgaaggctcgcatctgctgttgatcatgggattcttgggcatggctatctgtgaactgtatttggttagcattgagacaacctgattcatggtaggcctgtcatcgggagattgctgtacgcagagaagcccaatttggatgcacctgtctagcccaagcaggagatcaggctcaggtttgatcagtcctaaatcaagaatgtcctcgatctcatgctgtttccaagactcccaggtctgccaaaaagaaaaaaactcacttacatgatagtgcccatttgcattttctaatagctatatttttcctttcaaaaaattattaactttgcctggaaattcattattttttttctaaaagagtagtactgaaaattatgaacttttatgtcatttttttgcgggtgcttagttcagtctgttggcactggcttctcaacttctgtttatgtgcttatttgctttaggcaaatcaattgtgcgacttatatgttcacttacctcacgaagaaaagttggtaatgtcctgttccttttaccactgattatctctagcaacacaactccaaagctatacacatcgcacttgagcgtcagatttccttgagctgcatattctggagctatgtagccccttcattaacaaaaaaaaaaaagcttgtcggtcagttgagacctctaaggaaaacatgcagaaaatgccagaaaaacttgaataggaacattagctgaagtaatgaagttaaaaatcatacgctgacagaactaatgttggatcagtctggtcgttgataaacagcttggcagtgccaaagtctgctaccttaggtctccgattgtcatctaggagtatgttggatggtttcagatccctgtgaataactttcacgttgtgaaggtactcgacacctatggcgatcccgcggattatgtctaatctttgcacccaattcagagaggctcgcagtctacgatcttctcctgtcagttccaaataggcccgtgtgataagcatgcagaagatcagagctttacaggaatatacagaagataattatgcatcacatttctacaaagattaacagactacagtgagtaatgaatttgtttttttggttaggaatgggtaccaaatatgtagagatccaagctcatgttctccatgtattcatagactagtatcatctcgcctccttcttggcagtaacagagcagctcaacaaggtaggcgtgccttgtgttcgacatcatctccacctctcttatgaaatcctccttgcgtttgtcagtaacaagagactgtgtgagcctctttacagcaacctttctaccactgggcagcttcccctggtgattgtaaaatcagatgtttcaatgcagactttgcatttcaagatttgtggtagtgaagtcaaatcgtaacttagtttgcgtacataaaggtgtcaaattgttgaaaaaagtgcagacctgatagacaatgccgaaaccacctctgccaatgatattgctttcagagaaattccctgtagcctccttcacactagacagattaattgaaggggcagccaaagcaggattaggacgagcatgaacagcagcagtagcagctggaacgcccgcatcatcatctggtgaatataattgcattgatttacaccttcttgtatatcaaagcactcccttcgtttcatattataaatcgttttgtttttggtaaaagtcaaactatttcaagtttaattaagtttgtagaaaaaaaagtagtaacatttttaactcaaaacaaatacattatgaaaatatgttcaattatatatttgatgaaactaatttggtgttataaatattactatatttaactacaaacttagttaaacttaaaataatttaactttaaccaaagtcagaacgacttataacctgaaacggagggagtagaaaactatggggatgattttctcctctctagacgcctcccgtttgtagcacatcgtcaaatagttattaaaaaaacaaaagaactataaaatatattacatataaagtcaaattctcgtttgtgcacgtcgactaaatagttatgaaaaaatataaaaaatagtacatgtaaagttaaattttaacctctacaaattgtagaaaacaacaaattaaagtattcatacattagaagttttttttttataatttgtagaagtttaatttgtctcatggagcaatatatcatatgttaatctatcttatcaatttttttcatgactattcagttgacgtgggagaaacgatgggtcatcatctcaaggggcaaaaaaaatcccagtaaactgaacaaaatagttatcaggaattcagactttcagagtattacgaattgttacctgatactctaggcctctgacgcctcctaatcacatataggaggaccaacaaaataatgagaagaaccccaacaactgaagcaatggatgcaccaataaccacagcagctggaggccgccgttgccgaataccatctttgcctgtcacagttttttccacaaatatatcagcactcactctcactcatttcatcagcattagccttgtcaaatcttattagatttgctcattttgaaagtttttaccaaaaaacatgcgacagttttttttagcaatttcgtaaaaaaaatacattgctacctgcttcgtacctaactcagatttcgccaacctcacgtagagatcttgtcctccatcgacgtagcgcaggtcgacgaggtcgtcggcccagatgatgcatccgctcccggcgccgcagccgccgccgcctccgatgtcggcgggggcgtaggcgacgcacgagcagttggcgaggcaccgcgcccagcactcctccaccgtgacgcgcttgtccaccgtcgcgttatgcgcgtcggggagcttcacgccgcgcaccgtcaggaagccgtccgtggcgcagcccagcgccgcgtctcgccggcacccggcggaggtgtccctcatcttcttccacggcgacggcgacgccggggtgaagccctccacgcagctgcagaacgacgtcgacgccgcgccggcgtcgcacaggccgaacgccccgcacttgccgtagtcgtcgcacaggtccctcggcccctggaagaagttcttccatgcccggctgctcggctcccacaccagccgctggacctcgccgacgcccgtcaccacgaggcgggagaacggcgcgccggcgttggcggagtagccgaaggtgatctcgccggggctcaccgtcagctggtagctgaacatgtcggagtacgtccccatctccgggatgccgctgaaccacagcccgttccacggccccgtccggtacacctcgccgtcgccgtcccagagcacgttctccggcacgcccttcgtgtccgtcctgtaccggtagttccccggcgacgggtcgccggacgaacgccacgacgagaggtaccactcggcgccggtccacaggttcttgccgatcttcatgccggggagcagcgtgtcacacgggtggtcgaacgactgccacacgacgacagcgcccgcgccgccattgccgcggtcactgacgacgaggtttcccgactcgagcagctgcgccgccatggacgcgccgcccccggtcgtcgtgttcgacgaccacacgacgtggccagagccatcgagcaagaggaggctccccgcgtcggtgatcaccagcacgccggaggtgtccgtgagagggcggtcgcggttggcgacccagcagacgacgtcgtcggagacggagaaccatatcccgaggtatctccggctggtgctcgacgacgaagacgacgccggcgagaagaagcccagcgtgaatgagccgccggcggagacgagcctctcgccgtcggtgatgttccggcccttgccaagagtgtcacctagctctgcacctgtagttgttctgccagaattagaaaggagaagcatgcatgataggatgattaggaacattgagctcatggctgattagtagagaaggtaattaaccacctggatgcttaagctagatttgcatctctgtcgtctacatatagactggagattgaaagctggtatcacttggaggttaacctaatatttatatggattggcatttggaggttaagcagctgacttggtcatcatcgatttttggcaaaagagaatatacaactgatgagtgtgattgtatatatatttgtattgtgtctcggaggataattgtaactgcagtctgcaggtagcgtctgagtcataactagcaattacattttgtagccaacctgctaatttgtttacccatgaacatttttgtcttctctgcaagcatatacttcctccgtttcatattataagtcgtttgattttcttatcaaacttttttaagtttgattaaatttatagaaaaatatggtaatattttcaatacaaaacaaacatattatcaaaatatgtttaatattaaatttaatgaaactaatttaatattatagatgctatttttttaaaaaaaatgatcaaacctaaagaattttaacttagggaaaatgtcaaataatttataatatgaaatggagagtacagattgattcaccgtttggactttggagcatgcgaatggtcagtagtcacttgcactgctgcagaatactagtagtaccataattgtcaatgagtgtaaaaatattttatttgagttgtgtgcgaggaaggcattgtcttccgagtatcttgtatattcttgacaacttgcagatttgaatggcaacattaaaatcgggagtactatataaaatgagacaaggtagttcagttcatgcctgattggcaaaggaaaaaaaaaggaaaagaaatcggcagaaacttctgtttggctcaatgattcgacacgtatagaagctagaacagcacaacccatatactccctccattcctaaatatatctgacgtcgttgaattttttaaacacgtttgaccattcattttattcgaaattttttttaaatatataaaaatatatgtatacataaaagtatatttaataataaataaatcaaatgataggaaaataattaacaattacttaaatcttttaaataagatgaacggtaaaacatgtttagtaaagtaaatggcgtagagacggagggactatatatataaccctgtacagttgtactacgtgagatcgtcgtcaatgtcggtggcgcccagcagctccgactcgcgcaacggtggcctgcttctgccgccgtgaacccctggcctcttgggacgatccacccgtgagctcttgctggtcagcatcgcgacgaccgccgacatggccggcctttcctccggcgcatcctgcacgcacaggagcccgatctgcacgcacctcgccagttcatcttccatctcggtgtgatcaggccctgagactgagagagggagaccgatcatcgcgtcaaggagggacatcaccctgccctgctcccacagctcccatgcctgcacacaaagccgatttggtgaattaatccaaatgtatatgtatatttggtgatttggtgtatatatggtgatgcttacatgtggaaggagactgtacatgggaccattcctctgtccgctaagggtttcgagaagaacgactccaaagctgtagacatcgcactttagtgtcatctcccctcgccatgcgtactccggagatgcgtatccccttcatggaaatgtaactcgaccatgtcagtgacacagtaatactacgaaacatgaccagttggctgattgttcatgagcaagagaatggagggtgtgaagtaactgacggtgaaaccacaacggtgagattggaaggctctggctggtctgctgtgaatagcttggcggtgccaaaatctgcaatcttgggtctgaaactgtcgtccaacagtacgttcggaggcttcagatccctgtggatgacgcactcgcctgatccctcgtgcaggtacgcaataccattggcgatcccatgaatgatgcccaatctttttctccagttgagcatgagtcggaggccagaatcgcctgccagtgcaaggtacatcaagttagcaaatgccatacgagaattgtataaactgtaagaatgcagccttttttttttctgtatattcgtttctctaagtaccaaatatgtagagatccaaactcctgtttgacatgtagtcgtatatcagcacacgctcgctgccttcgctgcagtaggcaaggagacgaagaaggttgccgtgtctgagcctagccatcacctccacttctcttgtgaaatccttcttgcctttcttggtgagggttgattggtgtagccgttttacagcaatcattctcccatcaggtaactggccctacagattatacaatttatattgtaagcaactgagaatacataaatttcatccacattcctccaaaaaaaaatcatccacattgactctttgacaacctcactacaaggaattttcattagaaaaatggaagcacacgagtgtcaagagttcatgaatcatgaccgagcgagtatgttctatcatgtagaaattagaaaaaggaaaggaggttaccttgtaaactatgccaaatcctccttggccaatcacatggctctgtgagaaatttccagtggccgccttcactttctgcagatcaactgaaggaactgttgtagcaggattatgaggtataccttctgcaatataaaaagaatcagtctgggtctggaacttcctgggaaatgtctaacgcttaccttaaatttgttctttctgtaagcgtaatctagaaggcaaaatttgctcagacatttgcttcaagacactcttattttatggttgttagtcagaatatgctctgactattattttaacatatcctattccaatggtgagatataactagtgcgttcgttccagtgatattgggtgagaaaacacatcgtttttcacgcgcacgctttccaaactactaaacagtgcgttttttacaaaaaatttctataagaaagttgctttaaaaaatcatattaatccatttttataatttaaaatagttaatactcaattaatcatacgctaatggcccacctcgttttgcgtatattcctaatcttctcaagtttacacttggccaccttgcaagatttaaattcaagcttttttttgaatttaaacatattttgcaaaatataaaacttattccaaattgtggaaaaacattttaaaaaacttgtttaaactcagacaatatatgttcaatttctatttttaaaatataacaattctcatttttgtagttttgaacaagttttgaattttgtaaaatatatttaaattcagctaaaatttgttcagatttaatcttctaaggtggctcaaggataaaatcatcttttgtgaagtttttatctcttcatgggaaaaaagatgtattaaaaaatggtcaaattttaccacagatttagagtatcctaaaaaaaaaccacaaaactagagtttaccgaagcaaatgttgccgatgaaaaaaaaaagtgaagcgtatacaagccattggagaatagcactttacctgagattttgtgtttccttctgcaccaaatagcaagtagcagtacgagcataataatcgtggcagatattggtgcagcaataacagttttccagagcataaacttccggctcctaccctcatctgtcatagctcaaaagttttccagagttaatcatcaatagatagccatggttaatattacatcgaacctgatccttactaaatgtgtcagctaagccaagaaatgtgcttggaaatgacgtgcagaactgaaatcactctgataaaattcagcacatacctaattcagactctgccaacctcaggaacagaccctgcccttggtcgacataccgaagatcaacgatgccgccggtccaaatgacgcagccgctaccaccgccgcctcctcggatatccgccgcggcgtaggccaagcacgagcaattggccacgcacctcgccctgcactcctccaccgtgatgcccgtgtccaccgacgcgttgtgcgtgtcggggagcttcactccctgcaccaacgcgaacccatccgtcgtcgtcgtgttgccgcagcgcagcggcacgtttcgccggcatccgccggaggcgtccttcatcgcccacgccgccggagacgtcgggctgaaccccctgaggcagccgcagaacgacgtcgacggcgcgttggcgtcgcacaggccgaacgccccgcacttggcgtaggcgtcgcacacgtccctcggcccctggaagtacgtctgccatgtccggctcgtcgcctcccacaccagccgcttcaccacgccggtgtcgagcacgacggagcgcgtcaatggcgccccaggcttggagacgtagccgtagcttatctcccccgggctgacggtcacctggaacgtgatcaggttcgtcgtgtacgtcgccgcctccgggttgccgctgaaccaccggccgttccatggccccgacctgtacctctcgacgccgtcttgccacaggacaacgtccggtatgccgctggtgtccagcacgcggcggtaggcccccggcgacgggtcgtccggcgagcgccacgacgtgaggtcccactcggccccggtccacaggttcttgcccatcttcatgcccggcaacaaggtgttcgacgggtgatcgaacgactgccacaacgtggtggtgctgccgcttgcgtcacggacgaccaggttgccggagttagacagccgcgcctccaccgaggcggcgtagggcgagttcgacgaccacgcgacatggccgccgccggagccgtcgagcaggacgaggatcccggcgtcgctgatcgccagcacgccggaggtgacgttgagagggctgtctcggttggccacccagcaaacggcatcaggggagaccgtgaaccatataccgaggtatctcttggctgacaccccgggggagaagaaccccagagtgaacgtgccgtcggccgacacgagcgtctcgccgtcggtgatgttccggccgccgcggagcgtgtcggtaacggccgcggcggcggcgaaggctctgggagcaacgaggaagaacgagaagaggatgacgtcaacgaggcagatgccagtcgttgccttcgccattaattaatcaccacgacgctaattggtttcttgctcagttcatgagctactcatttatacatgatctgcaatgcttatcagttatcaaggctaatctagtgcagtttactacagaggttacaacgcaagtatgtacagcctggtaaggtaaagtcaaattaaagttctgactttgtcatctgttcatcatttttttttgaacgaatatgttcatcgattagagagcacaaacattttgtattagtagcgtttgcatccaaggaattacttcatccgtttaacaatgtaagtcatttttatatttctcacattcatagtgatgttaatgaatctagatagatatatatgtctagattcattaacatcaatatgaatatgggaaatgctagaatgacttacattgtgaaacggagggagtaagttacaacttgtgcaggagtgtgcacctagccgcacctacacgtacaatatattttgggtttgttttttgcgttcatgcatgatcgttgagataaaaataccacagataaatggttaaagtaagtgattaaggtcaataatttgaggtcaacacgcttggcttggctcttcattttgccatgtcgatgaggtcagataacgggtcagtgaagaaaaccagcgattccttcccgcgtagaactgctagctaactttgctacactacaggatgctagcggtacagttcgattaatccacttatagttacagggggaaagatatatcactccacaaacaaacaactttaaatttaatttctacaagttgtaacaaaaataacaaatatagttgcgaatatgcgataactattttcagtttaatttgttatttttgttgtaacatgtagaagttgaatttgatcttgcatgttgtcgatgggtgatacccgtaggccggatatagaggttattggggtacgctggtacaaggatctacgtaatacgacatcaagcagacaaaagacaaagattatactggttcaggccccttgataggtaatagctctaatccagttgatgtgggattatatgatggaaaacacaggttacaaagggaacaatggaaatcgacggatccggcgagatcgtagtcgagttggttcgactagatccctagcggtttggctccttgtaggctccgacttcatatgctgtgagggttgtgttggctctgagattcgatgcctcaggccctccccggggggtcccttttatatcacaggttaggcggtttccaagtagaactcggaaacatcgaactttacacgatacattgatgacccagtcttgtccgagtatgactccttccatttgtaaactccgtgaggggtttccttaatatatgcggagagtatccgtatacgcgtgggtataccataccgatatgagacgtatatcaaagagtaaagggtatacctaacccgtaaccctgacagtagcccccgacttctgcttaaatgagctcgtgtaaccattcgcgacttcctgtgtcgagattgttgtcgttcctggtgcgaggaccgtagagacatgacgtagtcgagaacaccgtttgaaacccaatggtcacgagcgaatttaaactaaagtccaaaaaactgttgcgcgtaacggacccagaaattttcggcgggcatctctctccgttccttggaattcgcaccgtcggtagtgcgtctctttaaaggaattttggggatccattttgaagtccgcccatcgtgcagaaaacatcccgcctgcaaacgctcttagtcttctccgcttccacaagaaaccctagttcgtcgaccttagccccttctccggcgatctccgatcgacgatggatcttggcaaatcatcctccaccagcgcgtcgctgaagaagattcaggaagacggcgcccttcccggtcgtgggaccatggaaagggaagcaggaggtactaatccccagcccgtcttaggtcgcatggttgcgattgaagactacattctctgcggttttctccctccgccttccgaatttcttctcttagtcatgaacttctacggtctttctctgctccacctgaaccccaattccatcgcctttcttagcatcttttctcatctttgtgaggcctacattggggtagagccgtttctcgatctctttcgcttctactatgagctgcgttggatggagcccaacagggtgtctggatgcgtcgggttccgacttcgggatggcctgaagtcgcgttacatccccttccagtgtccctcttctcgcagcaagtggtggacgaggtggttctaccttcagatcaaagattcggaccctgtctttgttgttcctgaggaacaaccggacaagatcccgtcttggaccgcaaagccccctttgaccccttctctccaatccttcatcgacattgtcgacgatctccgagtatgaggcttgtcggggtatgaagtcgctgcagacttcattggtagacggatccagccgctctaggctcgagtccacccagcctttgactattccggaccggaggacgcgacccgggtttctcctcggggtatctttcttgcatttatcctaacatgctcgtgtccacgttcctcctgatttatcaaaatttggttctcgattcacaggactgaacagcgaaaccgtgggacgtcgtgtcagccaggtgatgatcagcggcctggcaacggcgagtaacatccccgttcccctttgtgaaaagggggcggccaaacgtgatgctgccatcaacgtaagtgttctcgataggcatcctgcgttttccttctgagatcactttatgacttgattaagcgtaggctcttcctctgactgacatcatcgggccactcgcggaccatcaggtgacggcatctctgaaagagaaggtcgccaaggaggcgtctgatgctgctgctgctaccacaagtggtggcaatgttccgacaaaggggaggaagttctcctctgtaagcggacatcgtcgcaaggcatcaaccccctcggtaagctatcctgtcatcagatcgtacaaccagaagaatttcgccttacttcgcatcgaccgtttttcaggcctcggacgcgtctctaccgcctccacgacgacaacgtcttgtgacggttggcgagaagtaagtagatgaacttaagtctccgtgattttgttcgagtgttatctgaaccatagctatctcatagggcggcacgggcgaaggcggtgcaagacgagtctggagggacttccggcgtgtctcccactgcagcctcgacggatgtcgtgcttgcgcccgggagacgcgaggcgacaccaagcggcccagtcagcaatcctgcggctggtcgtggtccaccggcggccatcctcacctgggaggagctccaggtcgagatggggcgcctcctcgaggctggtgctcgcggcattggccgtgagattgcggaggcgaggtcggcagcggcgtcggcgaacgagtgtgctgaccggcaggtacgcgagttggcggaggctcgtgaagacctcaagaagatgagggagttggtggccggcaacgagcgacaacggcaggggctcgaggaccgcatgtcgaagctcgggaacaacctgtcggaaatccgtggctcattgcgggtcacacacactggcctgcaccagcttgccggggagtgcggcattaagtctactatcccggcgaatcccgacgagttctcgcttacatcttctcttgcggagctggcggcggcgatgagggagatcccctccaagcatgcggccaggatcggggaggagacgtcgaacgggatctacaccggggcgtgccacgtcctcgcgtgtgtaaagctggcacatcctgaactcgatttgcgcgagatcttggatcagggggcggctagcaacacgcataaggaggtgatggaagaagtcggtgatctgggggaatctgttctccccctttttgaagagtaggacctcttgtactcccaagacatgctgtgtaaaactgaatcttaatcgcctttgtgcgtgcaattattgttctagcttactcttgtatgttgatcttgagaacttttgtcccttgtagagatgttgatgacgaggatgtccagcagcgcgggcagcccgagtcaccagcgattattccggttcttgcgtttgaaccacatgcgtcgcccgacaatgtagaccagacccttgctacggggacggagatggcgacgacatccttaggttagtagcccattcatccctttctgctcttccgactagatcaactatgttctcgaaagaggcgtgtagcttgacttagttgttcccacattgagcagatctcgagagtgctcttgctggccaagatcgtcgtatccaatattggaagacaaaatttgaagtagcggaactcgagagaaccatgcttgcagtgaagaaagagcaggctgtggaaacgctccggggtcatgaggtgtggttcaactcgtacttgaagagttgctgcacatccatggccaaggtctgtagagaacttcgagtgccccatggagatcccgaggagtcggcggccggatacatctcatggctgaacggagcatgtgctcaactcgatggcgtcggcaagcgtatcgacgaggccttgaagcaggagtgtcgtcgatcgagccgatatgccggagggcacgtgttggcttgcctacgagatcatcgcccgcacctggacctcgattttctccgtgagggttttgctcattctcggaggactccggcggagatagaccacctggcgaggtcgatggcgccgttggcggagaagatcttccagtctatggactggcgttggccttcttggtagtcttcgtaccctgtgatagatatctcaggaaaaaggtgtaatatagctttggatttgtgttaaaactgtaagaagtattttgtgaaatagagaagagatctatctttaacaaatctttcttactccggatgtcgtgtgtaagagtatgttctcagttcacgactttagtcagtcgtttgagtcgaacactctccctagcccccagccttgtcgtcggaggaattttctcggaggataaggctcttggacctttgatctgccttggttgaataagctctgatcctagctcccagccgtgaagttggaaagttaatttccgatttcgcggcttggttaatacgcacggtgagaactcttacacgaccagatcttacatggtctttcgtctctacaggatctgacaaggccttatcggctctgggcgtccccagccgaagatcccttaggttcctcggaggccttgtcaagacggcgtaaagggacatgaggataggtttcaacgctaggtgtcatcagggtaagggatcatcgggcggaaatactttgattgtaatatgggcctaagaataggctttattgatactgtaaggtgccttacaggtacggatggtattgactcatacatagaatttacgtagttggtcaatgttctaagaatttgctaactcgcgaccatcgccgtctgcgattttgaatgcgcctggctgcaagacttgtgtgatcgtgtaaggtccttcccatttgggtgagagtttgtttcgccctgcttggctttgaacccgtcggaggacgtagtcgccgatcgaaagtatgcatgcttggatgcgcttctcgtggtaacggcggagggtctattgatagctggctgctcgaacggcaactcgttcgtgatgttcctcgagtagatttacatcgacgtttcgctgctcctcctggtcctcgtcggaatgcttctgtactagtgtactctgatgtcgtagctcgctggggagcatggcctcgaagccgtacacgaggaagaagggtgtttccttgttagacattgtcggtgtggtgcgtacggcccatagtactgatgggagttcttcgacccattttttgtcatgtgacatgagcctgtcgtagacgcgggttttgatcccttgtagtaatatgtcgtttgccctctcgacttgtccgttactttaagggtgggagaccgaggcgaagcatatcttgactcccagcccgatgcagtaatcctggaaatcagcgctgatgaactgggagccgttgtcggttatgatgcggtgcggtagtccgtatctgcaaaatatacccttgatgaatttgatggcgttgtcggccttgatttctcccgtgggtactgcttcgatccatttagtgaatttgtcgatcgccacgaataggaacctgtagccgccctgtcctcgtgggaatggcccgagtatatctagcccccagcacgagaacggccaagtaagagggatagtctggagcgcttgcgcggatagctttgtgtgtttactgtggaattgacaggcttcacatcgctggaccatgtcgcatgcatctttaagggcggttggccagaaaaacccttgtcgaaaagctttcccgaccaatgtccgaccggtggcgtgtgacccacaaatgccttcatgtatatcaaggaggaggtgtctaccgtcgtcggacgagacacatttgagaagtaccccgtttggcgctttcttgtatagattgttgggccactgtatcgtcctcgggcaactcctcgctgttgatgaatttgattagtgggatgcgccagtcgtctgtggtctcgatatcggcaacggcgtgttctgcctttgtggcctccgagctaatgtcgggggtgaccgggctaacttcaccgctaacctcttttactgatggcttcgttaggatgtccagaaaggtgccgggctcgagcggttctcgtctagacgcatgtcgtgctaggtcatctggctcgatgttgtctttgcggtagacgtgtcggacttcgatcccatcgaaccttttctctagcttcctgacttctgcgagatacttggataactcagggttagagcatttataatctttgtgcacctggttcgcgactagttcgaagtccccttttacgattagtcgcttgaccccaagtgcagctgcagctcttgtcccggctagtagtccctcgtattcggctgtgttattggtcgccctgaagttgaggtggattgcgtgcttgaattgatctacggagggagacgtcaagataaaccctgcccctgctccttggctgttgagtgcaccatcgaacgccattgtccacgtttcgttgtcgacttggttgtctgatttgttatcaggcatagtccaatcggctacgaagtcggcgagtacctgggatttgatggctgttcgtggcgcaaagtggacatcaaactggctcagctcgactacccattttgcaatgcggccgacaacgtctttgtttctcacgacttcaccgagagggaaggaggagacaactgtgactctgtgggcttgaaagtagtggcgtagcttccttgatgtcatgatgaccgcgtaaagcagcttttggatctgtggatatcttgtctttgcgtcgtggagagcttcgctgacgtaatagactggtcgttgtactttctctctctcgacaatgatgacggtgctaacggaatatggcgtggcggcaatatagaggaataattcttcattaggttggggggcaacaagtacaggggggtttgataggtagcgcttgagtgcaacgaatgcctcttcggcttcctgtgtccatacaaatttgtcttgcttcttcagcaaagcgaaaaaaggttgccctcgttctcccatcctagcgatgaacctgctcaatgctgccatgcatccggttagcttctgtacttctttgagtcttgtgggcgacttcatgttctcgattgccttgatcttctcgggatttgcttctattcctctgccagagacaaggagtcctactcgcgaacacatattcctccgcgtccttttcgaccacgcgtactcgtttgcctttttcagatgcaatgtgcttctcgagcgattttttgaaaacaaggcaatcttccaaagaatgtctgtccgtcttgtgtatggggcaccatgctttctttgtgtcgctactttgtgggtctgggtgcttgggagggttcgcgtattctgctgcgaggacctccgcttgagctttccttttcccatttttgcgattcttcttcttgcttgactcaggtgcgtccgtggctggtttcttctctcccccggtcttcggcttatcgttcttgcgtcttagcgcatcatctgcgtgggcgcatcgctcaacaatctcgaacaatctccgagtggttgtgatgcgtcttgtcgccaactcctgggtagtatagcgatctctgacaccggatttgaaggcgcgaattacagaagcatcggtgatttcggggattgtatttttgcactcgttgaagcactgaacatattccctcaaggattcacccgagttctgtgtcaacgcgtgtaggtcgtcttcgatcgcgtggcgcttgtaggttccttggaagttggcgacgaactgttgccacaggtctgcccacgaagagattgagtagggcggaagatgcatcagccatgaacgtgcagagccttttaacgcagttggcaaataattcgccaatgcgttgtcgtctgctccggcagcatagagtactgtggagtagacttgaaggaactcttctgggtcggtgctcccatcgtacttttctattgctccgggtcagaatctctcaagccatcggacatcacgtagggaacgactgaaagccctacacccagcgctgggggcggtgggttgtcggcgatcgtgtgtccttcgtggatgtctgtctgatgatgaggaagacgaggatgatgacgatgacgatgggtcgcttggttccggcgtacgaatacgaggatgtcggcctggatctcgagaatcttgtcgtcatctcccgctgttgtctcggcgccggtctccatcattgtcatcgttatggcgacgtcctcgaccagtatcgtctggcacccgccgttcgtgatcgttgtgatcgtggcggttgtggcggttatcatggcctcggtcttcgtttgagcggtctcctcgatcttcgttattatggcgccgtgaagagacatgacgccgggaacgattctcattgtctcgtgcgcgtcgtgcctctcggcagccgttgaggtgatctcggagatcgctagtgccgcgaggtggaggggtggctcgatgaggcgattccctccgttcagggtcttcaccattggcatcgccagttggtggttgctccgggtgcgctgcggcggcggcctcttcggacgcgttgctgaggttggtcactgattcccgtagtcgttctgtccaatgcgtgatatcgtcgttcaaaacaggatcgtagggggtttccctcagtatagcgttgacggctctgatgtgctgggccggggtggccaattgattctccgcttctgcattggtgcgcgctgacgtgccgacatcatcgatagccaatacctcccgcggcgtgctcgttgttgatgatccatagtcttcgagaaggtgcaagactgatggttcgtgaggatcgatatcgattaccccaacaaatcgatctgaagttggcgtcgctcctcgttccttgtctttatccctgatggggatgtgtgactgttggaccttaggagatggcgctttcatggtgctgagaaagaccttgcaacttgagaggtcgtgattctttgtcttgtgaataggacaatagacatcacgagttggagaaatacgctgaattccacgctctttgcaggcgcgaatttcagcgcggatgttgaggaaaactcagcaggcttgcaaagtgtcacgcccgaaaattcactagtaatttccgaacttatttgtgcataaaatcctcgtccaggaatcagccgaggtacacaaactgacaatttaatatacagattcatcaaattaactaaaccgataaatacttacttaagaggcacttagtcctcaccaagaagaaaactgcagcggaaaataaaatctagcgaagctccggctccactcccacaggcagctcaactggggtataagccaaacgtcttctccttctggatcctttttcttcaactgaggttgattgattattgcaaggtgagcatatgacatactcagcaagccacacagcaaatatgcaagtgcacaaggataccaaaggatggcataatatcggctcatttgcaaaagcagcatttagcaaaacatttaagagaagtaaaacagtggagtaattaatcagaaattttaaccaacactgaacagcacacccatgctgcacaggcccaaccattctgaacaaccatacccggctgaacagatctaactccaaaccaggagctaagcaaattattaccagttataacatctataattatggtgagaggtgtgggactaatcacgaaaaacattgctcaactcgcccataaccgcgggcacggctattcgaatagttttactctggccagaggtgtaccactgtacccacaagacacagccccacatcatgtcaccatgtgcctcagtaccaccacggtacctcggaaaggggctgtgacagtaccccttgcataacacaatccaccgcagcgcaccattcctggatcataatcacccccttataaaacaaggcatggactccccagcgacccccgtgggcttatctccgccacttctcagtctggtgccccgcaatgaaccatgctatacaaaagataaagccgttgcccacgctggcttgtggttggcacggttaatgtttcacaacagtagctcgcgaaccggtccttaattgtcatgagcacgactctcaaaaccatgtgctcacaacccaccattatcaagttttagttggcaagtaattaattaaccaatcacgattgaccatcgtgagctaccattaaatataaccataagtgatagtgaaacattagttatcccaaatgtgtgctaatgtttctaagcatggctaagcaatcatatctaatatctagttgaaccaatatatataaagctcaactagtccaattataatcacccaaggtatcaaggaataaagtaatcaagaacaaaagggccataacaaagaataggttaattccacccaatgacattcgaaaataaatgcacagttgaaataaatagagaatttaaatataggatcaacatgctcaaaggattgtgtttaggatctgtgtgacttgccttgcaataatcggtcttcaattaatcttcttgaatacttccggcgcactcgcgaaccttcgcaacgacggaaacgacaagctatcacgcaaaacgaggaaaaagactaataaaaaccaaataaacaatacataaaaagtaaacaaacatgtagatcatatttttagatgaattatgagacttgaacggcctcattctgacttcaaatgaatttattatgaattttacaagattaaatctaattaaagcccatttaaaaagaattaaataaatttaattcaatttatggacaattttaatatgtagatctttattttatacaacttttgcaacttgaaccacattaaactgagttaagatgaattagatatgaatttttaaagattaaatcggattaaaacctttaaactgattttaattgaattatgacgcaataatgaattatttttgaaaaggaaaagaaggattattgcgtcagcgggctagggtttcggtggaccgggcgcacgggcggcggttcacgcgaacggacggccgagatcgaaccaatccaagatggacggccgagatcgatcgggtccacggcggtttacggcggacggcctggatgacgtcagcgatgacgtcaccaccggcggcggcggctcggcggctcgggctcgcatgctcgccggcgaacgacggcgcggcgacgcgaacggagagcaccaggacgtagagcgcgacgcggcgaactcaccggtgaccaaagaagcggcggagaagcaacggacggcgacggcgacgaggaggaagcggcggaaaccttcgggttgacgacggcgatgaagctccggcggtctccggcgacggcgaaggggcggacgaggacggcgacgaccttgcgaacccgacggcggtcttcccgagcgacggcgacggctgaaacgacggcggcgcacggctggagcggcggcggcgacggcgaagctagggcacacggcgctagagctcttccgacgacgagaggcgaaggcgagggtggctacgggtagaggagagctcgggggtccttaaataggtgcaaggaggcggcggcgaaggcccacggcggcggagacggcgaaggaaagctcggcttggagagaggaaaaccgatccaattcgaactcgaatccatcgatttccaaaccgatttaggcgaagcttccaaagaagaaaaggtagaggagatcccgaggatcattttccctcaaacgattcggccggataaggaaagacgcggccgaatttggaaggagacggcggcggcttgcgctagggtttcgggcggcggcggcgacgcgaggaagacggatccgacaagcgggccccacctgtcagcggctgagagagagaggagagcggcggctcggcggactgggccggctgggccgaggagggagagaagagaggttttgggccgactttcggcccaaagccaaaagaagacttttaaaacctttttcaatttaaattatttcttaaatgcaattccatttactaaaaatacttccttagctcaaataaatcccagaaaaatctaggaattatagaattaagcaaagtatttaatgaaattttatctagcccaattttatattgagatttaacaaattaaaattagatcttctcttataagcttttaaaatcatttctaataattccttttaaacaacaatttataatttaaggatttttaaacaagaaaagctctttaacaattataattagatcattaatgatcaaataattactgaactgttctttgtattattaagagttgagctctgaaaaatccgagaaaatttcagagagttgacttaatcatggagaatttaataaaaattaaatccatccatgctttatatttaggaaattttatttcccacatttaacttcacttgtaaattaaagaacatttaatataaattctattaataatttattaaataatttataaatcctgaaacgaaaatcaggatgtgacacaaagtgtgtttcctggttttgtggataggacaccaggaccttgtcacttcggaagtcatcttcgtcagctcgcggttcatgtcggaacgacaaggtttggccgcattagaatccttctcgagctcggatgtcgtcgatgttccgttctccgcctcggcgggaggatctttcgacatggagtcgtcttggtttgtagccattgcgttctcgtttctagtcattggcggaccggttgagatcggcattgtggtgtaaaccgggaagacgatttcgccgacttgagtccacaccagcatcgttgaagcagggaatacttggctgaggttggtgttgacgctattgtcgacgaggctggatgacatagtagtggaaccttgagtaccaagtccccctacctggcgcgccactgtcgacgggtgatacccgtagaccggatatagaggttattggggtacgctggtacaaggatctatgtaatacgacatcaagcagacaaaagacaaagattatactggttcaggctccttgataggtaatagccctaatccagttgatgtgggattatatgatggaaaacacaggttacaaagggaacaatggaaatcgacggatccagcgagatcatagtcgagttggttcgactagatccctagcggtttggctccttgcaggctccgacttcgtaggctgtgagggttgtgttggctctgagattcgatgcctcaggccctccccagggggtcccttttatatcacaggttaggcggtttccaagtagaactcggaaacatcgaaccttacacgatacattgacgacccagtcttgtccgagtagaactccttccatttgtaaactccgtgaggggtttccttaatatatgcggagagtatccgtatacgcgtgggtataccataccgatatgagacgtatatcaaagggtaaagggtatacctaacccgtaaccctgacacatgtttgtggagtgatatatttcatattaatctatgttgttatttttttcaaatatatttataactatttaaatgatttacaaataacaggggatgtcctctcgtgggatgaaaatcatgtgttacatgagacaaaacgtatgcacatgtataaaattggcccattaccatcgtgactttggaatgggccgggccggattacccgtgacgtgctttacggcacgccaacttccgggttgttgattaccgttgagaagttaggtggtgtttggatccagggacttaactttaatctctgtatttagacactaatttagagtattaaatatagactacttacaaaactaattacataaataaaagctaattcacgagacaaattttttaagcctaattaatctataattagagaatgtttactgtagcatcacatagggtattcatggattaattatactcaatagatttgtctcgtgaattagtccaagattatggatgagttttattaatagtttacgtttaatatttataattaatatccaagcatccaatgtgatagcgacttaaaagttttagtcccatctaaacagggtcttaacgtcttttgctgcttgtcaacaagttaaccaaaaaaaaggaaaatggttccagttaactgctcctcatatcatgttaatctgtagttagaatcatgaatacatcagccattcaatggaatatctgcaaaaaaagatgaccacacaatgacacaagtcacaagcagccaagcagaagagacatctacaaagagaaactaagtcaacacagacatgcatacaattacaagcagagaaaagaaaatccttctcttctactacacctgagcacggccaatccaggcagtctgcatgcattaggtgagatcggttgtggttgagccttggacatcactctgacgaagcggacgcatggcggctctgctgtcaagtgtcggtctcttgggctgctccatctgcgacgtcctgctcgtcagcatggcgacgatttcggacatggtcggcctatcgtccgccatgtcctggatgcaaagaagcccgatgtggatgcaccgttctagatcgtacaggagctctgcatcgtcgggtgcaggcctcgccattgccgggtcaaggaggtccatgaggttgccctgttcccacaacctccatgcctgtatgcacgaaagaggtctaactgaaggatccaaatgccattgtcttgcaatgaagatttgatgtgttcagtgcactgcttgattacctgtggaagaagcgtctgcattgagccgttgcgaacgccgctgagcgtctccaggaggacgactccgaagctgtagacgtcgcacttgagcgtcatctcgtctcgtaacgcgtactccggagatgcataacctcttcaattcacgaattcaattcaaggcttcaaatcaaaacttgagcaacattgctactaggaacagccattagtttacttactgtgagaccacgagggtctggcctgactgatcggcgacgaacagcttggcggtgccaaagtctgcaatcttaggcttcaattcgtcgtctagaagaatgttgctcagcttgagatccctgtggattacactcccgtctggtccttcgtgaagatacgcgacacctttcgcgatggcctgaattatgtcgagtcttcttctccagtgcagattagctcgacgcggcaacgggcctgaaatgaagaagaacatggaaggtgacattatttattcatgtcatggtgaatttatgatcaggtcagtgatgtagcttaataagctgaattcagatagaacagggtgggtaccgaaaatgtggttgtccaagctcttgttcttcatgtaggcgtataccagtatacgctcattgccttcgttgcagtaagctaggaggcggagaaggctaccgtgatggagcccggccatcactgccacttctctggcgaaatccttcttgcctttgttcgtcagagctgactgctttagcctcttcacggctaccattctcccgtcagattgtactccctggtcatttccaaatttcaggtgattgcaattgcatttttggcatttgccagtgtacggtattaagtatttgcaacttatgtttaatttcttttttcatgaggattagtgcaactttcatgttacatgtgtctatcttctgaagagagaggctcaccttataaacggtgctaaatccaccttcaccaatcaagcaattttctgagaaattttcagtaatagactttatagtagctagattgactgaagcaacgcccatagaagggttatctggaataacatctgtggtattagcaatttagcatacagtttgttagcttagaacttcataataaatatccttaagattaaaagcctggatttacctaaaattccgtgattctttttgcaccaaatagcccaaaccccaaaagcgatcaaaagaatagcaatggtagcagctacaggtgggacaactagtacaatcagagaccttttggtctcaactgttactcagacaaaaaaaaaaagacatagagagagatcagttcatgctcagaattactcccttcgctgacttttctagttaaaacttctttagattaaatcaaatttatataaaaaattaaaagagattgcgacatcaattaggttcattaaatataatattaaaatattttgataatatgtttatttgtattgaaaatattgttatatttttctataaactaaattaaacttaaaaaagtttgaataggaaaaagaaaaggtgagagtgacttatattcgagagagtatcatatgtcggcatttcttttacggtgacatcaggatcgttactttgttaaaaaaaagaactgttactttgacatttctttcgctaatcttttatctggggtcattttcattcaaaatataggctcggattgaaacccattttcattattgttttagaacataatctttcaagataaaattgaaaataaagcaatgcacataccaaattcagacttagccaatctcaggtacaaatcctgcccgcggtcaacgtagcgaagatcgacgatgtcgtccgtccaaatgacgcagccgccgccgttgatgtcggcggcggcgtaggccacgcacgagcagtttcccaggcacctccgctcgcactccgccgccgtggcgcccatgtccaccgacgcgttgcgcgtgtctggcagcttcaccccccgcaccaccttgaacttgtccgtcgtcctgctcccgccgccgccgccggcgcagtccagcgccacgcctcgccggcacccaccggaggtgttccgcaacgcccacgccgacggcgacgcggcggtgaacccatccacgcagccgcagaacgacgtcgccgcggcgtcggcgtcgcacaggccgaacggcccgcaccgcgcgtagctgtcgcaggggtccctcgggccctggaagaatcgctgccatgcccggctgctcgcgtcccacacgaggcgctcgaccacgccggtgtagttcaccacgacgcgcgtcaatggcgcggcgccggccgtggcgaccgatccgtagccgtaggtcacctccctcgcgctggacgtcacctgcagcgggaacttgtcggagtagttggacgcctccgggacgccgttgaagaacctgccgttccacgggcccgtgcggtacaccttggtggcgccgccgccgccgccgcctcgccacaggacgagctccggtaggccgtccgtggccagcgtgcggcggtagtcgcccggcgacgggtcgtcagcggagcgccacgccgtgatgaaccactcctgcccgctccacaggctcttgcccatcttcatgccgggcagcagcgtgtccgacggctggtcgaacgactgccacaggtaggcgtcgccgccgctgccattgcgcacgacgaggttgccggagtcgagaagctgaaccaccgcggcagaggcggccaagaagctcgcggaccacaccgtccggcgagagccgccgtcgagcaggacgagctggctgccatcgtcgttgagcagcagcacgccggacttgccgtcgagggggcggtcacggttggctacccagtagacggtgtcgccggacacggtgaaccatatgccgaggtatctcttggtcgacttcccgggagagaagaaccccagagtgtacgagccgccgccggacgagacgagcgtctggccgtcggtgaggttctggcccttgtcgagcttgtcggcgacgcccgcggcggcggcggccgacgtttggccggagaggaggaagaagaaggcgaccaggcggagtaggttagacgattgcctggttgacctcatgacaaggtcaaaatgtctctagctcttgttgcatgcagaaaggctagctcatgcagcagatggccatgaaggatggtcatgtatactgatcataggcatttctggatatttggattggaatattggatgataaactagttaattcaggtagtccggatctgtctatttagaatttgaaagaggtacatcaaatcccatacgacaatatctaaattctctcaaagtcgtactccaactaattggctgaatttattaatttgcactcaattgggtgtgaaaaaattgcttaaaaagtgcaggtcaatgtgactgcttcgttccaaagatttcttcgtcttagcacgacctgtggctacacgtaaccatgtagcagagctttacattcttttggcctgaaaaaggaaatggagaagcacaatatgcatcctagttatccaatgggttaacacaaggcaaaagtctcccgtgcacgatgtctcacaaatgactttttacagacactcaaatcctactcaaaatagcaaacagatttgataaccggtcactagggcctgtttggttgctaccctgaaaaaaatttacctgacctgagactagcctgactcgttctaggctctgtttggttgctagcctgacactcttttactcaacacggagacgcgtgattagcctgagtcaaatcggtggcctgagcctcaggcgcagcgaggacagaagattaccatcataatctgtttcggcagccagcagaatgaagctgccctcccgtgaagctctgatgccgccactgcgtgaagcccttgcctggctgcctccgccgccgtagctatcgccgccgagtgaagtccatgccaccgtcgccttcgtctacgcgaaagcccctgctgccgtcgccggcgtgcgacaccagatttatcccgtcgtctttcgcggcggctgtcgattcttcggatcccgtcgttgttgcaacatcttggcgcgaagcttcagccaatgctgtgattcttttcgctcctgtcgttgttgccgattgaagcttgccgactgctgcttggatttggggatatttttaatccttgtactcctttggtttccctttttttatgtatgtgattaattgctattggaaagctacgatttcagttggaactgtcaagcaatctcgccgaaatttgcgtcttcttgtttagcacttaacttactagtgaattatcagacccaaatcactttttcccttctcaggcagcggcggcaaaccaaacaagcaaaagttcaggccgcctggccaggtaacattcaagaacttctcagaagcatggtgctcagggcatcaaccaaacaggcccacaacaggaggataaatttcctggtgttgcataccctgatacccagatgtataaacaaacggcattccaattcccaaatacgcttacagttccacatattacaagcaaacctatatacaaaaataataacaggtttattactaggttaacaacaaacaaacagggaaaatgagagacaccaacttcagtaatccaggttggcaagttgaacaagagattcagaggcactgacaaggagctatctgccttgcaattgagtatacgtcaactgattccccgatccagtattgttatcatccagaggaacccttccgacgaaaaatgcagcttgcttcggagcaggaagtgtaacatccccactgagcatcctgagcaccaggggcatgcttggcctatcacctggtaattcctgcacgcacagaagaccaacctggatgcatctgcatacttcatcgtaagagcatatggtgcccatgagtggatcgatcagctccgagacactgccttccttccacagtgtccacgcctgaaatgggtacagtgaattagaagatgccaatcataaaacgtgtattgattaccatatagtttgccatttaactggaaaatgacaaggggaagaagatagtatcatcttacgtaacccaagagattcattgaccattcttcatcaacaaatgagctgttccttcgtccgctcacaatctctaggatcaacacgccgaaactgaagatgtctgatttctcagagaatttgccctccattgcgtactctggagagatgtagccactgcatctcacagattttagcacatttagtttgccttctaggacatctcgtaatgtcaactagcaggtggattttgttatgatctaaataatgtagtaaaatcatagagttaatgatgcaagaagaaagcagtagtttagtgaggcaggtcagtacagttaagagttggatcgtagaatttttgttcaattttactctagtgaacaaaagtgaaaaagagccttactaggttccaacaattcggtgggtaagggcttgaagttggtgttcaccaaatattctagccataccaaagtcagatatcttggggttgaaatcatcatcaagcagaatattgctcgctttgagatccctgtgaataattttgagcctggaatcctgatgaaggtacaataatcctctcccaattccctgaataatcttgtatcgcaatttccatccaaatattagcctcttactttcatctaataagattcacatgaaagcaccaaattagcagacaagttcagttactggcttacatctaaacaaaatcagaacgtcaggatttgcaggaatcaaactaaacgttaccaaaaataaatgagtcaaggctcttgttgggcatgtattcatacagcaacatcttctcttctccatgaacacaacaaccaaagagcctaaccaaattccggtgttgcagtttggatagaactatcacctcgttcttgaactcttccaatccctgactggatctgtttgacagcctcttgacagcaatctcctggccatcaggtagtaccccctagaagtaatatcaactatgttggttcaggtattgatcttatagcattacgattttgaattccaggtcagaacaaagatagtaaaaacaacaatttcattcatattaacaagataggataaaatgataaaatgtttaaatgaccataccttgtaaacaaaaccaaatccgcctccaccaagcttgttgctaaaattatttgttgctgaataaatcgtgctaaactcaactagtggtgagcttagaactgcggatttcactgaatcacttctgaatatagcttcatctgcaggtggtccagcttcttttgtgatcagccgtggtgcttgtattctccttatgcctgcagattagtaaaaatattagatataaacctaccagacagctgttaacgcaaactgaactatatcagcaatctctaagactaagagataactgtcatgaaattatgtttggccgtagaatattatgaagtcttagccttgtatattcataatctgaacaatggcatgtatcatacaaattattcctctaaatcatacaacagaaagaaacactaatgacatcgtagaaggaatccaaatacatgtgaagaagtcagtaataaaaatattacccatttgctttatgacaaatttcttcaggcatccaaacacacagaaatgcatgagcatgatgccgataaggaagatggcagtatcagcgctcactaagacaattgagcatttatgctttgcctagaggaatgcatgtcaacatcgaaatttcgtggatttgcaagataatatgttgtcaatgctccgttcttatcaaacagaacaactggtcaacaagattggtagaatgacaaataaaaactgataaatttataagacaatggaacgtgatgtattagacactgttatccttcgcttgaccacttcaaccattccatgttcttgacaagttcagtatttgttgacgagatcatgaataaacaatcttaggatgtcactatctgaccatgccacctcctagctttgcttaggagttaggacaggagcgaagaaggcaatgcatttttttcatagagcaatgcttttcgttggcaagtggcaacaaattaacagcagccggagaaatctcgggacagtctagcatggaccaagtgctgaaaaaaaaatgaaaattgagacgcggaaatgtacgtccttgcagattatcagattagtcaacatatgcggcgaataactaaaatttctaactatcttcccgatccctaactcacaatccctgtagattgtctatacgggtataggtgggaacaggatggaactgggattaaatttttgcgggacctaacaacccagaaatttcttcattcatgcaggcaggatgacatttcgtgcattcctataccaaaaatatcgcttaaaatctgaggtgaaataagggaggagtagtacgtagttactgattctgggtcgcctttccgagcaagggaaacgcagatcgccgaggataagatggggagatcttcacggtggagaggatctgggcggccgacccatcgcgcctacggccggcgggtccccccccccccttccatcgccggccagaccgccggcggcttcggcctcgtcgcctccgccgtcgccgcggcacaccacctcgccggcagcgaatcccctcccctggaggccagtccgactaatgggctttgccgttagcggcctataccgtaagcaggccagatctagttgtcacatgcggaaagaataaattcactttaggtccctctatttgtcgtacagtctgatttttgtctctgaagtgtaaaaccggatacaacatatcccccaacttataaaaccagcgcacataaggtcaggtcctaaggtggtttggatagcagttttggctgacgtggcgcctacgtggctggtttgactaggtctccgtcccacgtggcattgacgtggcacttacgtagcaattatatctcaaaaaataataaaaacagcgggcccacatgtcaactacacaaaaaaaattaatttagaaatggtggggcccacggtggcccacatgtcaactacacaacaaaataaatatggtggggcccacgtggaccccgtatgtaggctgtagcaatttctttctcctctctatacccttctcccctaccttcccatatcagccattgccgtcgacgaagaagcttcgcgtgggtggtagagcggggcggagtgaggggcggcggcgcggcggatcctcgcgaccacgtacggcttcgtcttgacggcaccgacgacgcggaaccggtcgccgccgacgtaccccacctcgccggccgccaccccgccccccactccgccgcggcgccgccgcccgccggagtacacgacgccgatcctggagccacgtgtgcaccatggtccggttcctgaactcgaacgcctggagctgcaccgtcgcgccgggaagaccactgacgggaacagcacgatggggatctccgccgcttgctcctgccgcggcgccctcgtccacgcagccgtgcaggttgctgccgcccctgcatgtttcccatcaaacgtgtactagcaactacaaccagcaacaccatggattgttagttgagatgatcacatcttccatatatatcatatcagttatccccagctcctaggttttttctccagctatgatcaatgattcaaacgagtacactttgtccgatccacaggtctgaatattccatccgcagagaattctgagacgacgacgacgaagaagctagatggaacttgcagagtcttgagcgccgtggtctcctcctcctcctccgcggcagcggcggcgggctgcctcgagctcccgtccacgtgcggctgcgactcggcgggcggcggagccaagcggagggcgccagcctcgtcgtcgtcgtcttccggcacgaagccggcggggcggggcggagcggggggcggatggcagcgcgaagccgacgggatggactggggcagcgacgggcggacgcgcgggcggagtcttcttgaggtcgtcgtccccggcgccgccgtgaccgtggccggagaggggagatggggagaggggaggaagaagaggtaggggtgagtgacatgcggggcccacgtgggccccaccattttttattactttatgtctaaaactgacatgtgggtcccatggggtttaatattttttcatatcaagttgccacgtcaccaccatgtcaatgccacgtgagacaaggagctagtcaaagggagccacgtaggtgccacatcatttaaaaccgggcacaatactgccgagggactttttctgcatggttttgtaagttgagagatgagttgtatctggttttgcgaccaaaggatagaaataggactggacgacagataaagggacccaagtgaacttattcccatgcggaacaacctacaatccggcttcatttagaatgggcctcaattcaagcccatttatctgtatgggctagaatttaagttcaaatcctcatccttttcacgcttgattgggctgggattaaggcccatttatacacggccaccatgcttctttttaccaacgaacgaactgtcgcattcaaaagaagagaaaacacccccccttcttctttctccttgacgtcatgtcagtgaacttgttttcctttccctccttcaaaaaccatgtaagcaaatccaggagagaaaaaaataaagatctagacatcggacggcactatccaagtttaccacatcctgcgggcagagctcgcgtcactgccgtcacaccgtagggagtttaacgcgcctaagcatccacacccctcgccgggcgtccgcatcaacgctgctgctcccgtcgccgtgccacccactccaccatcagtccatcacatattctctcgtcctatctctgatggcgctgtccacatgcgccaccgtggcacgcgccgcgccgcgccgcgtcaggcgtccgtcagcgggtggaaacccaccggtaatgagaacgaacgccaccgcgaccacacacagaacccgctcggaaacacaaacatcggcgttgaacgcgcgacgaattccaacgcgagaacgcgcccaaaaccgcaaagcagccgagcttctctcgcgcgcgcaccaaccgccgcccgtgcccggtgctccccccactcacggcactacaacaggaatacccctccaccaacgtataggctgcaacggaagtgataatcgttgttaagcatccgctttcaaccactcggccacgcccagcgacccaagtcaacagaaacgcaaccaaccattatcttttcctgaaaaacctcccctcacaatcctcgcccgatcgaaaaggatcgtgatcccagatcgctgccgtgtcaatgctgcgccgccccggcccgagcaccgccgcctcgtccctgccctgaccccgccgcatcctccagttctgccgtcgacgctgcgccgcctcgacccgcatgtcgccgctttatcctctcccgtgctgcgccgacggctgaccggcacgccgccgcctcattgccccgatcgcgatggcccctgaatcccctgaccctgttgcctggaccgccacatcgtgctccatctcgtccgctgctgttctcagctgatctggtatgtgattgcggcttctaatgtacgaattatcattattccctgacgtggactgttgtgtgctctagatacttcgttaattttgcaagaaacacacctaaatcctgtagagctttatatctgcgataggcaagtaatgatgccctctttctctgcaggttgatccctagtgacttagttattagttattgatcatgccccaagtttctcgatggaattgcaatgtaagctaagtgattagtgaatcttgtggctatttttctgctctggtatgtggtaatgacatgaaccatgccttttttattaactttatcattatacagtgcagagtaaccataaaaagatataaagttcatagctcagattgtcgactttttttaattagtttaagttatgttttgccaattactacctgctaccagatacataaatttaacatgtggacagttgtttgttgctgttctatcatctaaaagatgagtgtattcatgccacagaaatattctgcttttcttatgtccaagttccatttatttcagtgtgaagaattattagcagagaattcttaaccagggatggttccaaagatgcttggcacaaaaatttagccattggtgaaagcaaataatttgatccaaagagtaactctggctgttaagtgacaaattgagatctcattctgctacatgaacaatggtaagatttactaggaatatgtcattgcagtttaattgtcgtggtgtataagttatccctttgtgttcttatctgagctatataaactaatagaaacattggcatttaattagaaatacctggaatcatttccaattgtgtatagcagttttgggctatcttgttgatagtttgtgcaattttttgacagggaaagccaacccatacttcggattttttccaagctgtaatgggatgttaaatgttcatttccattacatatcttttcctgtaatccagtgacatctattttatggtgaagtgttgccttgaggatgatgggatagaggaagaagaaattgctaaggagaagatattgttgttgctgccaagtgcccaagttacagaaactaatgttgatctggtcacagagaaaattcaagatgatgttttttttttttgcaagattcaacatatgtttgtactacactcactaatatgctgtggtgtatacacaagttgtacttataagagatttgtgaattaatatattgtgatttttttcttatagtacttatgagtttttcttgtccaaatggaacctatataagatcgtagtgtaaattattaattacaaattggcaagtaagtaatatgtatttggtaaatgtgaacagtatcttccagttgcatcctattgctcacttacaacagttatttatgtcgttaccaacgcttatgtatgtatggctatagatcgtagcaacgtatagaccttagcaacgccggcataggcaacacatagtcaatgtgttgctattggaccttacaacgcttatttagacctttagccacacatatattcgctgctagaggggggttcctcttgtagtgttccggcgaaaagaaaatctacagaagcacagattctcgcgtcgcctagcgactagcgagactgctaagctagagtggttggccttaatcaaatactgctactgtccaacttgcggttcggctcatgtgattggtcgtcgcgtgttcattcgcgcacgagttcaatacttgtattactgcactgatcagttctagatgcatacatggttggtatttggcatctctgaaaattggacttaggattggatttacgttagacttgtgagggcattgaattgaacatgtagagacagacgagaggaaggagtagttgcgttggcgcctaatccgtttgtcgacagaaggaaataagcagcaaatatatagaatgttcaaatgcaggttctaacgcttgggaaacttctgtgtttggtcaactcgtctttcttaatgggtgatggaaaatatcttaaccgtgtcagcaacacggcaacttctctagaatctagattcccatgcaaaaatgaactattttttctactctaaacaaatctgaagccctcgaccacataaacaggtctgaataatataaccttaaatctgatgaaatcgatctttgctcactgtaatctgctcactaacctgaatacagtgatgcacgcaaaggcaaaaaagtataaataaaaagccagaaaagtcagaagcatctgtcatcatggcctcatgggtgccaatggatgatgcagatctgggacagatgagacgacaattgggcaataatgcccaactccaactccatgtagagaaggaaatttcgaacggaggtcgctttctatatttctcttgtcctcttcttctccccttcgtcctcgctaccatcgccctattaatattcctcaaaatccaaatttgagacaacccgaattcagtcctcagcgagtcggaaacgcgccgaaagacgaactggaggcgcccccccaaatcttgagatcgcaggtaatgtccataggcgccgagcttcatgagtcctcctgcgagggatcttgtcttgaggtttcttgcatattggcctgtgcattttgagttttgatgtgcttgctgctgatccgaattccatctccgttgttgccgtaagattctgaatcgaattcatgcatttgtacggcagatttttttttcccccgctagatccgtatggtgtggttatttgggcgatgatagtatgggtccaagaaacgcggttttccctgtgaattgaggatctccaatttgcttctttggcttcggtccatggcagttgtgttctccaatcccatggttcatgctagacgcttcctgcagacaggactagacattttcagttttggtaactgtgaagattatggcattgttttaccaagagaaactgctgcattgtgatatgtaaaaaattaccctttttttccttctcttttagtagaattattacggaacatgcttcgcttggcgtctgtatcgatctacgttctttattctaaaaggctgtgcttttttgtgagcattgtcatccttttttttttcctttcaactccttctgttcatttaatgaacaattccgttctttctggtgttgatactgccacgttttactgattttccattattttattaattcctacttgacaagattcttatcgaacaattattgtgaatcttttagtaggaatctcgtaaagcgccagtgtcgcattttcctttgaggatctgatttttcccatcaagcaatggtgggatagccagtagtaaaatttaggctttcaggctcactccacatcagaaaattttctacttacatactatcgtttgtagaacaatcgtggaagtttatgcccttgctcaaaaaaaaaaaaagaacaatcgtggaagtggaaaaagggttccgtgaagcgcatagatcaataatgtctaatctcttttcactcataaaaatgttttgcaggatggatggacatacaaatggcactaatggttcctgctctaagccatgcgagccattaacagactactgcatccctgattacattctgaatcctgactctgaacaagtcctcgttgatcaggcaccatgttgccctgtagtagtattcatcaactctagaagtggcggccaactcggaagcagtttgatcaaaacgtatcgtgagcttctcaataaagcgcaggtacctaatctagtagtttgggaagatggaatgctgaaaagattcccttgagccatagtaggacttcatatcattctctcatattatctcatatttggatccacaatttttacaggtttttgatttatcagaagaggctcctgaaaaggtgcttcacagattgtattgcaactttgagaagctcaagtctaatggcgaccctattgcttttcaaattcagagcaacctaagactaattgtgagtagcctaactagaaaacataaagaatgatctttttgctttaggatatgtcctcttaactaatgatctttgaaataggttgctggtggtgatggcacagcaagttggctgcttggtgtagttagtgaccttaagctctctcacccacctcctattgcaactgtgcctctgggaactggaaacaaccttccattctcatttggatgggtatgtctatgactattgttttgttccaacacatatattctcttcagttgtgataatctcctccctttagataattcacgcttgttgtgaatttgtgatcatatacgagctgtttttgttgttgagctgtttgacaacataagaaggtttagcattaagaaacatgcatttttgaattaatagtgaaatagtgatcatacgcttgatacctaaattttatgtcttattgactgtgagctgtgaggggtgcatgatttttcattctaaagtagaagattactgaatctgagattttcttgttagtttgatctggattccttggccgtctttttacctagtctgcataatctgcagccatgatctctgaatcttccctggcatctagttttatacctctattaaatttaatttgactgcaggggaagaagaacccaaccactgaccaagaggcggtgaaatcatttcttggacaagttaaaaaagcaagagaaatgaatattgataggtaatatctcaagcacacaatgttatatttgtttctgttttttctgtcatgcttgtgaaaagtacaagtcctgcccaataattcactgcgacagctctttcatatatgttgtgtagcagtcatttttagttttaaacatgagtaaaatgtaatcccttatatattctgcatatgaaagaaaacactcatttgaatgtacttttttaagttggcatatcatcatgaggatgcgagctccacaggaaggtccatgtgaacctattgctccgttagagctgcctcactcattgcatgcattccaccgtgtatcaggaagcgattcacttaatatggtaagacaactcactgtggatactgtttttacttgattctttctattacagaagtagtagccaatagccatggactttcacttttgaatagtatggacaattggacaggctgagaactgaatatatagatctttaagcttgcttagcagttttttcttttatatttttgttcaggagggctaccacacataccgtggaggattttggaattactttagtatgggtaagagttcctctggtatccaaggcacagcatgatgtttttttttttttttggtttatgctagttcttgctctaacagatatcaaacagtcaccgttgttatccagtaccttttaatcaggacttgttaacaatattatcgtagaacatattttagtatcttttaagcatatcatgattaataaggcagtaatagaaacatggtcatcatgacttcacatactgcagggatggatgcacaagtgtcttacgaatttcactctgagaggaagagaaatcccgagaagttcaagaaccagctaacaaatcaggttcttctcgtttctgtagggcaagtcttgtggcacatttcattttgtttatgctgaatgttgtgatgcatttctttgatgcagagtacatatgct

SEQ ID NO: 5229 - DNA, 97724 bp, Oryza sativa
aaattgcctatatcgtaaataaacttttaatagtgaggtatatgatcattacagtttcatacctggatgattacattgatagactttttatgcccttcccttggaagctcaacctgaaagccttcaacacaacatgtggctttctgaacacaatatgcaagacattagtgcctcaaaccgacattacttagtggctcaaaccataaacatgaaggatccaagctggttttcaacaaaccttgataaacaaacattagatcaggcctcaatcgtttgtcgtttctttacttcacttttgtaagttgggtaactcgagtaacagaaagcacacaatttatacatgatgcagtgacgaaagaaagaagacgaactcaaaagaaaacagttcaaaaaggggcacagcgagctgaaaaaaagacgatgcaaatatttggtttttaagaaatacatatagtttgttagaacaataataatgcagaaaggcaaccaaaagatgcgcatcttgttctaaacattagacatttgtttcaccaaaaagactgaccagctgaaacatctatgaaatcgatactaaacatcacgccaaaccatggaaatggagctgcatgttttgctcttttgtataatacaaactgcaaataactcatcatgagcttagccgcttgcatttgacaaaaagttataagatctcttgtttattggagctgtggagaatacatcagccaagcattatcacttggaaagtacattccaaggaagaaatttgacaaagcaactactaaaaccattgccaaatgataatcatgattcactctcctttgcttgggccattagctcagcttgcattctctttatctcctgttccctttccatcctctctttctgcaagaacaaaaccactttcagcatattccaacaaacacagtacatgcacaaaacacatcaatttgcacacggacttccaactttcagtcgctgtggtttcggtggtgggtgtgtatatgggtggacaggtagaaacttgtctcaagagcacataggagtacagaacaccaaaacttgttcgcttgtctcaatctagcatttaaaaaattctgacagtagttaggcacctaatgttcacttgtctcaagagcaatctagcaaacgaggagccaaaagaatgtgaacatgcatacaaagtcgaattctacctgtacagaatttcctatttctaaggagtttggtaacaatcctgacgcccaagacaattttgatagaccgatgatcaatcgcagcatcacagtgctggtggagtacataaaaaacaactgatgtgctattttttgcaaatagatagcaagttgttcatgagcaattacccttaatgtgagacaaatgcaacaaatgaagaaatcaacaaaacagaatactgatcctagacttcgtacataggttataagccaaccttgggtgattcaaccttactaccttaggaggagcccagcataattaaatgaatataaccatatctaatgtgtcaaacaggttactagttgccttgggcaatttacgcttaatatgaacccctctgtaaccacagggtgtacagcattcggcactgagtattaacttgcacaacagtcaggagtttgcaggctgcagcaattaatccacacaacataatcatattgggttcacaggcgtttctgctacgctgtgattccctagtgcataaattgattttcttgtgtgcctggtgtgccttaagatgcgagatgcaaccattgtttcctcgattaccacaactctccatgtttcatttcagatgtattcatttttttttaaaaaaaatgtaagccacgacagtgcagcacagccaccaacactgcagaaagccaaagcatcaaatctgaaccctaaaactagaacaaaccaactccaaataatccgcggttcatcaggtcaggacggatccggcaacccccagcacagcctaacacccacgcggaccaatcacacacaggcaacgcctagatctaacatgccaaactgatgaatttagtggggaaagatagattagggcaggagctagtgttaccttctcgtcctggtggagggcgatccagacgtggaccctgtccatggactgccagaagaggaacgcgccgaaggtcatggcgaagtaggtcgccaccttcaccatcttccttcttctcctccgatctcccaccctttcgctccgcggcggatttgggatttggcaacggcggcgtcttcgggacaaggggaagggggagaaagagatacacacagacttcaccaataggagacggccgtacaaactctcttgggctgagcgggccgagaacaacttcgctagatttttaaatgggcctcgttaactggtgggaccaaccgatcaagctagttctgcgtgtgagaggagaagaaaatatcgaaaatatatgtaaacgatcggtatatgattaattaaatattaattattttaaacttgaaaaatattttaatatgatttttaggataatttttcataaaacacaccgtttagcattttgggaaaaatatgcatgagaaacgagggatttttctctatgtccctctctctctcaaaataatcttatactctcttcatcccataaaataaacctaagacatgatgttgtgagtttgtccgaagacccgaaaactgtgccattatcaaatcgaaatttaaaaatagagaagaaacacaaatcacacctgttagcttttccgtattaaatggatattatcttcgtccaaaaagacatcatttatctctaacttatgcacctgttgacgagtacgtactgtactaagcaacgatcagagtgcaagcacagaagcactaagtccctgaccataagacatgtttcattcacagttcttagtatttccctatgaataacatgttcatttacagctcatactaacccttcagataagacatgctcttagtacttccttatgaatatgatgtaatagttcatttacagcttccaagaagcttacagatacatacgacaacagcacaaactattagtacgacggcttgcagacaagcaatcgtgcaaccatccgaaatatcaaaaaccgagttacattgttatacatctctcagttacatcatgcatcgccgcgcagagttgctaaaaagatcgcttccttttcatctctgttccttgcacatgcaagccatcagagcaacagttatatatgttcaaggaggtatacagtcgagccctatgttgtcttcttgtttatagagctttgtctgaccaggctagcaatcgtcaacttgtgtgattcatcgtggcaccctcattattgcagcagtccacttctcttcccccaacccatggctactatgtacataaccgtgcagccagcaatggttcccaaagtggtttcccaaaatttcatgtttgatgctcgtttctcctcctcatttgtaggatcagcataaagcgatataccgatattcatcccaaaaagaccaacaacggccactccagcagtaatgacaacagttgcagtggagagcatgacccccatctgtagaagttgattttgcttgtcatccaacatgatgttgatataatcttctgtatcatcaacatactctctcagctgcaagcatagagaagaaacgtcaaatctcaactgcacataaaacaacatgaatttggtttataaaccctcaactgcacaactccctggaccagtttcccacagttgcatgcgatgctcatataggagaatcaaaataaatcattgtaaagaacctcccatgaaatcaggaaaaaaacagagcaaatgccaatggatccatgaaacgcaacgcacaaccttcctagcagcccaacataacatgcataaaacattataaaattgtagattcgttggtaatatacttgctgacaacaaataataggttgtaagaacactttggagcaatacaaggaacagggaaaggcaaagtcattacatgagatagcttattaagtgtgccatcaatttgaacaaagtaggcctccaaaagcatctccagttcttcaatgtgtggcttatagccaataaaggtaccattgcttacatctgcctcacttctataatcttcatccctacacagatataaaattatacatacacagagacaacaatggctgattatgggtggaagagacacaaatacatcctgttttattctttcaaggaaaatgtagacatgttgtgctctcatgacttacctatccacctccagttgagatgggtcatcaacctcaactctagatgaagtctcacttatttcttgtcgagtaagcttttctgtcaaatacatttcagccatgtccatttcatcatccaacaaatgctcaagttcatccctcacctataagaaataaatattttaacaagggtggaatgcattcagagaatgttgaaggaaataatattcagaagaaaggcaagcaagcttgagaggaaactatggaggacaacaaaagaccgatgcttgtgtgtgcatgcacatgcatgcgattgttgtgggctgcggttgttgtatttagcctttgggtgtaagtggtgtgggggaagtacttcacacaactatatgaaggttaaacaagtagtgttgcagccagcagaaggaaaaaaaaaaatcatgtttaataacacctgaccaattaggaagttcacacatttagcagttgcacttgatcaaaaaaatatgtttgatggcataaacatcagatacacactcagtgtttatctccaaaccatgagagcaacataaataagatttaacataggtaagaacgaaagaacctacaggtaggtgacatgaagtgtgattgaaaaggtacaatttcctaccttctgcacacgaccagagattgcaaccaggcggctcttaatttgcctaactcgctcaagatttagtgtgcttatctttgaagtcagctcatcaagtgccggatacgcctcttgctccagagtcgacgtctgaaggaggaaaaaggtcagacactataaacatcaagtaggctatgttttacaggttgtctggtttcataagatgcatgagtttctccataactaaggttcagaacacctctttcacagcgaatttgaagaaccatgcttcatcaaatttctatatgtctctcctaagggcttggcctcaagttaataaccacttaaccagcacatgtgaagataaattatctaatcttctatgtaaaaacaatgaccacttagttaccaaacaaccgaaaaatgtatcaaagctttttattaattcagttccatatatgcattctaaaacttcaccaaactttacatacaggtgattgcataagggaaagcacttacttcctcttctaggcttctacaggctgactcaaggcacacttcaagtgctcggaattcgaagggtaaaactttggtatttccatcttttgcagcagtcaatgtgggcatactgttgctgtgagtcattccgcctaccacattggaattcttgttagtcatctccaattcatttggtgtggttgaagtcagagcaggaaatggtgaagtaactgcagatgattcgccttccatatcagtaaattctgcagcctgataaagaagaaaagacatttagtgatataacccctaacacggtcagcacatagaagtaaaccatcatctattgttctgcctatgcattatcctggaccatttctccatatctatctgcacctgctaataaactttgtcttggttacgattacctcacaatggctactatcagtgtttgaggaagagggggggggggggggggagagataaacaatggctactacgcaaagttcattgagggaacacaacagaaattaacaagcatctacatgtgatctcgcaaatgtactcaagaagagtcaagatgagtagggccagcctgattgcaattctgataaactacaattaaaaaatatataattccacaaggtatgctgccgatatacagtaattcttatccactcgaaccactgctaccataccatacaactcctaaaacatacagtctataggcaaaactgcaaaagggcaaaatgattagaacccgtacaaggcagttcaatccaccataatctcggacctcataccacgattcttcatataaattagcaacagggagggagggaggaggagatgttggacctggtcggaggacgaggcgaggacgcgggcctgcaggtcgcagacaaagctcgcgaaggcggggtccttggagttcgggagcagcacctcggcggcggtgatcacggccttgacgcgctccaggttgacgacgatggcgcgctcgcgacccaggatcgtggaagggtacgacagcagcgggtccagcacccgcaggtcgcgcgccggcagccccgtccgcgccatcaccgcgtgcttcccggcctcctccacccgcgcctgccccgacgccggcacgaccagccactcccggctcgccgcggccgccgccgccgccgctttccgcctcccgccgccgccgccgccgccgcccgccgccgccgagggcctcatcctctctataccctagggttagggtttcgatcgacggaaaccgtggaaaggggggatgagttcgcgggagccggatgtcgggagatgcggcattcggcggtggttggctcaggagagacggattcgtggggagtaatacgcgatttagacaagggtgtttttggaaaattacaggatcgctggaaattgtggagatcagagtaagagtaagggtgtttttgcaaagtttttttgacatgagagttgaaagccatcattagccgttggattaatgcgggccagctgcatatgaggcgggaagagaagtgacgctaccatggggttggcattccttcggggtgatacggcaaactttgcatctgcttcatgtagagcatccatacgtgaccaaccgctggattcttagtttaagtctgtagaaattaaaaggagaacatggagataacaatagcatgtttgttattggtgctgattttctgaattcatttgttaccgaaataggtgcagtacgatgttagttacttgtaagatatggggggggatggaatctagctgttggtcacgtatggatgctccaaataaagcaacggcaaagtttgccgtatcaccctgaaggcagacgatgccaacccgccacaatgcatcccaaacagctaggccttcacttcagcgacgtgggcgaaaaccaatcgacgcaccgggccatcacgctggcaggaatttttttttgcaaatgcgtagaagattgcaaattaatattaatatattagatgatgccccacgctttgctgcggtatatatatcagataatggagaaatgatgaaatgatttggattgaaatattataaaaataatttgagaataatgatttagcatgtgaatgttttgttttagaatgaaataaattgtagatataattaatatgtgcttgcacgttgagtttgtgtgcataatgggtttatatggcatgcttgcatgtagattttataggagtgctaataaatactatgtttgcatattgagctttaggtgtttagtggacaataactttatagaaagaagatattagaaagagagttcaattatacaccacaatcaaccatagagggtcattgtccgggaataaggataaagaaaaaaaaactgagttaaaactggacgctacttctatacaagagagaggggaggcggagccccactgcactcccaacaagtccccaaaagacgcggcgccagcagctgagcataggtgtttttttagaatggactcgagaaccaccgaaactggcgagagagagagagagtaatctaacatagagttccgatccttctacagctactaggagacgaggaggactaaggaatcaaaacccttgtgacaatactcaggcaaacagaccatagaggtcggcctccagacctgaagagaggagccacaggccctaaggtcttgtttaaagagtttaagattataaaaaagctgattagtagctacggaatctggttcgtagtttattttaaatttttgtaactacactttttaaaatttcgataaaagaattttgagtgcttgagagtgattttgattttgggagaagctgtaaatgacagaagcccttcacctttgaaagcctaagaaattttctgctaagttgttggagaaggtatgccaactgtgtacgtgaaatagagttccctttgtttttttttaaaaaaaagatagtgttccttcaccagaaatatcacaaaatatattagaagacttccaggattcaagacatgtttctgttttcagcttgataaaatagcacgaggtattgatgacatgctggatgtattgcatccaagtgcaggtagcatatggggcattcgaatgaaatatatactgatctatgttggccgtcaagattttatttacgttatatatttttatagcgtccaaaccaatgagtacagttaatttctagcacacagtgatgttttcaagtgtggtattccagtttgttgaattgttgcatatttggagatctatgaccactgatgagaagcttgaactcagtgtcagtgagcgcttccgcaagtttccagataaggttttcgaacgcgtggtggagataattgggacaagaaaactagcaaatgagtgttcagcacaagaaaccttatgtggcttcatcaatcttcaactgtaagaggtgctactatttgatagaaggtcaagaatacatgaatcaggttcaacgcatcattggctcattgcattgttgaaatttcacgaaaccggcgatcattgacgaacgtttgtgtcaaattgcatgcatcaatcaaatcgcctcatccattctggcagctcaaaggaagctttaaagttatcgtcgtccgttcttcttgactttgcttttccaaaaggaaacatgatatgatttgcaccaagataatggatggattggaatgagagggtgagatatcggaagatacggtgtggctttaaagcatattctactgcacaaacagggatcttccccggctatggtatcaatgtttcgttcataaaaaaaagttattatgttatcgattttcctttgccgtcccttgcgcattaggaagatttgacatggataacgaaatagttccgttgtgttacagggatacagccagaacatgctatatttgcctatctaactcaatttccctgcaaaatttatcacaaaaccatatatttagtgctaaattgatcacaaaaccacacattcagtgctaaatttatcacaaagatttcggagcttgaatttcagcgtataaaccattttaaaacttacatgctgagttcatttttttgtggtggtggtagggtggggggagggttggttcattgtactttaattttagcaattgtttttttaactgtatgtaatataaatataaaagttgtacatataaattattatttattgcttatatggtgttttgcggcttatttagctgtaagcaaaacaatcaggttgatagattttagttataatatcacaaaatcacatatataccatcagttttatcataaacctacatattttaaatcttagatttattaaaaaaaatacagattttaagcctccattagaataacaatgttaggatggagcagttataatatgtaattttatgataaaggatatgctgtatatgtaactttgtgatatttatagtaaatttaactatatatagttttgtgatttttttttcaaaatatctacagctacttgaaatttactctttaaggaaaatctctctaattgaaaagctaatcccaagacgcaacatggttgggccacggaagcaacaccaagtatacccgtccgattcagaaaaggacaaaatagagagagacgatcgtagccattagatgagagaaaaaaatctgcataaattcttcacgaggctttgaggcgaaacgggcaaatggcatgatcatgaacaggaaggaaaacaaaatgagcggcaaaggaaaaaaaaatcctccatggtcactctcagaacctgatccaggcgctactcttcaagagcaagatgacttcaatgataggccggtgaagtgcggcggaggcggcttgatcttcctcatcatgccactgagtctgcctccaccacctcctccaccattgcatccactacggttcccgcctcccgatagctagatagataggcggagcgtgagagataggcggaaatggaaggaaaagcagaggaagaagatcctcacaggctttgctctgcctcacgcggatatatcctgatatcgatgccagcaaatctcgagctacagccaatgtgcttttaggagaaagaaaaaaaaaagatacaacaatgaaagaaagaaaatccagagagaaaatgatgtgaacacactcgcgaagggtggcccgatcttcacgacagtaggttgaaaaccaaggataacttgttgtagaaacagtgggtaactagctttataactgctaaggttggatgcgaccaagcgacggggagagagacaccgaaaccgtgagaacttcgactcgatctccgaacaaccgcaaaaccacaattcggaactaatccacacaatacggtgcagccaaactagaagccgtggtgcacgaactaggggacctcagagagatcttcctcacaagtccaaaaagaactcgcaagaacaaaggggtgtaagacactcaagcagcttggctgaaaaaaacattcaggttatcaaatcatcaaaagttgtttctgaaagcacataaggaatatttatactaggaacaaccctcctagataggtatgaaaagtcttgaaagaaggacatagactagcccaaaggcctcaacaagtgaatttccgagaagactcgcgcgtctgtttggcttatgagtagccttcagtaaaaaaaggtcgttactccttattggaaagtccaaatgacatggggtcagttgcgttggaaagctaacttaataagctttcacaccatgtgcataatgcactacgaaatattatagattgatacagttttgcatggaaagttaaatgtcatggcagactattggccttcggagcagtgtccactaatctggccataactctttagtgggaaatccaatggacgagcggtttgttgggtgtgaaactagactcaataagctttccaaaaaaaaatgctcattcaccttcatagcttttgagaatcaaaagttatgacgatttcttaaactggtctgttttgaagttgaactggtccgtttttcactgtagcggtttgatcttcatggtccgattcagcttcctcttgttgcataatcctaagcgcaaccaaagtagaacatttaggtagtataacattctcatctatagatgcatcaaatgtagcaaggagtgagttcacctgttgttgtagtttctgcgcacgactttgcgtaatcagtccttccattacttgatcatgtgtagcagtagttgaacttggtatagtcatgattgggatgtcctcatcagaaaactggcgactagcaagagacagcgacgcaggtgccgccggagtcagatgatgcacctagctagctagctgctgctggagaatggagatgatcgaaggaaatgaattgagaggatgaataaaagagaggatgagagatggaacagctcaccgctctagctagctgcgcctgcgaccgcctcgtggcttcttactcatgcctctttctcaatatcacgcctataaaataaaattatttatgaaagcacccctaggtaagtattcataatttttgttccaaaaaaccttgacattttgaaatttcaagacatcatattcatagctcaactgacagtatgcataacatgcggaaggacacacctcctctacagtacttccaatgtaatagcagtggctgatacgggagtctgattccatatattagtgtctgcggacaatctcattgatacagtaggagtatacagctatatacaggttttagttctattcatttcatataattatgagctaaatatacgtgctttactgaacatagaataaaatttactataatattacataaaattcaaattcatcttaatttaattttatatgtcactgttttatttggatttgattgaattttaatatttaaaatgggtaatttataaattttactatgagagtaagtggagtaagtggaattttactataaaaatgggtaacgagcgtcactattttctctaaagaacatattcaccactcctaacaggatagttaaaatcacctaaaatgaaatgatgataatccacataacctaaaaaattctagcgattggatcaacataaagaaaaaaaaaggcatgaaaaagcatgctcacgtgtgtagcaaatgcgtgaaaattatttctatatatattttatatttttttacatgttctcaaataatataatattattaatagattttcttacactatttatagtaggatggccatagtcgcgtgaatgcgcgagtacaaagactagtatattgtgaactacttcaggtctaccttgtttggtttgaagcaatcagcgactcaaccaaatctttataattttaatgaaatttgattattaatataaacactattaatattgagtagtaaagactatgatgcttcctcattaaatgagagattgttaggagtgcatagatgatttaagatcaatagtaaaaagataaataaagatggttgatgggatagacaaaactctaggaatacttacatttcgatacaaattttaaagactatgatgctactaaaagaatccacaatgtgtgttttgtaggtactaattaagaaaatctttttcctaccagccggccgtatatattgggcggcatgggttatacgaaaaagctaaaataatcgttcttctcttgtgatccaatgctttaaattagtaataatattatttttaattgtttacaactgaagaggaaaaacgagagatcgtaagaggcctgagttcaattttttgtttagtacaactgaagagagaaaaaaccgtttacttttttcacattgtacgactttttaaaattatatattatcaatcatggaccacatagtgccacgagaaaataactatacattgcacgaatcttgctttgctaacccgcttttctttgatgcgtgttgctattacctcgcggtgaaactatacagtacgttttttctcctatctaatactccaacgggtttcaaaaaagaaactatatacggacgcccttaataatggcaaagttgacacactgttgcgacagcaaacctacttgcctgctactaccctgctactacgtatactgtactgtatacgtatatcaccagactgtagtctgtttattaatccgcacaaaaggaaaaggaaaactcagtcggccacacaccacgtagcgtcacatcatcctcatgtaacagcctagctacctcacacgacagtattggttttccggccgttttcgatcgcctgacgcccaggaaaaagccgctattcctgtgaggccctgacgccgaccgaaactccggtacagcatatgagaacaaccacctaaccacccttcatccatccggttaaggcaatcatgcaagaagcaaacaaaaaatccgtttatgcctctgtttaaattggtgaatgtactgtgatagccagctattaaactaactcatgccgtaattaatatgggacaaattaagtatttcatagaaattcttatatattttagtttggaataaatttaagtgatagaagtccttatatttgttcacaacagcagacgacgtcacaacggcagctaatgcttctttcttttagagagagagagcggcacagcggctacagctagtgcgagccacgggtgcatatgcgaccgagctacaatgccgtcgaattcagctcatgtttccttccacctttttaatttctttaatttgcatgtctctccatcactaccaaattcggctgatcattcatgctttccattgatccccttctatatatatatgtatgaagtgtgcgtgtgtgagagagtgtgtatgtatcagtttgattgcatatgaaatggctgcttcatcgctcgacgccgaggcagcagctgcaggccaacaagacaaggccggcagcggcagctacaccactgcagccactgctcatcaaatagacacaggtgcaagcatatccatggtgatcgatgaacaaaccagcaattcttgatcttatccgttcgatttatagcaacaagaagcatcaggatccacgcattcttgacacatatattgaattgttaattattgatcggttttagtttaatcgttggacatgtacacatgtgcatgcagattcatggcagcaggtaggggtgctgctggtggtggggttcaactgcgcctacgtgctgagcttctccaacctgatgatggcgccgctgggttgggggtggggcatcgcctgcctgctgttcatcggcgccgcctcctggtacgccaattggctcctcgccggcctccatgtcatcgacggccagaggttcatccgctacagggacctcatgggcttcgtcttcggtgcgtttcatgtcagagaaattgggttgattaattagtgagatgaatagatgattaagttagctggaggctgaaaatgcagctgacgaaccttgttaatttacacggttttgtttgttttgtgaagggaggaaaatgtactacatcacttggttcctgcagttcatcaccctgatactcggaaacatgggcttcattctgctaggcggaagagcactcaaggtacaaaatttgctgttaattgtatcgaatatccgattagctgtctatctatgaccaattgtaagctcgcagtttagttagccgatttagttattcatttttttttcactgcaacctgcaggcgatacatgcggagttcagcagcagccactcaccggcgaggctccagtggttcatcgctgcaaccggattcgtctacttcgccttcgcctacttcgtgccgaccatttccgccatgaggaactggctggccacgtccgccgcactgaccgtcgcctacgacgtcgccctcattgtcatcctaatcaaagacggtaatcactaatcactacagtatagtactacatgtctcaagtattctctgttgcggtgctctataatagtagaaaacaatctaaacagttaatcttatttgatcaaatggttcatatttacattatcaccttattagttagtaatagaaacatgaagagatattattatctaagaaaaatatgtgcggagagatataattgtcattagcagtgactaaactacagtaacataaattaattatagttattactattattaatcatggtattagtaaattactaatttacccctaataatactctcagcagagaacatcggagtattaatctttgatttgatcatacatgttcatgcagcatctgatcgatcgaacaggatttatatgttttttttggtttcgcatttagggaaatcgaacaagcagaaggactacaatgtccacgggacgcaggcagagaaggtgttcggcgcgttcggcgccatcgcggccatcctcgtgtgcaacacctccgggctgctgccggagatacagtcgacgctgcggaagccggtggtgtccaacatgcggcgggcgctgctgctgcagtacacggccggggcggcggtgtactacgggatcagcgtggccggctactgggcgtacggcgccgccgtgtcggagtacctccccgaccagctcagcgggcccagctgggccaccgtcctcatcaacgccaccgccttcctccagagcatcgtctcgcagcacgtacatatatcatataccacattcttctcctcctccccgttgatggcgtgagagctcagcctagaacaaattaattaagctttaagcggattgatacattttagaaacgtggagcaaataatccatattaacaattcgacaaataatatgaaaagaagccataatgatgtagaacgaaaaaggtgtaagattggttgagtattattcactaaaaaaatttaaaaaatatttatttaatttttaaagcattttttaaaaaaatattttcacaaaaaatattgtttaacggtttgaaaaatatgctaataacaaaattgtagagtaactaagttgaattttagctctttagggtagggcgtttaatttgccgtggattaatgcgtgcgtgcgtgcgggtggcgcagctgttcacggtgccgatacacgaggcgctggacacgcagatgcagaggctggacgaagggatgttctcgcggtacaacctcgggaggcggctgctggcgagggggctcgtgttcggagccaacgccttcgtcaccgcgctcttccccttcatgggcgacttcgtcaacctcttcggctccttcgtcctcttccctctcaccttcatgttccccagcatggtcgtcctcaaggtatgacgacacatttctgttgagaaattgatagcactataattctatcaagatcatgatggatggatggatggatggaatggtgatgtgcagatcaaagggaaggatgaagcagggagatggaacaggatttggcactggggcatcatcgtcgcctcctccgtcctcagcgtcgtcaccaccgccgccgccgtccgtctcatcgtccacaacgccagcgtctaccatttcttcgcggacatgtaatcaatcgacgccggagattaccatttgcaccgtcgattaccatttgcaagtgcagtgtgctgtgatcagccgggtttagagctttgcattcttccattaaggatgagattgcaagcgcagcgctgtgattagcgggtttacagctttgcattcttccgtaaggattatatcatctttgacgaacacattggacctaaccaatgttaagctatgccaacctattacacttgacgccgaacacgatattatttttaccgaggacggcatgataccagtgtaacatagttgaggcaatttgcaggtatgccggcatcagaacaaaagcaggggacaaattcactagaaaaaatggcaccaaaaaaagtcactttcaatcatatacgaaaactgcaaatctttacaaaaacgcatgaataaacaaacaaatcttgcatgaagacggcactggaaaacgaatcctctaaaacttatgtcggccacggtgacgaaaccaacatcgcgatatgtacaaatgttcgactaatcagacagactcctgttcgatccatcaggatttctccttttctttcttttcttcaattcgttagaatattttatcaacccacttcttgcactggagttcggatcattcctagtgggtttcaatacttgagacatcccctgctccacaatcttggagcagtggattgctggccttgcgatccttgtcgatgcaaacccagtacttaacgggcttgtctgcaagccgttcaaaggctttgcatggattgcacttgaagcatccaatacaatccatcgcccaatgtgacacaaggtggtctccagtatgccacccattcgcaaatgatccaaactgccattgctagtatagctttattcttgtggagattggactgcgacatattgggcacgattcgaggctctgcccacaatcacagcaggtctgcaaaattatatactttgttagaaaaggatgctgacgctgacgtttcaacaagcccacaaaagcagaaaatgacacccccaagaagcaagaaaacactgaatctagcaagagggtgaatgtctcacctggtgtccgcagccaaacgccatgtctttggggttcacaaggcagattgggcaaacctacaggagaaaaagaattatttaagacacaaaattatgcaaatgcctgccttaagaaacaagcaacagatagcatgttgtcaccgcacgcgaaggtatacctgattgtcataagtagaagaaggtacagcagggctcgaactctgtgcagtttcatagtgaggatatgacgatgatgatgtactactctgtgggtaggtacttggtttactaaagctttttgatccatacgagtaagcatcatggcttccaccagggggagggagaggaaccctttcaggcgacttgaaagagcgacgactgatgccacatcaatattaattttagtcagaatactacagaatgaatcaataattcaacagatcaaagcattagagtaataacgtgttaggggcgtaccctaaaattcctaattcaacagttgctttgtattgctgaggtatctccatcaaggctgaaagtgcaaatgctgcctctttccttgattggggcatgtttttgttcatgatctccgaaaaattcacaaactacacagataatagatcctcagtaaggagtaacaaaaatttcatctaccatatacaaacatgcctacatgggttcattagggttctcagtgacttacttgaaaattgtcaaaagcacgagaaggaatgttgtcgtcaaactctttcatcatgtcccaagggccatcaccaactcctactagcacaatagacaacggcaattcactgcagacgaaaaccagaaagcaaaacatcagcaacatccatgacagaggcaacgcaaactatgtgaacatataaagtaatcgccacaaaaacaggagtcaaaatgcatgggagttacaggcggtatgagcatatcaaaacaatgtaaaaaaggaacttatgaagtacgaacctagctctcacaatagcatcaacagtcttttgctcttgtgaactcagctgcccagatgcagtgtctacactccttgtaacctgtgataatatgacagctaataaggtataaagaaaatgaatgtctagtcgttaggttggtccaacatgtagaacaagcttcaaactaagaataacctcaaataaaaaattgctcgactaaggatcatgtaggacagagtatcaaatgacattacaacatgcttcagatggaacacaagtggacatagaacatgccatttctaatcctcaaattcaacagtccaccgatcccagcacgtgaaactccatatatgaaaaacatgttttgtcattcaaagctttaaaatagtgaactgaaaacaacgattcatatggggaaaacaaaatttcagcatgaatgttttatttaacaaaaaaaatatttccctttgtgtgttttacacagtacctgcccatcagcaattatcaacagaacatggtactgcccgccactttgttccacgatggtcattgccatctcaatgattggtgcaaaggatgttggtcctgttcaaaaaacaacattccaagtatgaattaacagtatagaaccagcataagaggcatcactgggcaacatcagcttaccagctaagcgcaagtgtggaacaagttccctgtaccggcttagagcttctgagaatccattgcaaggtctcaaatcaggataaaaacagaagacgtcttggtcatgtgttgttgctgaaaaaacacacccagttgaattatgattggacaaattataatatagtgcgagaaatggtcagctaatgaatagaatcgctaccatctccaaatccaaaacagggaatcaagttatcttcatcaaatttcgacagtgtctgtccaatgatcgagattgcttgttcatacggattaggtgcattgctaatgtgatgtaaactgcgtccatggaaggaaaattttcctgtaaatgaaaacaaaccataagcatcaaggggcaatgcaacacaaaagactgataagaaaataaaccaaacaacgatttgttagtactaacctaaccattcattgctctttgtgaaatcaatgccaacaataagattcgaagactcaagtcctgcttgagctagtgcatcagtaacctgcaattaatattaatcctgagcaaaccaattcatgggaataatagcaacacaatagaaactggattgtttgcttatgtgcctgattcttatactaatggttatgaggccagaatacagaaatgttagaaaagtttaaatacaacatatgaaacaacttttaccgataaacaactaattgtgaacaatagcgtaatgtgctacgcaaaaaataaaaaaaaaacattcagaaaacttagacatggagttagtaatgtaagcagaaaattggaagtgtgaaacattaaactggtggaccagtttatcccaccaataaaaataaacatcctccaattgccgcattttggacattgaggcaaggagcattcaggaagtacagaggccagactcaattgattaatgctaatttgcgtactcataagatctttgagaattgagaagaccaagcaaaagagaccaactacaaccaataatgatggttggccgaaagctggagccgccaataatgcccaacctcacaacaaacatttttttttaattcttcatcaacagtgattggcagttgaccagcaggcttaacgagtcgtctccttctgatttttgcacaaacatcaattcgatccaccactacagatcatcctaatctgaagtttcaagtggctacagctacagattgaccaactatgaagtgcaaatcggtaacgagcgattcgctaacaatcctaagatggaaaaacaaaaaaccgcgattaagggagaaaggcctacacgagcgggttcgaatcaaccaaatccgatgctccgaaaagcaggatcgaatatccaaattccacacgaatctacagaaccgcaggatatgatgctcgggcagatacctgatccacggagtggtagtcgtcggcgatccgcgagtagcggcggtcgaggcgcggcttggacgcgccccccgcccgggccggcggctgcgtcgccgctggggacggcatcggcggcggcggctgctgataagccgggtacggcgccgcgtatcccccttgcggcgccggcgcgccgtagtagcctcctccatgcgcatcctgcccatagggatacccaccgccgccgccgccgccgccgccaccgccaccgccccactgctgctggaacgacggcgagtggccgtacctcccgtggccgctcccgtcccgcgggctcctcgactggccccctcccatctcaactagatcgaccaaggaaaaaaatccaacaaaaccaaccaaccaaccgatcgatcgatcaaccaagcccgcgacgcggggggcgtatatctcctcgtgcgcgacgcggaggcggcgggggaacgacgacgacgaccaaggtgagtacgcaacgcaaccgctcgcggcgccgcctttgcggtttatttttcgggagaggcgcggcgaggcttcggggctccttccttcgcgttgcgtcgccgcttgggacttgggaggcgtgagctggtggtggtttggctgcttctgcagtgccacggcctcacgggtgcaactgtgcaaggaaggaaagacagtagtttggatttactccggtatatatacaacgcgtgttcgatccaatcaccacacggtccacaccgcatttggattggagttggagtttttcctcgtcaaactcctcacgtgcgggaaaacttcacccaggtttaacttcaccgcgtttaacgtacaatagcattgggaatctgtttcagggcctgtttgaaattttttgagtggattgctagaacatattatttatattttattaacatggtaaattagtattttataaaaaataaaattcacaaacaacttataaaaagtggcctatacattgccgcgaagaaattttatgaagaaatttttttaaaaaaccgtaaagcaaataatctaggacaaaaatcaagaaaaaattgaaaagaacaggggggcatgttaggaattttttttggtggcagttgaaaacttgaagtgttggatttattggactgggaatccaatgatggggaattggacataccatgggcactcattaaaaggcaaatgacttttgtgggagccatgtgatgctgacattgtacacattttatcaccaggtgggcgggccgcagaggtaaccgtgatcttaatagattagctaggaaaagtgttaatagaggttgctcgggcttgaatggaatgtttgtagtcttctaatcactactacgcgtaaaaaaccgtaaaattcatactccctccatcctaaaatataatgatttttatgtagtgtttagtcaaccatttttaactttaactattaataaaaaaaatattactagatttattattaaaaaaactatcataatatgcaactctttttatttttttaaaaaaaatcttatttttacagatattgttggtcaaagtagcatatcgaagactataccgaagtccaaaaatacttatattttagaacggagtgagtaacgttttactacaattgttttggctaaactattagaatatgttgtgactctagatatagtattttagattagataaattttgctatggtgcatttaaaatctgtatattttactggtatacatcataaaaacgtgtcaatattgaaagacaccttaaaaaaataataatttgttggacacactttcggtataattaaagagagaaaatctttgaatagatcataatacctctagtgccacaaactttctaacacagtgttgaagtgaaaatttgctttcagattattgcaatgtagcacatggttttattggaaaactgtaacttccctcatagtctattaaaaatattaatggatgttggatgaaactgagtttatgactattattcaagggtacaaataatcaaatacaaatattagaaagttaataaaatgattctaaaaggttttctaagaaataatgatgaagttttttaataaaaaaatcacatcatttaagatgttttagaaagtgtggtcgtggtaattcagtggatgtaatcgaaaaagaatgacttcatataaatatatgtcatattgtttgtgggatcgcggttattgataaagttgtcaactttgttacgttttcctcaaatatctcaataaaaagtagtgagcaataatttattcagaaacaattgcagtcttgttatattttagatagactccgtatgtaggctttttatggttataattagtcaatgtcatggtttgtacaaattcctcatccgccatttttttttatatttaagatgttcttggcatgatgttataatatatttgatttggcatcatttctttagaaccccaagacatggtctgtaaatttaccttatgatgttatgtatttgatacacatgaggtaccttgttgaagccttggggagataattcattcaaaaccccgcacaaaaaagctaaatctatcactcaattttgtgcatataccacttcacaacctaattgatagttatagaagtttttttaataaaaattccgtgccaataccacttcacaacctaattgatagatgtagcatttttttaaataatgaaatgaatatttcagttgttgtaaccgtccatcctatagaaccgtgtagctcaaaccatccgatagacggacccacttatacatagtaccctgcttacactttcgttctctgtgtataagaattaacccataagtggtatggttggagcgactcgttggttccactttttctcaactagcaagcaatgtagtactaatcaagtgcacatgtcactcatgtgctacataggccgcatcctaattgaattagaatgtcacaactgcactaggatatgcacaaagatattcttagctaatatgtcatttaagatttataaatatatacacacatgtaatatgtgtatgtagtgaattgcttagattgccttgctgacgagccaatacaattggatcacattacacatcaattgtaatacacgtttcagtaagtgtcaataaacgcatttgagtggtcatatatgttgaggaattacatatttaagaacctgtccattattataaaaaaacatatttaagaacctaatctcaagaacttcttcaagttattgcaaatggccacatgctaccactaactattggtccaagcaaataattaaccgcctaatataatgattacttcaacgttccatggcaagttggccgattgtactaaattaaaatatgtaccaagtgcagtggactaaattacgatagataaggtatgcttaaatgtttagtttgatgtcatttgaatcgttgaatgggccttaaataaagagtttcttaaggctacgatacactaacttagttttatttttacaggtgcatcggctatatatgcatgttatccaaaaaattctccagccattatatcacacttaaggccttttctttttaccttattcaatcaccggatactcgttccgtgctttaaaaaaattttcttctactgcattacttaaaccacttattttaaaaagttatgtattatgtttatgttttaaaaatatagtttatccgtataataaagtcgatagccagcactgtacgtaataatttgctcaatactctaaattaaacaaaaactacttgagattaaccatccattgggctacatcccatttgatactttgcaagtgaagaatatataattgactttacctacaacacactagtccactctaaaggaaaataaataagtagattcgcgggactgcccgcttgcaccacctccaccaccaccggccagatttcgttgaagactatatgtgttatgcagtcttcaacgacaacggatttatcaagtcgtgttagtaataaaccggtaaagtggttggcattttccttgatatacacctcattaattataaaacacaaagtggtagttctacaataatgaatgatatcgacaagctatccactggctatatatatcaatatatgtgaattcgcaatgtatttgtacgctagctagtggcgatatgatatatattaacatgatgatatatacttaactcagaagaaaccaaaagggtttgcctgctaatcaaggttagcagccagctgggaaaccaatcggtcatttcgaacgaaattgatcatcatatattcatatatatactgatcgatatacacctgaatcgtcatcttcaccgggttggcgcagccggaagtattttattgctgcttttttggtgttgacgttaattggatttgaaccccaggattacgtgctggaccggattaagtaacaccaaacacatctcgtcagtccttaatttatacggcccattttgctaatcacattagctgccttgctctatcggttaattaatgctgactaattgccaggttgcaggactaggggtcaaatggttagtaggagaaggaagcgcggggtgaagacgaagacgaggaagaaattaggccgaaccatcctaatttgcaaattgtccactatggtaattattttgttggagtactaaaagttcggcaaacggcaatactagggttgtgtttagatccaaagtttggatccaaacttcagtcctttccatcacatcaacttgtcatacacacacaacttttcagtcacatcatctctaatttcaaccaaaattcaaactttgcactgatctaaacacagcctagcttacgagttgcaaaacgcgaaacccattccacaaaggaaaatgggtacgtaaaagcgccatccttttctcgatggcttagctaccagaaatacagtttctagattggctgatttgcctagtactcgtctcaaggctttaacaaaaatagcatttgaacaaagatggacgaaacgtacgtgtcaatatgtcatacggagtgatggcatacttcctccggttttattttaattaacgctttagacaatgacacgctttacaagatatacctttaaccttatttttttattataatatatacaataaataaatgcatgtatatttttattatagtgttttaaaagacaaatttatagttttttaaactaaatatttttaaagttattgataattaaagttataaaagtttaaccttaacattgtccaaaatattaattaatatagaaaccgagggagtatatacgtatatatatcgagaaaaagaccttttcaaacttgccagggacgacgcgccgtctactactctaccactcgtgtctctcgggtttggattagtttgctgtgtttgcgtgcgtgcgtgcgacgcgcgaggccaagaccgccaaacaggaagccaacttccccgcgaagcgacgcgtgcgtggctggctgccgcctggtgctttcaactccctccgtaaaaaaaaaaaaataaaccgtaggttttcgtaccaatgtttgactgtccatcttatatgaaattttttaataattagtatttttattgttgttagatgataaaatatgattaatactttatgcgtaacttatctttttaatttttttcataatttttttaaataagacggacggtcaaacgttggatatggaaaccaaggtttgtcttttttttttttacggagtgagtagccatctaggcggagtatatgactctatgaccagcaaccagacgtccagatgtgttcgcgtagcaaaggtcagatttcggttggttgtatgtacttgtatgacgaccctgtcctgatattgatggcgaagtgaattgccgtgaagcctctcaaatgaggaggagagtttacctagtcggctggtccatgtataaactgtatgcatatatgtcactatcattagaatgttctgagtctgtgtctacgttaaacttatgacttatcacaatcgacaggcgtagctgtcaaatttccaattttcttttccggtgaggaactgaggattatacgaggtcatgactcatgagttttttttttcacattttatcggaatgacactaacattacaggcactaatgtatagggcaatagtaggttggaactcgcataccagtaactataatagtaatgacattatggtagacgatcctcacccggattttgtttgggcgagaaattggattaaaccagagattttgttatacatttgtcgataaattttcttctaaaattttgacagatgtaaatataatacaatcgtaatgtaattaattacattgtaactggtaagtaactataatataactcgtatgcaacttcgtaaagttttaaacattagatttgctttagaatttgtgcaagcgaggaagaaaagaatcacagttggcgcctatgtgagaagattaggtcccatgacctccgtttcacactaatagcatgttacctagagaattttgaaagttatatacaaattagattatagttacatgcaagttacaatgtaattacattatgattatactatatttacatatatcaaatttcttcgtttaaatttgacgacaaatagagtaaaatgtattcaaggtgagtcaacttggcaggtgagtgcaaattggtgcaacaacttgagaaataaacgtcatagtgcaacaacttggcagatgggtgcaatttagcgtaagaactttataattgaatgtataagtcataacaactttcaaggtgggtccagttttgatacaataagtagaagtgacgcgacaaataattattttgagatttttctatacaaattcaattttacgtacttatactaatgcaaatttgtgtaagcatatttaaatttttattctaataactgaaagtcaactaaattttactaagtataaaaatattatatttcggttgagatttgagaaggtgaagaaaacaaaatccaaaccgttggtgcaaattggttgtggaacttaattcttatggtcgagttcaagattataaggtaatatttgtaagattgctatatgagagcatattgattcagtgaaaaaaattatctaacactcatttaccagaacaacatatactttgctaagttgttgtaccaaaaaattaataaattgtatttgtattagaatacacccacttaccaagtaattacacttggacgttcaattatcaattttttatactatatcgtatctatctaccaagttgctagatcatgtgtaataatttactacgatgaaccttgttggcttgtactccctctgtcttaaaaaaatgaatctagtactggatatgacatattctagtacaacgaatttaagattataggtatgtctagatttgtagtgttaggatgcaggttagttttttatgggacggaggaagtatggtttaatatatttgggccgatttcaacccatcagatttgggctaatctttcaaaagagaacttatgggctctctcccttcagtttatgggccttccacagtaaaaagccttgtgctcttttccacttcgtcttcctcctgcgaacagtccaacccctccgcctccgcctctgcagtccgccgccggcggccggcggatggccgcctcccgccgcctcgcgcgaaagctcccgtctctcatctccaagcaccagcgcctcatctcgccggagatcgatgtcgagcaagccgccgagagccccgcgtcgtcgtcgtccatcccgctcgacccctccctgcccattctcccgctcgccgtctcccacctctcgccgccgagccctctcccggcgctcccctcggtgcacgcgtccaccccggccgcgctcctccgcatcctccgccgcgcgcggcaccacccgcgcctggcggcgctcgacctccacctcctcctcgcggccgcgtccgactccccggccttccgccccgaccaccgcctcacgtcactgctcgcctcccgcctcgcggaatcccgccgcctcccctcgctccgccgcctcctcgagctcgtcctcttccgcccctgcccctgcaccgacgactccatcttcgcctgccccgagctcctccccacattccgcaaggccatcctcgccttcgccgcctccggcgacatccccgccgcgtctgacgccctcgcgtccctccgccgcgccgctgattcacctctccccgccgaattctacaacatcatcctccacgcactcgcccgcctccgccgccacgaagacaccgtccgcttctacggcgagatgacctccacccaccgcgtccatccggatgtctacaccttcaacattctcatcaacagctcctgccgcgctgaaggcgttgatgctgcgatgcgctggtttcaggagatgcgacgttggagctgttcaccgactggtgtgagtttcaatactctgatgcgtgggttcttcagagaaggaaggtgcaaggagggcattaaggttgcacgcgagatgcttcagcttggatttgggctatcggttgcatccatggagatcatgatcaatgggttgtgccgtggtggggagcctctgaaggcggccgaggttttcatcgagtttttggtcgatggagtggtgccggaagggtttgattgcttggatctggttgagtctctgtgccgtgttcggaatgtggagaaagcagtggaagtggtggagttgatactggaaaggaattgggtatcctgcttgggtgtccctgctggtgtaacggttttggagtgcctgatgaaggaggggaagctggacaaagcatgccagatgatggggaggatggttgctgcggagatagttccggataccatttcttgtaactatatttttgaggcgctctgtgaagctgggaggacagtggacgcaaacaggctgaggctgcaggctaaagagaaaggttttcaggctgatggctttacatacagcatcattgtgcagggctttgggaggcagggaataaggaaagagggggaggctgtattggatgaaatgctggatgcaggatatgtaccaaacattgcgacttacaataggctgcttgatggcttacacatggggagatctatgcaattacaacaaaaatgttcaaggcataggaatgcagcaaactgaaagaatatcatagagatgaagaagctagcttggatttcagagagatgctagatgataccttctcaattgctctgatacaggttagaattttgccaaggatttgaactgaagcgtttctgattatacttttccactgcaaattactaatctcgattgcgtcacccttatgcattcttagtaaaagtgcctctatatcttctccacaggctctttcatgtgtgatgttaatcatatctggctatcggcaaacaaattgagtatttttatctatcttcatgcacattttatgtttattctgttaatcactttgcttagattcctagtaaggccttctatggaacaaaggaaaaaaaaggttgtcagggttgtttaatttatattatcttaggttgtaatgttttatctgtataccgtccagtggtcagttttaggtttttacacagatgcagcctagataaaccagaatttgctaaagaaagttaaatctgattttttaatagtgacgttgagcattggttttgtaattacttcatttacctcccggcgtaattacttcatttacctgttttgagtaccacttggattttttttcagggatcataaaccacatttttatagcatttttatgcatgtctctatcagtaaatttggtatggatttgaaatgtatcatcccctcagttatcttggctccaagaactgaataggaataactttgtaggaaccttgcctaagcaacgaagggtcaaatatttcatgaactcgtccttttcttttcaggagcttgagatcagagatcaatcagcaccggtctgccacagcaaccatccaagcctgagctgcgcgtggccactgccaaacgagttgcaactgcactaggccgaggttgcctatccggtcctgtttcagcccccagaacaccaccaccacctcatgctgctctgctcactgctattctcttggagcaggaggctgccgttgagttgctgctcaggatttccagtaagatgtttccttgcgaacacgctggcggtggtggcaatgtggattcagtcatcaatgatgggaaattgggaacgacatcagaggcaacaagtactgaactctgcaagagcctcagaattttctgaagggaaaggatgtgaggatggtatcttgtgcctgtgaatgtgacaagcaatgaagcaaatccctggaagttttgacatcggcttcacccaaaaacccgttgtcacatcaggtaccaaaaagttttggcaaatatattacaagatgatcttgtcaatctttcatatgttggatagaaatgctttaattttggtcgcttcagagatcatgcatctacttgtgacgttggctggcatgcatggctatttggtcatattggttatgtgtactttcggtggttgagcatttcattcaattatcatttttagattattgttgttctaacatatgcagaaattctgaagtagagcaaagtattcttgttttcatctattaggaggtatactcaaaattcgttcatttcagcttacaagttttgagtacatgcatgaacccttgggatttatctccacagagaattgacatcttctgattccgaaatcccaaccaaacttcttaaactggatttgactaacttgaaattcttcagtagtttaccgagccacatttactctggaacattggtcgatgcatacaaatactctgttttacttcatatttacacattttgtcaagtagagcaaccaatattctaccagatatccctaattcgttctaatatacccgtgaaatgcaatcgatgagcagcaaaagggtcagcaccgcgagcgtcgcagtgcgccgctcggcggcgggtcgagccagagcgtgcactgcggcttgacccagtatctgtacctgaagaaccaccggtcgaagttgagctgcgtgcggaaccggccggcgagccgcagcgccaccggcctgccgcccttggccgtcgcgttccgccacaaggccgcgtcctgccgcgtcacggacacactgctgaccaccaggtgcactctccggggcacgctgccgccgggcgccacctgcactggcgccggccacaccgcctgcgcggcgaccacgctgtcctcgaagtagaggtcgaaccgcacgtagcgcagcacgatgccgatcttggtgttggggttggagatggcggcgaggacggtgaggttggcgctgatcgcccgccgcgcgctgtcgccgcgctttgtcgatgtgcgccgctgcgttcagggtggcggaggtcactctcagccggggtgacttggggtggtaggcgagggagacggcgacggtggccaggcagacggcgatgatcagaagcaatacgtggatgtagaacaggatgtggcagaacgccagcggcttcctcttcattttgatctgatagtggagactcggtgtcagcggccgtgctgcgccgtcgccgtcgcccgggtgcgccgccggtgcgcacggttgtcttcgggatggtgatagtcctggctggccgttctccggctagcaccactaccggcgtcttctctgcctgctgctgttcttccggcgcggctgcgcgcggtggcgccgcggcgtgacgctgcttcttcttctcctcctcctcctccacccttctctgccacaaaggcacataggacggccgtcgcggcggcgcgtgcttctgccacggcttcgtcgcggggcgcgacgccatgccggaagcattcgtcttggtgtctcggctcgccgccgccgcccgcatgtggcgccaacgggcggttgcccatggctcggcaaggccacacacgtacgtgaaaggagcacgaaacggagtagctagtcagtgtccttgaatttatgggacgaggaagaagcgagaattttggagggaaaaggagaagaaatgagaattttggagggaaagggagagaaggaaggtatccttgcttatacagtggtagtggtactgactagtaggtggtagccaaggaatttttcgctggcttggcaagcgagcttacttccatttttctgaaaaggaacagagagcttccttcattgccacctattccaaaactagctcattaatccagcagagaaatcactctgtaacacatcaggtaacagaaggttttggcaaatattgtccaagatgatattgtcagtcatcctaatgttagagactttctgtttcatgcacttgagcagatcaaccccatccttgtgaagcattgcgtcttcaatgtaccgatatcgtgatcacatagattctattcatttcagcctaagtttcgagtacttcacggcttcaccggctcctggatttatctccaaggcaaaactgacatttgctgattcccaagatccttaaaccggtaatcactaacgtttaaatttgcaaaagtttatcatggaaaaacttgcacatttttgtcaagtagagcagccaaatattctttgcttgccatctctaattaactctatccttggttccataatcccattcgagcagcaaaaattgcagaagaattcaaattaattcaatcaaaaaatagctaatcgaagataatagaccagtagtttgtagtttgctcttctaggctgatgaaaacgaccagaaattaagcagattgacgcagcagcagggggacgaacgcgcggggtcagctgcaccgcgcgcgacgcagcgcgccgctgggcggcgggtcgagccagagcgtgcactgcggcgagacccagtagttgaacttgaaccaccggccgaagatgagccgcgcgcggaagcgtccggcgaggtgcagcaccacgggcccgcccttgctcgttgcgttctgccactcgtacacgtcctcctgcgtcatggtgacctcgctgacgacgaggtggacgctccggagcacgctgccgcgggggccctcgtgcagcggcgccggccacaccgcctgcgtcccgatcatgctgccctggaagtagaggtccagctgcatgtagcggagcacgacgtggagcttggtgttggggttgtagatggcggcgaggacggtgaggtcggcgttgagcgcgcgcgcgccgccgacgatgccgagctcgtcgacgtacccggcgttcagggtggcggaggtcacccgcatcctgggcgactgcgggtggtagatgaggaagatgacgagcacggcggcgccaacggcgatgaccagcagccagaagaggatgcagcacgcggtgaagcagaacgccaccggccgcctcttcttgtcgttccgagggcgcagcatcggcgacttggccggcgtccgcgccggtgcctccgacgatggcgatggcgatgcgtacgacccaggctcattgtgcggccgccatggtgacggagagctgcggcccggcagcgccggtgtccccggcgacgtgcgcggatgtcgcgccgccgttgcgaacccaggctcatcttgtggtggccgggcggccgggaaggtgcggcccggcggcgccggttcggccgggtaggtgacgccgtcgtcctcgtctctgatcgtgctggtgcgctcgatactcttatgggtgtctaagatcttcgccggctttaatcctggtggtcctaaccgcggctcctgcggttcttccggcacggcggcgggcggtgctgggtggccagcaggcgccgaccatggcgtccggccatggctaccctcctccgcccttctcagccgcgcaggcaggtaggacggcttcttccctggcctcctcgccagggcggcttcctccccggcgacggcgtcgccgtgaaccggcgattgcggcacttccgttacttgggtcacgaaacgagtgcgtcggtccggacgggcgctggtaccggcgccaccgtcgcccggcgccacggcgtgccgtacgccatggacgatctcttcttggcgacgctcctgcggcggcgcgtgcgtctgcggcgccggcccccgcgtcgtcggcgccgcagtgccggacgcacgggcacggctcctcggctcgctgccgcccgccggctgtttgcccatgtctcagcaagtcacacagctacacaagtgagagagagagagaggagaggatggagatggatcggaagtgtgagaggttcttggctttcttcttctagtgagcaattcagcgtccatgcacttgaaggagaagaggaagaagaagaagaagcaagaaatgggaattttggagggaaagggaggcaaggaaggtatcatttgatttgtgactgaggcaagcaacttagcagccatcatgtctggctgtctgaacatgcaatttcatagtattacactggagtacttaccactactagtagtagccaaggaatttttcatggcttggcaagagggcttcctttcttcgctgccacccagctccagctgagaccaaaacttgtactatgcatccagcagaaatggctgccatgatctgcacaaaagtggtttttgtcgagaggatatatagatgtttaatgattttatctcccattggttcattattactgggcaatctcgctgacgaattaagggtgcgtgttagtgacccatgttataagcagaggttaaaaatgaccttatcagccacactcaaaatgagaaatataattaacatataattaattgagtattaattattaaaaaaaatatattttatttttaaaatcattttttatgtaagaaaactttcatacaaaacatatcgtagcgatatgtaaaacgtgttaacaaaatttgagaaagtagccaagccaatcccgattttagaacatgcgctcaacgtgtgcttaggggctgttcaaattgatgccattttcaatcatatcatttttggtaaagttactaaaataatatctatgtttagtttgttgctaaatttgataaatacataagaaattctgctaaaattttggcaatattgccatcttgctaatttggtaagatttattttggctacaatctgaataggcctaaagtgcttgcttggttcggattcaggtgttcttttgcgttttttttttgatttttttctgtttaagaaaaagttttctaaatcgagatcaccaaaactccaaaaagcgatcgtgtttagtggacgagtctacgggtcgggcgcccgattggtttggagaaaaataagacgctgatgtcccgatttacgtgcaaaattactttaaattgattttttattaaattacttattcaaatcataatccgattgtaccattaaattcgttgcaattaaatcttcaaaacaagaccacacatggatatattttgacgaaatttttttagcttattattgaattatttttaaatgttgcatgatgttccaccaggtatatcggaattgttttattaagtagatcgaaaatgtttcactcgttaaaatcgggtgttgtttcaccttatataaaaacaatgtttcagcaaatagcgaaagaatatttcagttcactgcaacatttgatccatacatagtgaaacattataagtacactaggtgaaacatttttcggtggaacaaaaaataaaacgaattcccttaatagggggtttctaaaatatgtggttttttttgttgcaatggaatattttagttcactgcaacattagacctatatatagtgaaacattgtgagagtctaagctgcgaagggttggtggtccctgtagctccaagggctccatcggagcttttctcttgcctttagaaagctcctctttcggggactccacactccccccacttggtgctcttctccaaacggcatggtttggagactcaaatgatggatatacaagcgtgataacttatatgcttttccatatctccataaatctacccacttttgcttgcattgtattatttggtctacgtaccagaattgataacattcgagattatgcaggattatacacgaaagatccttttttggctctttctttagctgtacactaggtgaaacattttttgatggaacaaaaaataaaacgaattcctttaatagggggtttccaaaatatgtggattttttgttataatgaaatatttcagttcactgtaacattagatttatacatagtgaaacattatgaatatagtgaaatatttttggtgcaacaaaaaataaaccaaattcctttaatagagggtttgcaaaatatgtttgtgatttgttgcaatgaaattatgtgtgtggataagtagcaggtggggacagggggcatgtggtggaagcccagagaagctgctggtgtacacgtgattgggggaggggggagcgaccaattttttcccatcccccgtgtgaccgagaaggagcattctcgtgttggaataagttcatcgtaggtcccttaacttgccaacgaatctgattttcatccctcaaccgaaaaaccagatacaacggtccctcaactatcaaaaccggtgcagattaggtccctcggcggttttgagggtggttttgtctgacgtggcgcctacgtggctaatttgactcggtcttcatctgacgtagcattgacgtggcgcctacatgtcaattcgatccgaaaaaataataaaacacatgggacccacatatcagtttcacagaaaaattaattaaagaatggtggggtctatgtgagccccatatgtcatcctcacccctcttcttcctccactctccccatctcccctctcttcatctctctcctctcctctcctttctctctccaggcgacggagaggcagcggcacacggcggcggagctggagccacacgcgcggcggctcccggtcgtcgctggccgacttgtgcagcggcgccggaacaggaggaggtggcggccgcgacgccaactacgacgtgctcgtgccgtcgtccttcgtgcgcaccgacggctgcggcggtggcgagtggtgaccgcttcccgccggtccacacgtttggcttcggcaaggaccacgacgcggtggcgatgcacaccatcgccgaggtcaccggcgggacgttctccttcatcgaaaacaaggcggccatccaggacgggttcgcgcagtacatcggtggcctcctcaacgtcgccgtgcaggagttccacttcgacgccgagacatggagaggaccggacggaccacgagtccacgagcgtggccggcgacgaggaggcggagtccggcgtcgccgagcgctccgtggaggtggaccgagctagtccgggtggaagccatcgacgacatcgcgctggagcgcaagttccgccgcctcgacgagaactccgtcgtggtctccttcatgcagtggttggcgcggagctactgattccaaccggtgctgagaaaactcaacaaactaacagactctgaaactgaagaaaaaactgacgcgctacagtatctaagactgaaaataacaaactcaggagaaaacacaagtttacatatattccaacagctaccaccacgtcgcctgccacgacggcttcaaggtgctccaccagctgtagaaggcacctctacaacaacaacaacctctagctccgccgccgtgggcaggagtccgacgatgatctcgggttcacgttgtgcgacgattactactcgccgccgccgaagttggtggacttcgtcgccgaccatccgttcgcctccttctagctactccacgccacgaccccttcccgtgctgccgctcctaggcactgttgcgaccggtcacctcgccgcgcgacgccctgcgaagacgatggattgcgacctctcctcgacgatgaagccctgcgaggacgaggagctcgcccgccgccgctcctcctctgctcccccagcccgcttcgcccgctcgtccacgcctcgccgccgaagtgctgtcctgctcgtcggcctccacgcgcgctcatcggcctccctccgtcgcctggagagaaaggagaggagagagagatgaagagaggggagatggggagagaggaggaagaagaggaggggtgaggatgacatgtggggcccacgtgggccccaccatttttattaatatgtgtgtgaaactgatatgtgggtcccatgggttttattattttttcggatcaaattgccacgtaggcgctacgtcaatgccatgtcagatgaagtctgagtcaaattagccacgtaggtgctacgtcagccaaaaccaccatcaaaactgccgagggacctaatctacaccggttttgatagttgagggacccgttgtatctgtgttttttcggttgagggacgaaaatcagattcgctgacaagttaagggacctcagatgaacttattccttctcgtgtttagtgccggccggcccacgcaaggtatgctgggccggacaatgcaccgcaaaacggcgtaaaaacctctccccctatttttttatatagaaaggatttggacggatgtgattccctcgcttccgatcggacggacgggataacacccatgggcccacttgtcattgagcgtggagacgaccagccaccccacccgacgcctcggccccctcgcaaatgtaggaaaatcagaagagaagaagcgaaagcgacgccgcctccactccgccgcgcggctgctctctctccctctctaaaaccctagcagaggagcacggcgaggagaggagaggagggggaaggagggagaggccacggggaacgcgatcgccttcgtgccgcccatggagacgaccatgggattctggggtgcgttcctcttgcccccgaaccctactactgtttctcgctcccgattcgacgccatctttaattttttttggtcgcgcctagtcgataggggaaattttgaggggtaaaaatggtgtggtggattgttgatcctcggtttcttggttaaatgctgggtttccccccatatgctccggagatctggggatattttcaccggcaatgcttcctgataggatgcggtggtattttggtgtatttgggggagaaatagaagcaatattcgtgtaggaaaatgcagtcatacccttgaactttaatcaggctcttggcagaactgcaggaaatttggctattccattgatgagttggattcaagtgaacaagttgatatctaggagtaataaggcagtagtttgtcttaatgaactgtgccttgctctggagagtaatacattccctgcttctgtttggtggttcctggatttagtatagtttgtattttcatgttatggttggatgatttagtgcttcagtttttttaatgaattaagcatggcatgaagcttactggagagtgttgactggcaaggtcgatgttgattggtcaatctttgatttttcaggtcttcatgattgactatggtttcttcttgcccatgtagatatgaaatatttatcactgaaatacgcgcattcttctacttatatttgccttcgattatgcgttgtacttattctgaacacaagtgtggcattcaaactgcccgttggcatgccactaatgttttttcccctctgtgtcaactgtgaagagatcttttgatcgcgttggacacaagcgtgatgggcatatttgtagagcttaagaaagaagcaaatgtttgtcattcccaatttcacgtgttgctcatttttaccaatgtttactaatggctttcatgaatgtaattcacatttctaggagttgctgtcagacctggagagacagtgatgtgtgatccaccaggagaattctattatcatatttcacaggtttgtttaacaaattgtacctaaaagctcatttggaggtggatcaagtttgtttactttaagttcccattttcactgcagatagcgttagagcctggtgagctgaatgagaacgtgcaagtttttggtgaagttgatggtaaaaggattctgctcggcacactttcagttgaacatcgtcctcagttgtcaattgatctggtgtttgaaaaggagtttgagttactgcatacctcaaagacctacaacatcttcttttctggctaccaagctgcggatgcgagaagatatccttttgcatttataatgatctttcttcaaataaatcatgagtaggaatatttttccttaaccttttgcctggctgtatgcacatctgactctcctactgaagaaggtatgtgtccttgttctttactagtagtaattggtcatctctgatgtttccgctgcacttggcctgattctcataagatgtgatgtttcaggtgatgaatctgatgaggaggttccactggctattccactattccccaattcagatggtatataatttgctaatcgtaacaattattttataagacttaagaagatagcatggtaattgaacttataagactttatatatttttacgctagaatctgatgcacatgctaatacaagctggtaagcgaatcttcgaatgatacactcttttatgttatctactttcagatgataagatcaaagaagttcaaaacagtccaagtaagtttgccacacttaagtctgctgctgctgcatcccctacaccagaggctattgtagaggaaagaaagaattatgggaaatcagaagctgatgatgatgacagcgatgaagaaagtgatgcttcaggcgaggatgaatatgatgatgatgaggtttgtaaaacagtaacactattaaaactagcagcatgctgattcttgttcagactgaaaccatgacatggttttggacttcggtaggtgtgcgaacaaagttttctttatgctagatatgttatgatcatgcgatatatttgtaggatatgattgataaacaggattctagtgatgatgatggtgatagttcggatgaagaagagactccttcaaaggtgtgagcttgttcaaggctagcaaccccaattatggacagcaaagctggtcggaaactgtttcttttgatttgttttcccccctaaattcactgttttttttatggcacagagattgcatttctcacttgtagatcttgtgtgcaggaactggcaagagaagtggctacgtccatgtcgcgactccttatccagcaaaacaggcaaagaagacacctgtaaacaatgacatggctaagcaatcctctggctatgtccacgttgcgaccccttatccagcaaaacaggcaaagaagaggactgccaataatgacatgtctgagcattctgctggttatgcctgcaagccatgcaacaagtaaatttttgttcttttcatttgaatgatttaccttagtaatgctgctatatcctcacatatgcacttcctattttgctcaggactttcaacacctctatgggtctggaagctcattccaaggcgaaacacactgcaactaagtgatctgaaataccttctgggcaatcctgtgtaggtgtgttagtgataggtaactgaattctgaagctggagatccagatattttgatgaagcacaattttggagcacttgccaagtttctgaaacatgtagatatatggcgcttttttaatgaatgcgtatggatgttgcacgtttcattgttctgggatctgctcttttttttttcctgagtgtgtttggacggacaaaatctggtttaacgatcccaataccgggataaaaaactgctcatatcggacacaatctgggttaacgatcccaataccgggatcaaaaactgctcgtatggtatctttggatttcgtggaaaccaatgataaaccaacaaaaactggtggtgtatgtctgtaaaaaaaaccgtttcgtctgtgttttagacaagtctgggatgtccagatttacatacaaaacttgtactaaaattctcaaccgttcgattccttaagtgtgattagccacgagtccatgatcgtggcaataaaacaaatcattgccttggagtgcagaaatcagcatatcatgatttcatcgcagagttgagttactccctccgtacgtttaggataatgttcaagggtctgcttagttggtgaaatgaaaatttttaggggttttatcggacgtttgaccgggtgttggaagggttttttttatacgaatgaaaaaactaatttcataactcgcctgaaaaccgcgagacgaatcttttgagcctaattaattcatcattagcacatgttttgagcctaattaatccatcattagcacatgtgggttactgtagcacttatagctaatcatggactaattaggctaaaaaaaattcgtctcgtgatttctatacaaactgtgcaattagtttttctttttatttatatttaatgctccatacatgtgtctaaagattcgctgtgatgtttttggaaaaaaattttagaattacacagggcctgtttaagtcaaacattgggaatataaatcatgaacaaatctcaagttgttgagtttgaaaatataaaagttatacaaatatatttgtcttgaaaaatattttcataaaaatatacatatatcacttttcaataaatattttttatagaaacaagaaccgtgtcgctgtttaaaacgacttccgttacaagtatggagggagtacatgcgatcgtgtgcacagaatggaaagaaaacgaagaacttgaccaaatatcaaatacccaaaccacagtagagcatagaagacagagtataaaacctcgtaaccaagaaagcagactagtctccgcattgtcacaggccatcacagcacaaataacatcgttttgtaattaatagtcacacagaccatcacagcacaaataacattgttttgtaattaatagtactacctagcttgtaacctcatccaacttggatgtttctggatttttaagcaacgttttcgccaaaaaataaaataaaagaaacatttagcaagcaaaattgggtatgccccaggttgtagggccaaaactgcctattagaggatcatctttgaagcaaaagcagctgcagtcaaacatgccaccagtagttcacttggctggatgtcttgccttctgatgagaccggagtgatttatcactactaaatgccctgtgagagaaaagaaccatctaatgttagaatgcttgtgataagactgcatcttatcacagcataataataaactgccaagctgtatacatacttgctgcaatacttgcaggcatgggtgccggaggattcgggagtctccttatttggtttgctgattgccggcgtcttgccatcttcctttgctggatgagtattcttatcacctttagtaaatgcgaaaaattagctaaagttgagtcccctgtgtgttgcaaggttaataaaaatagcgtcagtccggcagagctaacctgttttctggccaaagtgtgttgcagtctttgacttcttaccagaagaaagtgtagatccagcagctgtcagcttgctgctctcaggctgccgagcacaaaacaagagtcagatcgcatcttagagacaaatcaagagtcagatcgcatcttagagacaaatcaagaacagtggcagatatcgggcatactttctctggaatttcatcttcctcatcactttcatcctcttcatcagtggacaccatcgatgaagatgattcatcctgcccatcactcccatcctcttcttcactggactccatttctgctggtaactcatcagatccatcatcctcatcacctgactcatccttaaggggaaaaaagtgagcaatattacaaaaactatacataagactttcttcgtcataaaactatacataaaactttatgagggtaaatgcactttcatcataaacttacatcatcatcatcggatgaggacgagtccaaagaatcatcatcatcatcagatgaggacaagtccataccatcatcagaattatcctttttaccttcctctgcaacaggccttcccagatgtttaccttaacaaatatagtgatatacagcaatcccagagcattaattcagccattgtcaagaaagcgcatgtgtgatcttaaacgcgcaactaataaaaagaaaataaatctgcatacccataatgtcacagatgtcagacatgttttcatcttcatctgaaataaggacatactagttagtttatgttataatagaaatattggatacttaaacaatagaaattatttcagaaatatcagtcaatgaatttaccctcatcttcacgagaatcggatgtgagaaaagaaacaacatggttaaggaaacaaggttcccaaaggatatttcaaataaaatctaaatatgattcgaaaataattccaagtgcatatgttgaaggatattcatatgggttaggcatgtcagtcttgtaaccacacaggaagacactagtagtctttgaactgtgtgaaagctcaaagtcattgccaataaacaaatcacacataaattgaggatgatttttagccgatagatttccaataactgtcttcttgccatcaactttaacagatacaactacattctcacttcctgccttctttgtttctcccagtgcaacctaaaaaaagtaacaataacatgaaaagatcaattatgtaaggaccgagattgagaacgaacacaaattataaataatcagacaagttgtatttaaattttattctctccctccctttttttgttcgttgtgtgtgtttggaagatgagggttgagggtgctaaacctgtgatatgtgaatcacacactcatcatcaacgttaaatgaaacagcctttcctggcttcacttcaatacctgcatgattcagatcaatcattcaaactcccatcataaatcacactttacgaattcccttgcatagctggagattgaaaatgcagcccatagtgcattgagaaaacgtagagttatgccaaataacaaatcagcgcttgaaaagctcccacaatctagcatcaacaataagtcaaaaaaaaaaacttttcactacttgaaatttgacaacccactaaatgatcatcccatcaccccacatataatggcataggagacccttatcaagttatcatcaaactacaaggctttctacagggaaggaagggtgatacttaacagtacatcataaaattcagattataatacagacaagatggcgaatttctcaacctcggaacacaaaaccgatgataagcccgttcctcggcactagacaaaacagagcctaaagtgggatcgcggagaagctcgttgacgagaacaccatctaaaatcgcacaccccccaacaccgtttgaagcattaccaacatctcatcacgggaacacgacacgcccaaaattcgcaccaaaataattgcaaataaaatctccccgagaacacaacacaaatataatcaaccagaatcttggagagagagaggggggggatcttaccccagaattccatcgctgcctcgttgggacgacgaatcggaggcgcggccgcgcgaaaccctaagatcgaggaggaagcggggacgcggggtttagggtttaagcaggggatgcgaagcggacggcggggaaggtgaggcgacgaatctgggccgtcgattcgttccggtagccgagatctgtggccgttggttggttggctttcccggttttgattttggaggagggaaggggatcagggacacgaagtggtggagcagataaaattatgaaattgggctttgtctgggcttaaattgagaacgtggcctgtttagctgggatggtatccatattcggcccaatttcacatttgatcccccagaaaatcacgatttccattttctgttcatatttacgcaaagagtaatcgagtgatcactgatcagatgtcaattatacatttgatgatcaccataacatcacgacttccatttttctgctcacattcacgcaaagagcaatcgagtgatcaaatgccaattatacatttgatcaccataaaatcacgatttcctttctgttcatatttatgcaagagtaaccgaatgatcaaatgtttactggagtagtttttataagaaaaaaagtccggtatgtttatgtaataatagaacaaggaaacatgatttgaaaatggtctctctttttatccttgaacaattggtttaacacctacaggctacaggggcatgatatttgcgtgtttatcgtcagcaacaactttgggggcttattcagtttctacgcagataacatatggacaaacacacataacaactgacacacaccagaaccaggtcagctgttctccattctttgggtaccctcttatcataattcagaaggtgaacactggagaagatgtacaaagctgagtggtggcaagcaactggttggtctattattccaacttccaagcaactggttggcaagcaatcagttgtcgttccttcacacctcctggagttgcaaagtacctcgccgctgaagctcatagagcaagaacagggcagcagaatcctgtgagctcttcttatctgcacggccatctcctgtgaggctgatcacatcagcatttggtatatgcaatgtaatggttgaagcgaaagcgaacgcttggggggtagctttctgagaggaaccaccaggggaggagcacacgctgctaaagctgaaccatgaaagattagtaagttattttgcactgttgcatagataagtaaataaacaggcattcacaggctagtatgaaatcttagtaccttggttgtactttctcagattccattgtaggcattggccattgcaactttttacacaactcatataatgcaatgcgtggtcctcctttactcgttttcacaatcacgtgcactgaaacaagataaaattgttgaactttatcaaattgattcgttctacagacgtggatatatgaggtcctgatatgaatgaaagcacagagataacaacaaaaacagaaccactggtgattgagaacatacatggtttaccaagcaggggatcagaaatgttccttgaatcagctgcgtttttttccttggttggttttggagtctgtgtatccattgcatcgacatgcaaattgttgaagggattagtgctgccacaatgcttttcaaattgttctgtcttgcttgcattctttgggattattagtcctttttcctgcaaaaacgaataaacctgtcagcttatattatcccctaaaagaacattgcaacatacactaccaaaatagtggagcacaaaaataggacacctcgagatctttgagcagtaaggaagatgcatgcgctttcgcatcttttcttttcttgctaaaaccttgcctcacaagaagcacctctttgagctgtacatcaagagtagccactactgtgtctccttgatctctacagttaattcctacaaaatacccatgtttgccacaccattcgataagctctctgtatggaggtaactccagattctcaggtgtgacaattggggaaagaaggggttcaaaaataccccagactacatccaaatcaagtttggtgtctaaaagaattgcacctgcaatactttctacaatatcaccaaggacctgtatcacaatagacaagtgaaatatgatatattaatatagataaattgtaaagatgattgtgtatgtcaatactggaagatgacactaaaaaggacacaggtaatgcaatgcaaataacttgtaaaaagtatattaaatacatagccatgcatttataagatgctctaacttaaagcaaatgtcattcatatgaactgaaatcctaacgtattgacttgattttattctgataagagcaaaccacacacatgttaaaacaaagaaagaacgtactttaggcccttttgggagtccatctgataacagttcaactttgtccatggatgaaccttccaacctattcacatattcagtaatttggtctaacagaagcccagaagaatgctggagaaagtgatggaagttgtgctttactgcaacttgtgcaaagttttcattattgactgatgcagaacgtaagtctgtcaactccccctcattagtgtctttatgactattgaaaagatatcttgttaacagaatgtctaagaccgcatcaccgaggaactctaggcgctgttaaaaaaaaaacattagagaagttgggtaagttaagacacaatatgaaggaccagcaaaatagttttatgttcacccgatacctcgtagcagtattttgcacctaactcctgctgtgatgggtgagtcagagcctctaccaaaagacctttcaccgagaaagaatagcctagttttgcttcaagcatttcaaatacattgtcttttggaagataagtctgcacagaagcactcaatatggcctgcacaatcaagtcttcttcaatttcagccccgatgcccaaccatttgagaactgccatggctgctcttaaaccaccccctgcataatatgccccaataatagcctcaacacaatcagcaatggttttggaacacatccatctgtgtcccttgtcacacgccttgcctagaacaatagccttgtcatcaatgatatgaatatcgtcagttacaacctcagattttacagggcattcacaaggagatggacgaatagagagctgtcctggtgctagccatcgacgaggatcaaatgcagcatcacgtacgtaaccctgttgattacattccaccaattgtcaacttagctcagacaattaaagctcagtgtgtccatgaaatacaaaatctctagacactgccaaatgataatgtgaatttacctgtacattgcgttcaattccaagcttataaagtgtggcattacaaatcatatggcaccttatggatgatagctgcccctcatccttattaggaaatttcaggaaaagatgacaactcactgcatacttcaatacagagtctcccaataattctagacgctccatagagaaatcctcagagcacctaagcgttgtaatagcttccagaatctaaagaacatgtgccaatatatcatttcatattaaagaaacagaaaatgtatgtatagaagagagaggtataagcatctataccaggaaacttgatatattagaatcgctgtatccaatttcacttcttagttgactagctaacgttaatgactcaatccgatacatcaaagccggaaacaaatagaatgatctcaaaatttccacaggtaaatcaaggggaatcagcaactcaggaggcatgtggacacggttgcttgttttatttacaactggtgtgccattactcatattctccacaacattacctaaaaaaaagcaacagcaatcataaatattagatcagcctatatacgacataatcaacttggctacaaattacaaaaataaaacagtttatgcaaaagtaaccagtctaacaaatgggtttatcactaatcatcgaagtaaaaaaatagagatgcttcaaactaatcttgcttgaaaaaactaataagtaaccagttagggaagacaaacacaaggtagaacaaaactaactatatagaagaatagatacagaccttcatccctgaacttcgaggaaagaaggttgtgaggattatgactaggcttcaaaactagtagtggctgtgaggggtggcgaagtactatgccatacctgtaaacgaatatattagacaaaaaaagcaagattatacctgagcaagcacatggacatgcacaaaactatacacacttctttttgaaatattctgcgaatgtccggaatttacattctttcttatcagatgcaccatcaaaagcgctatcgccagataattcagtaatatcaagagcagtatatatcttcccagtgtgaactgctagaactaccatatctttgaggctgttagccttacacgacttgttagctaaatgaattaaatctccaacattttggtcagaatcaaatattccaagtaattctcttttattctcagaataaatccttctcataagtttaactgccgtagctgccgcatcaatgacactccaattaatacaaacgttggagtcaaaagaaggatttgttggtaaaagcaaatatacactcgcagtgttccacacaaatgtatcctctttattaagaatgaattccctcggagcattaggtacttttgatctagtaaacagctttccaaacaaaccattgaagagaagcccttgaaacaactttgcttgttccatctgagacaaaaaaaaaggataaggaatttttcagattaaatgggaaaaaaacaaaagtaggggacaaacttcatcatacctgttgagcatccaactcaagaagtccacaagaagaaactgaagttttgaccatcttgtcgtgcaaatataggtcaatctccaaagtagcgacttcatccggtaaagttgcatcaattaacagaacaaattcagagtaaatctgaccagcttggtcacaaacaaaattcattttgtagctttgaagcttgagtgcagttttctttgacacccaattgccagaccaagcatgaattcttgttgtaccatgtagctccttccgtttggttgtaccttcaagaaggtaatagagaacattaccatgacatctatttctttgtaagaagtataatggagttcagtcctacaaataagcttgactacatacgctggttacaaagaaccagccagcatatggcatcttaacttggagtaaattgcatggcgaatccttaaacttgtacacaggactaatctaggtacatatatgtagaaaatgcaaatctaggtccaaaagtgcgtaaagtagattattaactatacaatccagaagaaatggcattttatgtgtggccgtccctctctcttctcccttagatatctcccctaaattgttgtactattttgcggtggatgtcacaagtaacaacacaattcatggagatggaaacttaatgaggtgatgatgaagcatgcaggtgatgttcactcatgctcccagagatgcagctgaccttaggtgcagcatctagttgacaaaaacagcatttgtgatgttgcactcgtggcacagttttttttgggagggttggaggttgtggggaggggccggggggcacaaggatgccagatccacctcagtgtatcatgtccacaaggaatgctagttacccagatggacctaaaatgaccaccttaatgtactttatggactaaaatatgtagtttctaagtacaggaacccagatggtgaacaattagttcaagttagaggaccagtgatacgatttactccttataaaacttggcaatcacatacctataccagtacccttatttttgcttacaatttctggaactggatcttcaacagatagacaaaggtggtcatcaagtgctcctagctcatgcaacttcttacatgcatcaaggcaaacgagctgttttgctttgtgcatgtttcttgcttttgggcccaccagaatttgaagcacagcacttggtggtaatgctaatgtacacacatatccatcatcatgatgagtgaactcaaatgtaggttttggggagtagcacctgtaacacaagcagaaatggcaagaaagtgaattggaggtctccaaacaaaaacgataacagactgaaaccaggtattgcagatctatttataggtgcaatctgtgtagtcatgtaaaaagagacaactgaaaatgagatcaacatacttatcctgcggaagcttctcacagtatcggtagacaatactgatgcttgaatcagcagttactttcgctcctgttgtgcctacatggtattcgtttatttcttcattgggaacaaaaccaggcgacagatttccagactctctgcttgaagcaatcttaaccattgaagtctcacttctcacaattgcagatatcaaatcattttgcttcacgttccccctgcattagaagaaatgaattatgtatccttgcatccttcttgtttgccattcctctctgcattcagttaaaagcacgtgaataaaaggtgtaatggggtagcattaaggttataccgttcaatcatgagaatgtactgagagtcttcctggcgtgctcgtccacgtgactgcacatagctacgtgttgtccttggcaaatcaaatcgtattacacaagagcattctgggacatggataccctcttcagcaacatctgtagtaaatagtaagttcacctgcattttagaaagggaaaacaaggttatatcatgagaactatgcttcagtttctccaagtgttgacatatcttaattacctttccagagcgaaatgaatccaatgtatccttctgcattttgggtgtcagagcatccaccgaagatctccctccagtaagaaaagaaactgtgaaatgtgcaaggtggccaattttcttaatcatccggtcaatgactctagcagtgatctttcgatcaacaaaaatgaggcatcgagcatgacgagagttactgttaggaatagaaatgtgtcacgtcagtttaaaggcacacaattgaaaaaaataaacaagtggaccttccccaagaaataatacctaaaagagtgaaagatctggatgagttcatagagctttggggaaatatagcccgtctttgctgcttcaacacatccactttctgagtttagaagcatgtcgatacctggaagatagcaaatagtttagagaatacacagaaggactgagcattttcatattgagaagagagccaaaagactgaagtaccatcttcatgctacacacagacatcaaatgaaaggataggaattcatcaaggagatggtacatgatacttcctatcaaacagattcatcatactccataagttcatatagggtgttgcagtgctatatatgcttagatccattggctaatggcatggcataacagtgtaaggttgcaaataagtttacagacattaccagtccattattagtttatctacatagtcataccttgttggaggcgtttgtcaattaaatgcaaggcttcctcaaagaacttcatatgaagcgctgaattttctgcaaataggcgtgatccatttgcatcagtttgctgatctgtggcatcaactacttccttcagccaacctttctcctggcccctttcaatgcagatttttgtggcctaagagaatgaatgataagttattatttacccatattaagacatgaactctgaagcaaagtgacggtaaaagaactcttcaaacatagaaagctaacgttgcagtatgagagagaaaaaagaattactaagagatgggatttttttggttaagaagaaagtaacccaaaattaggctgaaaaggatttaaataggttgtgaggcgtgcaaacgcgcttcgcaccaagttaagctcagttcctgtaacataagtagctagaacaaatgaatataacaaatacctcacttgcacaaataagaccaacatcatcaaggcagtagcaaatttttgctatagatttagaaaggcgtctctttgattcttttgttatatcatcagcatctttatacatgtcgcttcgcttattctgcaactctgttatcaatgcatcatactgcacatacataaaagagtgtgttcttagaaacattaaaaatgctgagctgcaaactttgatgacaaatttgatcaatatagaagagaaaaaagagatataaaaccttggaacataaaactcccaattcttcactcaaatcttcaaaacaaactggtttcgagtcatagtacctgcacatttcttttgcagaaggaacacaaaactctatctcttctctatctgaaactgtgtagatctgttacagataaaaattaatgagaatcaaagtacgcagataaccgtatcacatttttaaaaggggtcataggtgtatcccaaaatggcatgggtaaaacagataaatatatatcacctaagctctcaaaacgaacacaacagtaaaacaatttgcatttggttgaaaaccacaatcagtaaataattggaattcaggtatgtatatatccttgcacttcaatagacaaagtagaatagtgtagttatcagaactaacatgtcctgtataatctaacccagcttattcaaataatatgtgtggcaaagcaggaaactgaacataccttagcatctaacaggttctccaattcacagaactgaccttcacaatccaaatgagaagagatacctgcaaagaaaaccatgaaaactcaaatcatctaataagactaagtgatgcgaataaatcaaatctgccagaaatattggcatttatgaactctatggccaaagtgaaattggagattatgcgcacgatcattattcctggatatttctcttagatggcaggtcagaattaacacatgtcctaaatgccactgtttacaagaaatttattgctgatcttttctgacttataagtctcttaacatcccattcctccccccacccacacccacacaaaagaaaagaagaagaagcattctatagctcttgcagataactgaatacttgccttttcttataacaggtgatgctgtcataccaaacacacttggcttatgttctgatttgtgatagaactcctgagatagtgatgagttataacatatgacaaacacaaaaaagaaaaacctaaatgctaatgtcaaaaaaaaaaaaacatgataagatggtatttcacaataccttcattattcttgtataagggtggtttccagttgcatgatggcattcatcaaatatcatgagactaaccatgtccaagattaagaaagcattgcgtaaagcttgtaggaacacctgtggtgtcatgaccatgacctgcaattttattattataagtgttgaaagcatcaacaagtagatagaacaggggaaaaacatctatgggatattcttaacaaaagatgttgagtaaatttcacaaaactatggatacttcgatcaaactgtcacaaaactacagagtttaggtgttatatcacaaaactacagatttagcatggaatttctcatagaactacagatttaagatagagtatcacaaagataaagattaagtagcaaatttaccacaaaactacaggtttagtgccaattttaagcacaaaactacaatgtttatagctctaacgtaacggtagtgctatagatttatactctagaatatgttgttttgtgataactttagtattaaatctgtagttctctaatacttggccttaaatctgtagttttgcgataatttggttaaaaatctgtagtttcgtgaaatttactctataatatagtgaacagaagactgcagatcataagtgctgctagcatggaatgagtattttctttagcacatatgatgaatcagtgagcctttaaaacaacaacaaataaatgcttgcctggtattttgagatttgctcttgccatctaggacctgtccattgatcaaccccctttgcaccatagtattgttctacctcaaaatctgtgtggatttcaatcacctcgcattgctgtggcaaaaaataatgttagtataaattacattacagttaggataaaacgaacagtctacagactggtataacctgtgtaacaagttgaactgttggtgcaagaaatatgatgacttttccagcattctttgttctgtttatctttccgaactccttgataagcatcacagcaatcattgtcttcccggctcctgtgtcaagcatcgcaatcgtgtttctccgcattgcaacctcatagacatcaagctgatatctgaccaatttcagcatcacaaagcaatgtcacaggattgcactctttttctgattatataatatagtaactgtgaaaaggagaactccgcagaaccttctgggagtgaaatcttgacactctctcttctgcagtttctgtttgcctgcttcatgttcctgagaagatgattccaatgacctctttaaagggttcatgtttactgccattccaacagagaaatttacaaagtgaggtcatgacaattcaccattgagaatattcacacccaaatagaacggaattagtaatcctcgaagcagtggcggatctaacatgggacatggggttcagttaaacccccaaactttttgggaaccattgaactgttattagtactattttctaaggttaagtcagtttctagaacagaagctaggattaacgcaaatccgagaaaaagtgcgtgggtagaaagaggatgtgcgtaacggaagcggcggaagcagcagtacgaacgacggcgacccagctcgctcgcgcgcgcgatggatggggatcgacgcaggcggcggtggcggaggaggtgctcaccaggatgcggcggatgcagcaggacgaacgacggcgccctgctcgctcgcgggatggatggggatcggcggcggcggcggcggcgccgcggcgggcaaactgacgaggaggggtcagggtaactcacggacgacagaggccactacgtcaaaatggcgagggtaatttcctaattgagccgagcactcaattcaccgggattctcccgggattgcacatctcatcccatccccaacctacccaaacggtgaaaatctttccaaacggagcccttgggactggacctttttaagatttttattttaatattttataggattgagattgttagataaatattaagggcttctttggatcgcaggaatgagaaaacataggaataggaaaaacgcaggattttgataggaatgtaagtgtaaaacagaggattgcaaaacacaggaaaaacacaggaatggttgtttgattggaccgcaggaaaaacgcaagaattataggagagataaagactcaaacgaaagtttccaagaggttttacctcatgttagaattcctccaaaacttgcatagcattacgcaatccataggaatttcataggattacataaaatccattcatttgattcaaagggctatataggaaaaattcctatagtaatgaaatcctctaaaattcctatgaatttcctttgaatcaaagggggtctaagtacatctgagcattatcggattaagcacggctcaccacacaggcgtgtcgtgtcagcccatatgttgaggctgaagcccaggtatggtctagtgagatgtcaggtcgtgttgtgttgaccttgcacgactagggggcgtagcctgtgtggagacccgttaacctaaatttgatatataccaaggaaaatatgctaatagaatccattcgatcctcctacacaaactccagcaaagctccggtgaggttctccgctccgatagcacattccttttcctcctcgccaagcaccgtcgtggcccttcacttcttacttccttcacctgagccgataagcccccaaggaccaacatacttagtggatgtgcttgtgaatggggttaattgcaccaccacctactaacatcgttgacatgcataccttcgggcggagcttaaaaatacattctacataaaagttgtttatataacttatccaaattcattttttaacattttaatatctaattaattaattcgtttgtgttgtaacatagacggatataccccctcaaccccaatctacaatgaacgggttgtcatgataccaccaaccaaatcctgacgagctgtcgataacctattgtctcttcattgcaatttgcaagctgtagatgcttaggggcaaatttactacatgacaccaaaattttatgtaatttactgacagacatcgaaaaaacgtgttacggctgatgacattaaaaaaactagtaatttcctagataacattttcagctcaattggagagatgaattcttaaaaaaaagataagaacgcctctatggtcacatgcttcaaacatggtgttagagtaaacttttagaaattatgcaactcaaaatttgccatagcccaaagtggcaaagtacatcactagcatacatcatatttcattttcactctagtctcggctaaaaaaacgtttgaccgggtcattgtcttatttttaaataatttatctattcaattgagctgaaaatgtcatccaacaaattaccaattttagagcgtctttcactcgtgtcacttttttaggatgtctatcatcaaattacacaaaagttgggtgtcctatagcaaattttgccatgtcacatcgacatcatcccggcacgtaaatcgaaacatgtgttaacacataattaattaagtattatctaaaatttcagaaaaagatcaatatgatttttaaataattttcctattatttattaagaaaaacataacatttagtagtttgaaaaacgtgcgtacgaaaatgaggggtttgaagttgggaacaatgacttaagaacacagcagcacctcgaaacgaccactcggcgctactacgatacaagcagccgccccccgccggccgcggccggccgaatggccgacccgaccgtctcaccctgcacgctgtcgtccctctccctctcattgttccattcatctccacaccaaaaaggcaaaaccaccttctgatcagccaaactcacgttagaacatctcaaaaacaccaaccggccggatacgtacgtgaaaggatcgatcaagaggtttggttgccatggaggtggagggggcgccggacctggccgacttcatgaacgactggttcttcggcaccgtcggcacacggcgcagcggcggcggtgcgtacgacttgaccggcgatcagagcagcggcaagaggccttcggcgccggcggagaagaagcagcagcagcagcaggggaggagcggcggcggcggcggtggtagcgcgagcaagcagacgcaggagtggttggaggaggcgaggaggatggtcggggccgggtcgccggggaggaagggcgtcggctcgccgtccaggcaggtgcccaggttcgccgccgccgccgccgccgggacggagccctcgccgtcgctcgaccgccgcgacccgatgtcacgctccgcccgaaggtacgcatgtcagtgatgtcactacgtcgtcgtccgtgcacgtgcgcgcgcacaggcgagctgtattagcggcccaatcgtcagatgggccagtggcccaacaaagctatattagcggcccagttgcaaaccacatttttttggtttgccgcccatggcggccccgcgccgccgccgccggcatcccgctgccgccgctcactgccggtggcgccgtggcgatttccttctactatgtattcgcttactagtctctcttcctccggcgagcttgcaggcaccggcagccgggaggcatcggcgacgagattctgcagcgcgcgtccatctcctcctcgcctccgcgcgccgacccgttcgcctccgcgccggcttcccccgcccactccctgcccccaaacccgccgtcttcccgccgcaagtcccgcttccactacccctccgcccctgacgccttctcctcctcctccgcctaccgccgcgccgcatcctccgcctccacctcgcccacctccgccgcaaagcctcaccaccgccgccacgcctccgcctcctcctcctcctcccccgccgccgtcgacgtgttcgacgatggcgtcgcgcgcctcaactccttcctccgccgccagcgcgccgccgtcgctgagctcggctccggcggccgcccatcctcgaggtccacgaagatcgtcctctccgacgcctccaaaagtaaggattaccaccaaatccatccccaattgctccaattgaatctaccccaccacacgctcacttgcgatttcctgttctatctccccgcaggtgtcagctcaatcgcggcggcgatatgctacgcgtggatgctggcgagcaaggaggacgccgaggcggcggtgccggtggtgaacatgcgccgcggcaggatggagaggtgcaggcaagcggcctggctgctccaccacgtcggcgtcgacgcctctgctctgctcttcgctgacgaggtactacacgatagtgatttgcgtgagctttcaggccgtttagcttagcgtgggggttggattcgtctccgacaaatcggacaactgtctaggccccggagttattgggcgtttattctgggcagaggcgacaaggatgggcaatatacagcaatcacattgcagtcgtgtcatgtgggtgttccggtttttgattggcaccatgtggctgtgatttggggttttgtggttgataggcttcttgcaattgtagcttcatgtgctgatatgggcatataaagggaaagcaattctagcaacaataagcaacataattttgaaatttgatgcatttaacatctgcgtaagatcaatttgacatgggcatctgtaatagcacctagtaaatcttattgatggcctatttccttcaaactgtttccagttttatgggcatataacatgtcaggttctccactttgaaaggaacaatcaagatgcaagcacaccattcatttccttcaaactatctcctgttttatggtcatataacacatatgtttctccaatttgaaaggaacaaccgtgatcaagcacgctgtgagtaatggtaaaatgtttatgatactgattttcataatccgacttaggttgacatggaggggctaatgatggataagcgagtcagcttggtagtggtggggcaggatgttctgaaaccaaacgataaggtaatgttatgtacttgtacagttgtactggtacttctcaagactcttgccgaggttaatgtatatgattccagcttttacttaataagcatgctcgattttgtcccctagatgggctcagtttgcacaatcctcaccaataattattgtgaagatgcttatagtctacttcagagcctggacataaagaaacttctggttagtgcatttgctatacataaaagagactgttatgcataatttagtggaatgttctgaccatgttttctgggttccccctcagcttgcaggtatcctgttagatacgaaaaatctttccaacatgtgctcaaacagagattcagaggcagtgcaactgctcttgtttggtacctctgagcatatgaggcacgaattgtttcaacaatgtaatatagtagtcttcttcattcatactatatttatttatgagtatagaatcaagaagtagcaaaaatatgtagtaatttccattcgtaacttgcttttgctgttctcttgttcagtgcttcttgatcacaatgatcattcttttgtcgagtacttgaagaacaactacagagagccgtccacaaaaggtgagcttttattcatactatatttaaatagattctgaaatccttctgtacaattttattaactggatgtatgtacatttatgttaaagacaaatttcactgtttgtcccaattcttcttaaaaatttaaacagcgttggtatgcaacagctcatgctattagggcaaaatattcttgtagtaacttcaatacccatttcacttcttacaaccttcatgactaggatgaaatatctgatagctcctcctgctgggttatattctatcactaagatagctttgattcaagtataatgctgacttactgtcatcgtcgtatatgtccctttatttttacttaacacgtgttgcctgtttcttgttattcctgacataattccattctgttgttcatattaggtgaagggaacagtcccctggaccagaaacattcagtttcagcatcagggtcatcccaagatgctaagaagcccaattcaagtaattttttctagcgcctccagtattatttgacaagtagattgtctgtaaatagttgagcaattcacagttaatgatgaggtcacactttgctggtttgaccatgacttaagaaaggaaaatacaagcgatggcttcggcgtgattatatcaaatattgaaccctggggattttacatctaatataccactaagactaagcgaaattccaaagtcaattcatagccaatgcaactttaggcagccctcccgcacacctttttttaaaaaataataatgcaaatttcttaaaagaaaaaaaacattcaactttggtatgtggtatactcttgctaatttggtggcaactgttttgcattgcagataatcagagaccggtgcacgggaatggtggaaagacctcagatgaaactccccgtgggaagaacaaatatttcttagcaaaatggtttggttttggatcaaaatagcatgttttgacttatactaattcatatcaaaatagcatgctttcacttctattaattcgactattcatttgatttacatgttgagaattcatgatttgtcacaatgttgaggaagtataattttagataacttatttattgtcctcattatatattattgtgaaaagagcactatatatgaaaactattggaactagcaattttggtcaaattaatatattttccatggttacatattttaatttttactaccagaaaatagtttttccatggtcaaactattgggaaagagcacttcctttattgtatttttgggattctgagaagagcacttccttggtatatttctggcattcctattttcaatccggatgtcaactaatgaggacatgatgattaaaaaaacatcaggaacagaactttatgaactcagttgtcttccaggattctgttttctttttcctgcatcctgtatgacatatgctaactcatttcttccagcttttttcaattacttgtaatgtttaatcattatatgattgaaatcttaactggaattgtggtggtaccaaagctacatggtccaaatgtgttaccgaaaaccatgatgaaaagtatgcactccttgactagttgcctttaacaaaagtacatctgaattatacaagtgttgtactatcaggggtttgcaccccaatctactcttcctttacttgaggataggagaagaaactagggtcaaagtaaatgagtaatagaaaaatgagagaggaggagcagagcatagtactagataggagggaccagccaccagccattagctggagtttctctggataaataagcatgaatgcatgattgggaaaggcagtgccattgtgaatcctacctgtcaccaccccctatgtttctctatcaggaccagcctgttcctactcccaggactatcctgtgcgtgcccctctaatgcaatcttccatgtgcccaacaccctctccatgggagaggaaatacaaaatggcatcaataatttcttccctcttcttcttcttctatcttccaatccattacatgatctgaattaccagttcatagcatggttaaaaaaaaaaaaacgtccgcccgtatcgcagtaacaaagtgtgtaggctcattcaaccttccatgcgtacagaaacaggcagaaatctgaatattcatcggtgctgaattcagagctcgctcccggcggcgacggcgacggcggctcgggcttgaagatgaacaaggcatgcctcatccctgtgccgaagagccagtcatgggcgtcccagtacacctgcaccttgagcttgttgatggagatgcactcgttgcctctgaacttccactggaggtgcctgacgaggacgctgacgcagccgtcgatcttgatcgccatgtcgacgtccgtgccgccggtgaggttgctgctgctgcactcgatgctgatgtcgtgcagcttccccctgtcgctgaacctggccttggtcacgaacctcttcttgctgaagacgtgctccttcttgcacaccagcaccgcgtcctgcagcgacggccgtgaccccgtccgccggaacgcgtccttcttgaggttgccgaggaggaggacgacctcctcgccggcgaccaccgcgacgtagtagtcggacagcggctccggctcatcggagaacctcgcgctcctcaggtcccacaccacgtcgatggcgttgccgtccacctggaactgcttcgccccgtacttccgccagaagtgccacggctgcatctccaccttgcacgcgctgcagctcttgccgccgccgccgccgccaccgccgtccgccgccgtggcggcgacggcggcctcgccgtactccctgccgatcttgtccttgccgttgcccgccgacccttcgatcgacaccgacaggccgtgcgtgagcaggttcctgcaccacgtcacggtgacaagccggcggtggccggagatctccgcccggtagaccagcgtcaccgcgctctgcctggccgccgcggccgccgccgccgtgccggagctcgggatgtccggcagcttctcgccggaggagaagcaggacggcaccgagaacaggtcctgcatcatgtactactgtttgtgtacgatgatgagacgagagataggactaggagaggctatacataggcgccatggagaggcatggagccatgcagagatatggagttgggcaagaagaagaagacgatgatgatgagtaggaggaggagaccatgagttagcaaaccgagctggaaaggaaggaggccaagaaagtgagctgtacatgaaagtgagtggaggaagccctcatggggtgtttaaaaactggaggaaccttctctgcctgcttggaataaatgctctatctttcatggaccaatcttgatttctctgcagtacatcatgctcctgtttttctactcccaactctcaccatggggcatctctcaagattaaaaaaaaaaaaagagatcgaaaaactcactattgggaggaggaggcaggcacaggccaatggctttgaggtatgagaattgctgcattgtcgaatcttgcacccttccctcctaactgtatgtttctcccatgcattggacttgggatccttggtggctcaggtctcagatattgcaagcaggtgcatgtgggtaacatgctgaagatagcatgacatgtggtggaggggaggcactggatttcttatggcttagggagtataactgtattgtgctgaacactctgcaggcaagggaatgtaggggattaatctgtggagtttgttgaccaactttaagctggattaattcagtctgcaaaaggtacttaactaagactctggaataactgcttagcaaatcatttgccacatgacacaacgaatctcagtcttcaggcagtagcaggatctttctgtttactggattccttcaggtggatcagacgttgaactcactgtggagtgtggactgtggtttgcagggggcttgaatggatacataagtggatggaataaagtttatggatgaaatgcacactgcagctaatggcagaatctggccattttgtgtgtggaaccacaggaaagtgaggctgtgtcctagttaagccaaaagagtggtcaatggacacaagtgacttttggataagagctctgattttcctgaaaggcaggggctttagcttgataaatactataccctacctgcaaaatcttaaaaagaagataagaggctgtggataaacttgtgaacttttctgtcgttatcagaagccatcaggatctatctgattggtcgactgattgttgataggaggctggctcccttggaggagctttgcctagctttacaaagcttttgggaacggtgatggatgcagtgtgagttgatccatcatccatgtggacttgatcaacggatttggtggcaaatggcaagtgacagcagattcagagttcctgaaaaccttccgtgttggactggaccagtgattgttagtactagtttatccgatttaggcattgaaatccaaggtagaaaagggaagaaagtttcagcatgtgttgaactgggaacctaaatgaacaaggaaagaagggctcaagagttgtctagtcaagaagttggtaaatgcaagctatactagtacttgcagagatcagagaggttgactagcgtataatcctatcccgtggacatcgcatcactaaaaaaatatagcgaagtcgctctggaatatagaagaaaagtgtagaacatgtacatttggcagccaaatttatcagaatgcatcggtaaaaagaactgtagcatcgtattttttcaacgtttaatcatccaatcaatatatgtttaaccgtaacagtagttaatttaaattaagaacatagacagttatttgccatctgctgcaggtttttttttcgccgggatcctgcagggattttcacattggaaatactatcctgccccattgttatcaaggttcattccgaaatcgttagtgtacaagtctacaagataactcccataagcattcaggccctattatccaactcaacggatcggagtccctggagctgaccaatgagtaacgcaagccaccgatcagaagtgcaacgctgaggcacatacctatgtccgtgttccatccccagaacaatgaaaccgttcagcactcattcataaagaaaatgtgttccatccccagaacaatgaaaccgttcagcactcattcataaagaaactgtggtatctacgttccagaatcttttcacataaagtgttccaaaattatgttgaagagaccatcgtctcgaatcctaatattgtttcagatgaggctaggaaatagctgcttcaaaaatattctctctctctcccggcgaaaaaaaaaaattcagttacctatgactaacaatctaacacagactagtgttatctcgtatcaattggttgcagggtgtttcgcctttgaatgatccttcagagcaccagaggagttgaaagtcctgagcaagttagcaagtgcctatgtgaggatatagcaatatttcaatggtaaatcattaagtaaaaggaacaataatttactttttgcatgagttgcagacatagctagcagaacgcttaggcgtgtcgttctttatgggcgtcctctttgcctgttttgctgggtgagggtttgtaacttgaagatgactacctctcttgctagtattagtacctgcacacaagatcaacaagaagtatgaatttgcaatcttcatgacgaaaaaattgtgagttcaacaaaaacaaatcaaaagaaacaaattccaaccagttttgttgtccgtaattggtgcttctatctttgccatctcatgtggaaatgtcttcaagggtgttaccactggttcattttcctctttagtattctgggagatcaaggaaacaacaacaacaaaaaagttacaaggtttctgagaaattaagcatcagaaactatcatccacttaagtatctcatactgttggtgtaatatgcaactttatgagggacctacttgtaattctgttgaataaagatatgtatgtgtgggggtgctgatcggtggtgaggccaacaagctcattccacccctctctcaggcgttaggcagcagcagcaggaaggcgggagaaggtagcagcaggagcagcaccggcgtgcggggcagcagcagcgccgccgcgccactcggcgcgctggtagcagccccgctgcgcgcacgcgaggccctcaggttcgtgggcttcctggaggagaggagctctgtgtgcgcaagctaggaggaagaaaagacggtactgttttgggagttggatttgggactgatttgtgagcttgttgtgggaaagagagcaagtttatttctgtttctttgttgacaggtgcgggaagaagcctggtccagttatgtgatttgggttgctaagagcacaagcgaggatatgttcccgttctttgcttgctgaaaacttgatggaataagagttgccgtgattgtggtgaacacgggcagcaaggagtgttagttggcatcgctctaggagatggatccattgaaaggggttgaggaatcatcgctggtcactaaaggcgagatgaaaagcctactacaagacttgatagctactgggatgatggggcctagaataggaggggcatcacctgaaataaagctagagcaaatgccgaatgaagttaagttggaggagagccaaaattacttgagctggtctagaaggacaagattgatgttgagggcaaaaggggtagaacactatttggaggaaacttgtattgaaccagatgacaagcttagtgtggactggaaggtgtggaattccaccaactctacggtggcaacatggttaatgacctcagtggctccatccattgcgaggatggtggagacaatttctaatgcatcaactgtgtggaagacattgagcaaaatgtactcaggggaagacaatgcaatgatgatggttgaggctcaagacaaggtggagaacttgaagcaagagggaagaactgttcaagaatatgctagtgagttgcaacaattatgggcagatttggatcactatgagagggggactgggaggaggattgggactggagtcaggcgcaatgggttgtggtacatcaataatgaagaagtaggattggctgcagttgcaggaaatgctgaggagattattttgcttcattgccggttaggacatccatcatttgataacgtaagtaagctatatccaattctctttaatggagtgaacaaaagtagacttgtctgtgacgcttgcgaatttggcaaacatacacggaccccatatgttgggagtggcctccgtagttatgaaccctttatattaatacattatgatgtttggggaccatggccagttactttagtgagtggatttaagtggtttgtttccttcattgattgttacactcgaatgacttggatttatgtacttaagcacaagaatgatgttcttcgatgcttccaagattttcataaattcaaatcagtttgatgcaaatgttcgaatcattcgaactgataatgggactgagtatatcaacaacgaatttgtctcttatgtcttggatcaagggatcatacatcaaaccacttgtcctggaacccctcctcaaaatggtgtagctgagaggaagaaccgacatttgttggaggtggcacgttcacttatgtttcagatgaatgtacccaaatacttgtggaagtgatgactgctgcatatcttattaatcgcatatcttgtggagatgacaaggaagaatgatggggaccaaattagggaatttgcacgggagcaagttgaagagtctgaacaacctgagcatccagtccaagaatcctccccgtgcctctctcctccaactcccttgcccctcattgaaacgtctggtgatgttccccctatacttgaacaagtagaattacctcttacacaacgtagggaaactagaagtaatgctgggaaacctcctatacgtcttggctttgaacatattagctctaagcatgacattgcaaattatatctcatactcccacatttcacctgcatacaaaactttcattgcatcattacaagcagtgcctgttccgaaagactggagatgtgccaagcaagatcctaggtggaaagatgcaatgaaggaggagcttcatgcccttcaggagaacaagacatgggaacttgtgagacttccaccaggaaaaagagcagtaagatgtaagtgagtatttacagtaaagcaaactcctgaagggaaggtggatagatacaaagcaagatcaattgcaaaaggttatagtcaaacttatgggattgactatgatgaaacatttgctcctgtggccaagatgggtatagtgagagctttggtgtcttctgcagttaactttggatggcctctacatcagctggatgtgaaaaatgctttcctttatggtgatctacaagaggtctatatggagattccccttggatttggaaataaccaaacggtaggaaaggtatgtaaactcaagagatcattatatggtttgaagcagtctcacgtgcatggtttgatagatttaggcgtgcactatgtgagatgggatattcccaatgcaatggagatcacacggttttttatacacataagggttcatgtattaccatcttggcagtgtatgctgatgatatagtgatcaccggtgatgatgggggaagaaattaggtgcttgaaggaaatgtttggaaagacctttgaggtgaaggatcttggacctcttcgatacttccttgggattgagattgctcggtcgtcaaagggaatcgttctctcccaagggaaatatatccttgatctattggcagaaacatgaatgcttggatgtcgttcaagtgctacaccaattgataaaaatcatcaactatgtgctcagacaggtgatccagttgacaaggaggcttgtaggacgcttgatatatctgtgccatacaagacctgatatctcttatgtagtgagtgtggtaaatagatatatgcatgatcctaggtctggtcttttggaggcagctcatagaatcctaagatacttgaagggatggcactatggtgctccattgtgataataaatcagttatcagcattgcaaacaatccggttcagcatgatcacataaagcatatcgaaattgataggttgttcatcaaagagaaaattgatagtggagtgcttagcctagagtatactaaatcttgtgaacaactagctgattgtctaacaaagggattaggcccaagtgaatgagttattttgtaacaagatgggcatgatcgatatcttttgcccatcttgagggggagtgttggtgtaatatgcaactttatcagggacctgcttgtaattctgttaaataaatatatgcatgtgtgggggtactggtcagtggtgaggccaatcattccccaattcccaaatcaatctacacatacctttgcaggagtctcttcttcatcagaactctcaccttcctttgcaggagtctctttttcatcagtactctcaccttcctttgcagtagtctcttcttcatcagaactcttaccttcataatcagcatcatcacttgaatcctatttgtcaatcatatcatacaaatgtatcgcaggattataatatatccaacacaattcatgactgctcatttttaataatgtcactgttacgtacctcattaccagtagattcaccaactactgaaatatcacggtatcgttcattgttgtcatcatcagcttttgatttctcatagtgctctatttcctttacaaaagccttttgcatggcggatgcaactgtagcagactttgcaggaagtttacttttctgtgcttctttgatcatattatctgaaagtttaacataaaaaaatatatcattcgaagattcgcttaccggctcacattagcatgtctagcagattctatcataaaatgtaacatggacgaagcacttcaaactacacaagcatactgatgtgaccatggttaccatagatacaaccatagttcacatcatagctcaactagaagacatcgccgtagaagttctaaaatccaattcggtcacctgcaacagtgctgatttcaaatggccgccaaatgtgcatacaagctccgtttttggcccatgagtacttgatggaaagctcttggagtcttatttccaactaatctagtctcatctccaaattccatctcggtcgaccgcaatcacagaaactaggtgttgcgtcatctataatggacgtataggcttgtaacttcatttagggcctcgacccaagtgggatgtgcccaacctggtggagcacgactctagagaccccatggtcgtcctcccacctctttaaataactaggtacctcttcagggtttttcaggttttgtttagattaaagtttagctttgctactttgccatataatctcgtgacttgttagatcgttacggaattctaacttgttatttgtattcaattcttatttgcaatttacattgctttttatctcgctcttgcttgtttcttcgatttgcttgcgggaacaaggttgatctacacccgtacgatatgggagaaacgtttacgacctgactacaaccgtacgagacgttgttgtgttacgccttaacgatcgatacaccttttcgtgggttgttgatcttgccggtatagattaaccttattcctgcaagcaaataaaaaaaaaacaagcaagaacaaaataaaaccaatctaaattacaaatagcaattgaatataaatgataatttgggattccgtaacgagcaaacagacgatctaacaaatcacgggattacacggcaaagtagaaaagctaaactttaatctaaacaaaacccgaaaaaacctgaaggggtacctagctatttaaggaggtgggaggatgaccatggggtccctaaagtcatgttccatcaagttggggcgcaccccacatgggccctacttggaccggggtcccagacgaagttataaacccataggcccattataggtgatgcaacacctagtttctgtgattgcgaccgactgagatggaatttggagatgagactagttccgttgggaagaagactcgaagagctttccatcgagtactcacgggctaaaaacggagctcgtatacacacattgggaatcagcactgttgtaggtgaccgaattggaatccagaacttctgcgacttgatcgcgatgtcttccagttgagctaatgtgaactatggttgtatctatggtagccatggtcacgccacatacactttatggaagttgaattagcgtagtattctataaaaaaggtaagcgttcttaaggcttataaagtaattattatgattagcaaagcatataccatctaacttggggtatagacgaatacctggtggaacctcctcatcagattcatcacctgaaacatcacatctcaagaattgtgattatcatgaagccaagtgtaggggaaacattagagatgaccaatttaccttcagaatcagtgaattttcccaaattctttacttgatagccacaaaaggcaactttgctgattagtgaggtgtggaatagttgaaagttcttcttgaaacagaagtcaaccttgatatgcggatgccttttggaggaaagcgtcccaatcgcaaacttctcatcattaacttcgacaaatactttcacattggagtcttttagcccgtaagcctcatcaagggctacctgcgatttaagttataacagtaagatgagacatcactataaataatgagacctggtaagaaaattgataatatgagagataacaagtactccctctgtctccatcctagaatatagcaacctagaacccaacttattacaatcctaggttgctatattctgagatggagggagtagaacataccgatgttagatgatacagggtatcctcaggacaaaagatctccttcttattgcacggctcaattaccactcctaataaacaataacattaatcacaaagttgtttttttttaatcttaatgagacagttgttatttaaatacactaaattggaaagaggaaacaaaccccaaaaatcgacgtccattgctgcttttgttattttcttcccgagcttttagagatttggcctgttaaatcaaatcaacaaatggattaaatcagcatataattatcttctagattgacatgactaacatttaggtcaacaatagatgcactacaaagatctccaatgcatgcataattattgttagttatgaatgcgccaacatcagattaagaccatcccagaaagaatttcacttgggaaacccaactttataatgcatgtaaaatcctagattttacaggaactcaaatatatgtactgaataaggctaaccaatcagacaaataattagttcacctagaatttcaaggtgctaaaagcatgctagatcaaaagggactaaaagaaaaaaaaaattacaagaaaatacatttgactctcaaagtcttcatttgccaaagaaagcaaatgtaaagggcggcggggaaacactattaacattatggtctagggcttatgagccggagagagataagagatgaagcgtctacctaccacccaccccgctcagcgatcaactgctataacggtcactggctagataaagcccctattgaatcgtccttgtcccgggcggacgttgtacaggccccgccggtcagcgcctgccctcctaccctatcgtaggtggatattgaagccggtttggcatctggtgcaacacaaggtgtaaagaagggttcgctgccatctggccaacaaccgcatttactcgttctgtgtagccagctcgccctatcctgcgttggctccaggtgaggtgcttccggtgtctagggataggccatcttaaggtagattgcaaggggaacatcggatgttatcgttgctggtaccttggccatgttgagcatttctgcaagtttaacaaagaagagcacaagcgctcccctgtagctgacggctcccatccttgccacgctgcggtggcgatgtcctttgcgctcattatggctaccactctctctcgtgcacgcggaagaggggggctgctacgacggctgttgtacccactcataagatggattgcgacgatgatataggtgttggcgatccttccatgtacccaccctatggcttttgtgtcctctcttggacccaagggatggtggagatcgagcagcgtctgtgcaagcaggctttggaggcatccgtcttgatggggcgctgagagatctccttggccatggtggtgttgatgaaaaatccgcgtccagccgatgataatgaatctgtgttgacgcgaaccgtgtcgacaaacatacgatggcttgggagatttgcttagctccagtgtaggtcctaaaattgatgagatgcgggcatgccattcagtttgatcctgcaactgacaagaacagcatatcaaaaagccgatcggctgacgagccgatatagtgatactagccgatgttgataccagtcgatgctgatggggttttgagcaatcggctatatgtccaatgtagagtctgactcttgaatgaataatgatataaagataatcaactgatgataatgtaataaaataatatataattcaatagaaaccaattagtcaataatgatatgatagaataattgcttgatccgaaggttaaattaaatccataagattcgataatcaatgaaacctttgttgcaatcggctaaaaccaacttgtatgtaatccttgtaagccaatgcaatgtccagataactcatcgactgaaatcgcaatgaaacccttattggcaatcaaaggcagcttagtttttatgattctaagcacgacttagtaggtcaaatccaattgatgcagttctaaatatgaaaagaaacataaagtctaaacaatcaagtcttagactaattttcaaggtggtggataccttagctaatctaaattgataaaacaatttagctgataccaacaaaaccctagaaaagatctgtcctataaaggtaaattgagacatcgacttagattaactaagatatatgataaataggtgtttacgccgacacaattagtgtcgaggccctagccccgccaatacaaacaaccataattagtcttaccccttgtcggagattgaagccgatgcaacccaacttgaaacaagaactcatcgagaaagacgaaaataaaaagggtggcgatgcgccaaagttctattgattgagagatagattacaaaaaccccaagtgtacatatttatacccatgggtagatactagtccatatcgaacacgtcatatattttctaaagataaaaggaaagataaaagtcttgatcggacactaaataaacatttcctaaagataaaaggaaattactacatcctacctaattaatactccctccgtttcaggttataagatgttttgactttggtcaaagtcaaattgcttcaagtttgaccaagtttatagaaaaaaatagttatattttcaacccaagataaattcattataaaaatatatttaattattaatttaataaaactaatttggtaatgtaaatattactttatttgtctataaacttagtcaaacttgaagcagcttgactttgaccaaagtcaaaacatcttataacctgaaacggagggagtagatagaattaagtcaccatgccgtagtcttcacgattccttcttaaactcggtcttttctggataagtttctgtcgactgactgctctttctttaaccgaatccactaaagaatcttaccaaattttgccgttaacaggtgattgacgcgttgggccgttcctgtggcatcctgtgggctaacgttagagttggtgatgaggccctctaactttacggggactgcacaatggtgcggcacacaatccagccacttccaggtagacaatacctggttgtcttttgccggtggcaccactctaccaacacaaggagtaccaggatgccatacgtcatcaggctagcaattgagggcctacctgctcatacctgtgagccagaggccctcaagcacatcctcaacaagctcaaccgctagcttatcgagcactttgagccactctaccaacacaaggaataccaggatgccatacgtcatcaggctagcaattgagggcctacctgctcatacctgtgagccagaggccctcaagcacatcctcaacaagctcaaccgctagcttatcgagcactttgagccagcggatgcatgcacgttcaaggtgcttgcctgggcagtaaatcattctctgatccctaaggagccgcctctggacatctcagaactgatggtggaatggtggttgtccagaactgatggtggaatggtgggaaccaccagaggacgaccaccttgacatgttaggcgctatcagtgtaaacaccgccacgcccactccttaaagccgtgcttgacattcggcctcctcatcttggagacggtcgacccggtgcccccacctcctgacaccctgcttgcacacgtacaacacctcccttggctagattgacggcaccaaccctaggccggtgctaggcaggacatgacgagggaggggggaggcgtatcgtttcgcatgacatggcaccgggatgacgtggcgcctttttcttccaaggagttatcatgtccggcattcgcctcggcgtgcttcaccactaaaaaaaattatgctttcaagatcttcctcaggatctccatggcaatgctgcatttatggagccagtgaattcctagccagtaacctcagctgcttccccgcctgagacaaccactgctttgctcttttttacagccaagtaggagacgagaagttccaaaccatcaggaggcgacaacatgcttgggccaagcaagcgcttctccagcctaattacgaccttctctaggcgcgcagccccgcacgacgcgagggccaggagggtggttgatctggatcgatcggcgggccaggctaatgggctggttgagcatctcaacctaagccaacctaaggtgacagaggttgcaaggtggcccagaacgacatgtcgtcgagggctccaagtgataaagctagggctacccactctgcagcaatcctcgtcaccgtttctgcccaaccgccatcagctacaaaggcggcgtgttcttcacaaggcagcaccccattggttgtttaagcaatggcggacgtcatgcagtctccagcattcttggtagtcagccccgcgcgttggtttagaacaagctagcggtcttgttcacaccacaccacaatgggcgtatagaagtgaagaacggcgacaagcaagtgcacacgacgaccaaggcgcaatgatccataatgaagagtttgggcatcatggcggatgagaacaaggtggatgaacatgatatcctttgatacctagggctattcaagagtcctctcgctccgtcgcatgtttaggcccttgctaccttgtgtgatttgcaggcgcatgctgctatagaagctcggtaagcatctattaagtttgtgcccgtcatggacttctatttcttatgtcatcgtgttgtatgttggtgtggaatgtaagggggctcaatcaggtaaggaagaggtccctagtcgctgaagtggttcaaaatgcccatgtgtccattatcaattatcagaatccaaattagttgttgttggtaaggtgtttatcgccaagtcctgtagtcctgtagtatcggttttgatgtgttcgatttcctgccgactgatggtgcgatggaagggggagggtgtctcttcacagcctagcgaagcaatcgattcgttgtctcgtgtcagaaaaggaacttggtcactgagcttgtgttctaccaatttttaagggcggaagggggggagtagggatggcaatggatcgagtcgggcacgggtagagcaaaaccatgcctgacccgacacccaactttgcccacccgaactctacccaatagggttagcgggcaaaactctatgcccatacctatgcccgacgggcacaggtatgcccggtggatacccagtgggcacgccttccgcctgccgttgctgccgcctgccgtcgctggctcaccattgtcgtcaatgtcgtcgccctgagccaccattgtatgcatcacgctaagacgccatcgccgccatcgtggccctgagccgccgccacaacggtgagaagggagcggagcggtagcagcagtgcaatggaagaggcaaggagcggtggcggcgtgcgctctctcaccagatctagcaacagcaaacaccagatgcagtcaggtgagcgacggcagcggcagcagtgaactcattgccgcctgcatgagttgccgccgccgcttgttgcgccgccgccggactagggagagaggtagacgggagaggtgggggtggggaattaggttagagtttagtgagtgagtatatgtgtctctgttaatgggccaaatggactaagaagaaggggatgagaattaagagatgggcaaaaaatagctaatatatatatatatatatatatatatatatatatatatatatatatattatgtacatgtatctggtcgggcataggttactcacgggtaaaattcaaaacccggctattgcccactatatcttcaagcatcgggtgggcatgcccataggtaaaatgttacacccatgcccgtgcccatcgagtcgggtatccgcggttacccggacccatgggcaaaatagccatccctaagggggagggggaagggggaggatgtatgggccacggttggtgcaaaggcaaattgtcattcctggaaaaggtactatcggtcgggcaagagtttgtgcaaggggcctggtgtattgtcgggaacttcaaccttttggcagcggaatctgataaaaacaatggcaatgttagtagaaggctgataggcaagttcagggatgtcatgaatgctttggagcttagggagctgtacctttttggtcggcgctatacatggagcagcgagcgagaacgactgactctttccaagatcgataaggtggtagtgaatgctgattgggaggaatcgaggaagtatacaaggatgcacacctgcaagccctcaactcctaagccccggatcactgctcgcttctattgacttgtgatcagccgatgcaccagcaccgaaagttcaaattcgaggccttctggacccggatggagtgcttcgatgaggttgtgcagcaagcatggaattcagctcgaccaagttccaacttccaacgcgattagtgccttccatttcaagcttcggtcagcggcgtcgatgctaagaacctggggatcaaacagaattagtgcccgcatgatgcaattggcagcggcgcactagatcatcatccagctaaacaaggcgcaggacatcccgtagcgcctcctccgcacgtcgcttaaaggccgttgtctagcacttgcgtcgctggattgaatcaggctgagtcaacgggcttggctatgtttcctcaagcatagtagcaccagcactcaattcttctaacccaagatcaatgcacgacaacacaagaaagcaattccaatattatgtcacgtcggcgaatgggtgacaacagaaagcaacaagctgagattggttcacgacttcttccttgacatcatggggcgccttcctctccttcatcaagcattgatctagacggcattgacttgcctcactttgacctatcaaagctagatattgagttcgctgaagatgtgaagaaggcggtcttggaaatgccaacggactgagcatcagggccagatgggttcaccaatgaattttataagaggtgttcggagttgatcaaaggagacctgctcacaattctagcccttgtgttgcaagtgaattcctagcacttacatctattgattgcactcttccccaagaaagaagactcgatacaactctcgaattacaacccaatgagccttatccatagttttgcgaagattttttctaaaatcatggctaccagattggctgcacaaatgggtgagctagttggaccagcgtaatcggctttcatcaagaagaggcacatccaggagaacttcatttatgttcaagggcgatcgggctgctacattggtcgaaagtgaccaaccatcctgctcaagctcaatatcaccaaggcatttgatagtcacttgggttttgggggaaaaaatgcagggatggcattgccatcatgctgggaagggcgtcaacaataatctccatcaacagctacaacgcaaaaaggcatcgggctcacaatggggattgcagtagggagatccatattgtttcccctgcttttcgtcctcgtgatggaggcgtttggggcactctgctccacgccggtgcaacgaggggtgctttctccactagttgacgacgtgatgcccttgcaagtgtccttgtatgcaaatgacaccatccttttcttccacccctcgactcaagatgttgtggtagttcatcctgcagctaatgggtcgtgtctctggtttggtaactaatctagccaagagctccatgactattatccactgctcagacgaccaaatagtcgaggtcgcaacgatcctcagctgccaggtgaaggatttgcctctaacctaccttggtttgttgttctccgtgcgcaaaccaaccaaagcacaagttcaaccaatgatagaccgactaacgaagcacacggcaaagagtgaaaaaaatgttgcggtttcttgtggaagggcgacggaaaagcatcgggggaacacaacttggtggtctgggacaaactctgtttgccggtggaatatgggggattagggatccgaaacctgtagcttgcgggggtcgcattgcgggcacgttggcccggctacgcaaagcgcagccagaacgaccatggacatcactctctcgatataaaagaaagtagcacggtgattgtggggaacggcaaggggacattcttctggactgataactggttacctaaagagggctcgattgttaattgtgctctaatcctcgcctccttcgttaagaagcgatctcgtagggtggcaacagctctacatgataatgcctgagtggctgacatcacaggggctctatctcctcaaggtctggcgaagtacttcatggtatcagaaatggtgtcaagggtgcagcttgctgatgacatcgacgataaggtctattgggctccaacggtggatggcttgttctcaatccgctccacctacgcctcctatgcgccgccaagacgaaatgtcgcctcggaaagataatatggaagtccatggccctgtcttgatgcaaattcttcatgttcatagcaatgcaaggggcctgcctcatgacggacaatcttcagcggcgtgagtggcagcttgccttcatctaccacctctacaacatggtagacgaaacttgtgcttcgatgctatatttccgaattacaacaaatgctatattcggaaacttgtgcttcaatgcccttcaccagaccctgacttcccgtcctggtggtgcgaggcatgcaagagtgttgccaagaaggaagagaagtgtttgacgctgttatgattctgattacatgcagggcagacctaccactatagcatgttgtggtgcatgccatagctaaccttcgtagagagcaccctcaccctcagcttcccagggatggctactaccacaaggaatgctcgaatggtctcctagagtagcattagaagctttggactcgtgaggaagatgacttggtgtgttaatggatagagatgggggtgtgagagggaatggttgtacgtgttaatgtgctaggttagctggcccatagcctactcattttcctcaatccccaattccccatcaccgattcgtcgtgctagggctgatggagtggtgggcattggctgctagctgcttgattaattagagcttggcgtgtttgaggttgccggcggattggtggctcaggtaggcgtcaaatggcgcgcggcggagcaaatcataggtggcgcatgtgacgatggacgactggtcattacctcagctttgatctatagcaggaagaggagcacctagctgactagctcgtcaagccgtgtaggtgggcctgattgtagcaatggcagccgacaaggacaacaaggaggcggctgctcgagacacggcaacagcgaagctggtcgccgtgcgtctgcgattgttcccaggcaatagggaaagcaagtaagcaacagtgacaatggccaagacaaccaaaactagtgcttagtgagtcttttaacttcattttcttttagaaagcatcaactactaagtataatccacctagctactttgtttatttggctggttcttcattattgtttcatcttgtttagaggactaaaacaagagtctcaaactgtgatatacagtacattagcttggtattttcttgtatgtactgagtttatattttccgtgtttgcattttcacagtagatgttgattcgaaatcactcggttagtatgtatctgcttatttcataaatacaatatgggcatttaaatgtttttcctgtggttggattgaaatgctcttagacgattcattcgtctccgccataactatgattttttccagggtccgccattggttacatggctggtgcggaaggaacgaaagtacgaaacacacggattttcaatggaaaggcgctgtcagtacaggccgggcgctctgtgcggctatatatggaggacaaatggaagacatggcaggaagctggtctgctaaacgcccagaatgacgacggaagcgcaatggggtggcgattggcgaaagtaacgctgtgtcgctgcgtatctggcttgagttgtatatatgtgctgggctggtgatgtgctctgtggcgccagctcgagtctctcggcggctctcgtgctgtagttcttcgagtcctgtaaatttgtggaacgttttttcccccaccttaataaacttcggccgcattctcgctggcccggcgaaataaattaaaattaagggcagcgggcagcctgattgccttcttctagtaccaaatatcaaactcatagtacatctaaataacaaaattagatacaactagctggtactcaaagcacattatgcaatcccacaaacaagaaccaacgagctttagtaagaaccaccaaataccatcagcataagtactagtttactacgtgagagaaatatcacgaaatttgcaagtaatgaatggtgcaggatttcctagtgctccttgaagctagattttcgtcctaaagttggcaagatttgtgttattgcaagttgctagagctgcaaaagctgaagaaaaataatctctatccccaaaggtgtatctcgagccagagacttactggaggcagcgccacggagggaggtcaagcggtgggcggcggcgagatccggcccggcctcgccgctcgccggcgcccgctgtggtgaaggggtgaggagagaagaaaaaaaaaatggtgaagtgaggaagaagaaaggggagaggaggaagaaaaaggaaaaatgacgaacacgatgaagatatttgcctcccagttgacagctgtttgccaattttgcaatcttatccttcgacttcttcaaactgccacataagggtcttctcttttttggctttttatttctggatccttagaaactttcttatttggcggttgagtccttagcatcaccgcagcgtcctactctctttcccgtgctcgcggagaaatttaacaatatgccactctataggtgtgactttaacatgatgccacctcataggatgaccttataaaaacgccacttcgtagatgtggcttcttaatgaaatgccactttaggatgattagaggcttttaatcatactttgggtgattagcacactttttaaccgaaccatcgccttctaaccacctcgccgctgaccacgacgacctcctccgctttcatcgccgctgtcgccgagcccctctgcctcgcctcccgccgcctcgccgccgtgctccacccgctgctcttcctcctcctcctcgccgccgccgtgctccacccgctgctcttcctcctcctcctcgccgccgccgccgccgtgatggggacgcattgctatcgccggtgggcggagagggagagaaggggctcacaggtttacgccttcgccccttctcacccttccacacggttgtcgcccacctcgccgctgaccacgacgacctcctcctgcttcccccctccatcccctatctcctcttcaacctccccgaccccgcttccgtcgccgccgtcaccgagaccctctgcctcgcctcccgccgcctcgtcttccttctgcctcgcctctcgccgcctcgccgctatgctccgcctgctgctcctcctccttctcgccgccgcttgccagtttacgcccttccgctcagtcgtcacccatccgcgcgcccgccggcgtcggctcccaggtggagggatgcggcggcgggccacatctcgcttgccggctccgcgcagcccggcgccgaggcgggcgtgggagtattcggcgaacgcgagggcaacggcggcagcacaagcgaagaagggaggaaggagtggtgggaagggccgagagacgtggagcaggcggccggcgaccaccacgtcagctccggcaacaggcggcaaggagccgcctcgtcacctcgtgctctccacggcaaggcagtgcagggacaggaaggaggacccgtcgcgcgttggccgaggtggggaccatgtggaagatgggcagacggcctcgaccccggcgagcgcgcaggcgagggagacagggtcggaaaggtcgacggcgaggtggtgggtgagtgggaacgtgaagaagtagacggcgtgggcggggccggtgccgagcgccatcgcggggaggcctcggtacaacgccctgacgccgccctcgccgtcgagctaggcccgtcgtcatcgcgtccaactaccacctcgttccagagcaccgcctccccgcggcgctcgaggacaccgaggtggctctcctttggctcgcgtcgcaggcgcctcggcggccaaggaaggtggaacggccgagagaatcctgttaaaacctctaatcaccccaaagtgtgattaaaagcctcaaatcacctcaaagtggtatttcattaagaagccacctctataaagtggtatttttataaggacatcctatggggtggcatcctgttaaagctacacctatagagtggcatattgttaaatttatagtgctcgcgttatctgtacggctgtaccgttcgtttgttgtgtattgcgggaacacgatttgcaccgaaagtttggaaatttgcctcttcaataaaaacttttttcataaaaagaattgtattgataaaaaaaagaagtgtaacctcgcaaccagccctaatggcgctgagatccaacaggttaacattgtgctaagtcttcactaataagaaaacattgtgctaagtccataccaccgccgtggctacctcgtctcgttatcgggtcaacgtagcaaatgggtgtacgccataccacttggcgttgaaccaccgacctcaacacaagggctactatagatttaacttacattcaggagatgcttgaaaaagttaaaacaatcctatcacatacttcctcctttccaaaataactcaatttagtatgggatgcgactcatcatttattcttcagattcgttgtcctaggatgggtcacatcccatcctatgttgagttattttgggatggatggagtataaaatcacaatgtcattgtagcatatggttaccgatgcttgttagttttaatttaagtgaattgtaatttgggccacattttattgctaaagttatattttgcactacctttaaactaaccttattatttttggattggataactgtgttttttttagtttggaccacccaaaaaaacttaattaaacacagatgaacttctacatccctatacaggctgtattttcaccataaatagatggtagacatagaattgggtggttcaaagaaaaactttatttaacaataaagagtggtttaaactacaatttactcatttattttttaggcatggatttgaccaacagtgttatttaaatatcaaatcacgtattatcttattgtaccttttcatttgtgtcctttttacactgctaatagagtaacgggaaaagccagaaggcttagggcttgtttggtttgaagccaacttttactttactacaatcttggtagtgtcataagcttggtaagttttggcactaacaaattgagtagtattaagattaaactttatggtaaaaatttgggtagcaaaccaaatatgtatttactactattgaagttacaagaatttagtagcacaataaccaaacaaagcccttaattactttcggtcaaaactaacaaatattaacctctctaaaatcgaatttggtaggatttgtgaagatttaatgcgccacgtcagtccaccttttgcaaaagaaccccgctcgttcagttaattccgcaccaggtccccgctacggctctacgtccaccgtccgatctcgcggtaggttcgatcttaccgtccatgtgtctcactgtgacggcctttccacaccgctcccccaccaccacgcgcgccgcctcgccccacctcgcgccgtcgccgccgccgccgcagctccctcctgctccactccctcgccctactccagctgctgcctgtccctcccaccgagcagccggatctcccagtgagtaggcccgggccgccagatccggtgaccccggtctcctcgccggtgtatccggcgccgcagggagggacgagagccgccggcgctgccgccctttctcctctctcatccctgccacgccactgcctccctcgccctagacctctacgcctcgatcagtgcggtgtaatatggctcggggaccgtctgactcatcgaccttgacagaaggtgagaagggaggggagagcgccgactcggccacgaccgcgacgaagacagccgcggctcggcgtcggcaacgacggctacctggtcgttcctgctctcctttttcctttttggttctagctcagtgccatgagaaggaagtggctggaccttagttcttgatgacgattacaaccttgatttgcttataatgtgtgtaaggcatgatttagttacagtgtgtaggttgtgcagagaaatttccctcggcatgtacttcaacactgtcatgtgtgatcaaactgtttagtttgaaacaatgcacactgctactcacatttctctatgctgcgattatttatttcagttaggaattgcatatacaactttggagggcaaaacgataatgttgataggtttatttgttaccatttgtgctgcagggcgtattttcatattcagacagttttggaagctgcaagtacacatggcttgcctcttgaatgtacatcaaaggagttttttatatgctgctgtactgtgttcctttcactgatgtgtgctatatgctccaagcgcataaattacaggtatgttccacaccaatttccatgtggtttatggttgtccatctactatatttcctgaaatttccatgcttacatatttatattagctacttagctccaaagaagtctgtaccactatttgccattatctctgttcagttatttcattttgtaatcttatcttctcgattggcaatgatgtgttgtttgcatctgcttgaagcagatatactgcatgcatgcttcagcttcacatcaatgttgatgtagtatgttattgctcatctaatatttggtagcattcttcattcattaatatttcatttatctcagtgaagactttcattctgtccaccattattgctgctcagtttttttctttccaactatataaacagtgttctaaaaatcgccattaggcggcacctcggcgccgtgattagcccctcggtggcgagttcggcggctgccctgccgcgacggtcaacatcggtccacctcggcgcctaggcggcctaggcacggtggcgactagtcgacgaggcggccgactgagctagctatgcgggctgctgtggcgggtatataaggtgggtgcatcctggctgcttgacttaatcccaaaatcagagtgcgtgaaggggcggctagggtttggagctgccttaggacggtgcgcaggcgcaggcgcaggcgcagccgccatagtagtttgatccgccggcagctcagctgctctgcttctctccgcgaccaagcgactagcctaccatcctctgttctttttcacacggtcgtgcttgcgcagttgtgcctcgactcgtcgatgactctgctcaggtgctcaggtgctctgctctgcccccatccttcctgccaaccaccgtgttctgctccaagctgccgacaccagcaccaccatggtgaacactggcgaatcgagcaagtaagccattctctttgctttgctgctctctaccctctactcctctgagctcgtctcaaatctcaatattctagtattactatgtgctatgctctgttactctactctttacttctttagtatttacttgatctaaatgttcttgtacaaattgctcttgtttttgttgtgggtgtggctggtggtggtggattggtgttgattgcttgcattacaatgctttcttgctgccttgctggaatgcttgtgcttgcttgcttcgtgctggacatgctatttgtggtggtggattggctggtggttttgggtggatgcttgttgctgctgtgtatgtttgggaagaagggagggggggggggtcatttgactatgtaagtatttagtgatctgtcatctgtggcatgaaatcaagatatgcatcgtacaacctcagaaagtgtctcaatcagtcaattgtgtgatgaaattgatataatctcagatttagatgttcaataatttactaattttggtcctcctgtatatgcaaattgtctcatcaaccaccagtgttactggggtaacagaagtaccctatcctcattagaggaactccaatgacatgggatgggaatgaggcaaaacattcaatgaatcaaacaaagatagggtccaatgcttattatgtggtcacaaaatgcaggatcaaagaacatattggccacattataccatgcaaagtctattcacatcacaagacattggccttgatgaggaagcacacgaagaagagagataccataaggccgggtgtgactagatttgctttagcatttctaaccttgcaaagcttgattgagaagaagcgtgagctaagggcaatggcgcttagtgtggagtgggattgtgggaacaatgcacccgcactaaaaaaagcaaaaggcaagatagctacctctacactaatgagtaggaccttttggaatgatgtttctcagtgtttgaaggtaatacaagcatcctaaccttataccatgtgctgtcctgcatgttgatcaatcaatatttgcataattgacatgtgctatttcatctcttgcaggtttttgagccattagtcaaagtacttcacatggttaatagtgatggtctatcctgaccttcatctgtggacaaattctagaggcaaagaaggaaatcatggtagctgcaaaaaacttggagaacacctacaatcccatctttgaacatattgctaaaaagatggagggtaggcttgatgctccactgcatttgacagcatatatattgattccttattacacttaccatgatcaatctatctttttggatccttctatcatggatggtttctttgattgtattgaaaccttttatgtggtgatgatgatcttcaagctcaagtgatcaatgaacttcccaagtttaaggactagctaggggcatttgggaaacctgctgcggaactggatgtcaaaaatcgcatttctcctggtaattttctgctgcaactacaatctgcattatatttgttccatgttgcattgctgtgtcattaactcgttatttcactatttgttaaatgataaatcatacttcttatagctgactggtgggcagcatatggatgccatgttcctaatttgcaaaagatggccataaggatcctctccttgacatatagttcctctggttgtgaaaggaattggagtatttttgatatggtaacttgtcaaccttacatgcagatgcagttagcactttgtttagttgctactttcaattaagtatttacttcgtcacttctgaatcataggttcatacaaagaagagaaataggcttggggctggtcgcctaaacaacttagtctatgttcaattcaatgcaaggttgctgaaaagggctgagaaacgcaatggaaaaataacaaagatgtgctcctagctacagatgcattccatgcgcaagggtggatcactgatggtggagatgaggaagatattgatcccatttcaggacttccattcagtctcatctatgaagcaagtggggctactaaagccatgcaacctcgtaggagtgctagagtgagggagcttcatgaagatgatttcaattctggagaagaagatgaggccaatgaagagggtattgactttgagtctgacaaggatgagatcgttccaactaaagtttatgaccaggaggatgaagattgactcaatccttgatgattgatgtaatgatatcaattttgcttgcttaatggctacctctgtttcctctactatgcttattttgtccaagacttgtgagagttgagaaactgagaactctggtttagtttcattgtgctgatatggtgtattagaactgctatttggcttttccgctttggcatatgtaggttaattattctgaattttggataatctgcttcaaccttcaatgtttcattgcttcttgcaccttattcttgttgaggtgataccgtatttaaccatttgtactactgtcctgagtcctgtggaaacagtggtgattcaaccaaggaaccaaagctataaaggtacattttctcttaccaacttatttttgtattgcactattgccaacttaaaagttgacaattttaattatactagcttaactgactatatgattatttttccattgcattgctggcatgctgcttgttgatgatgagcttcttcactgagctgaaggcctaagccctggaattggaggtgcaagttgctatgttcagcctttggcatgttggcaccatcaaacaaaaggtaatataaaatattcaaatcctaaacacatgtattttctccaagttggctgttggcatgctgcaatttgctatgttatataaatgaaattgataaattggcttagccattggatacaagttgcctgctgactcctccctccctagtcagacctaggcgccacctagttggccctaggcgctaggcaccaccctcccgcccaactagcgtctagcgtcttcttgaacactgtagataaatgcctagatggggaaaggacattctctgtacaaaagagaatgttcattttttttaagtagcacagcatcatttttttttttagattttatagaatgtcttagcaaattttagagaggttatgagtcaacctttgatgccatatttctgtacaaaaaaagatgagcaccaaaagaataacatgttgtttaaagaaaatgtaattgttgccagtctccagattatgactatacacacttttaggatatgtctcggacccgatcattttcattaaaaggaagatgactccaattttgagtcttgaaaacattcggtctctagaataaccttgatttattcatgcttcatgacatacctctatattccttttttattaggtcgcaacagaaaatggatggattggatccatcatggagagatgatttcctgttcatcttttaaacggacacaaatttcatttaaaggtacatttcaatttagtttgcgcatcaacttgttcaatggcaatgttttcctaaacatatcctaactgtatattgctcacgatgcaaaggtaaagcaatatcatgagtcaaatctttttatattttatctttgaattggtttgctttaatatatacatctctgtgctcagagatagattatttcattgtttagtttatcaatcttttttatacatgttttatttcattatttgtgaagccatgcttttgaatcctaaaatttgtgtaaccgatctgtttcgcaaggttgctgtggttcgtcaaactaagtgtaatctgctgccgctgtgctctacaaagctcattgtttcaacgttgtgtatttgacggctactgacaaaaggaccagggcagaaaaaaaatggagcctacatgaagaaatatgcaatatagtagtataactataagacttctgttattgcatccatgtttttgttaactgatcatgcaatctttagctcataacttgtggtagaaaaattgatttcatgtgtttaagagtgtgatgcgaggctgaaaacactctgtataaatggttgatactatatttttttagctgtactgacgttcctattcaaactttctactaccactgtccattctggttctgtatcacatgtatgcttagttacactacattttgggaccgatgtagtatacttttttaggtataccgactgatagcagtaactgcacatcacggaggattgttattgagtactccctctgtcccataatatagcaacctagtatttggattggatattttatagtatatcgaatctagacagaagagtgtctagattcattgtaatatgaaatgtcctatctggtattaagttgctatattataggacggaggaagtagctcattgtcaagaattatatatatatatccgtgttcgtctctctcgtcgaatcagcctagtcataccagtagacatgtaccatattatgtaccatatttatctgttgtgcacgatattgagtgccaacccttgcatccaatcatattaatatgtttatatatgtagttaatattattattttttggacggtgtaaaaataatgctagattccgtgctgacctgcataagagccgatctacccctaccgcacactaatcacttgtcaatttgtcattcctaactaatatcgactcgtgttctctttagcaatcgatcactcatacgaattacgtgcaaataaaatcttatatactcccttaattctaaaaaaaaggtcaacctaaaatttagattaaattatggatgggatataattagtacaacgaatcttgatagaacggagggagtagaaaatagcaactggagtagtacaattaattaagttatacacatcaagaacgccgtgatcttttgatccatcacgtcgaagctggaagcctcgggaggcagaaggaagcagcggccccagcggccgagcgtggccgtccgaagccctccgtctttgccgtacttgaggcggaacatccgcacgtacatgagccgactcgccgtcgccgccggctgctccacgcactcgagcagacagaagttgctgtcgctgcccatgtagtggagagcgacccctcggtgccgctccttgtccttgcagaagaggacgtccttgccgatcttgcacgacgggacccgccacctgctgtcccggcctctgatgcgcggggccgggacgtcggacgagcagaggcggccgggcttgtccgggtggcggcagatgccaacccaggcgtccagctcggcgtcgtagtgtccctgaccctggaacggcagcatccagcagccgtagtcggtccactccaagctctccgtgtcgaagcagaaggtggagcccgcgtgcagccacggccagccacggctcaacgtggggaagaagggcacgtccttcctcgccacggacacgaagaaggcgcggccgttggggtgcgccgcgtagaacgtgatcctcgacgggtcgaacggcggcgccgccgccgaagcgacgctgctccacgaccaccacccgtcgccgccgctcgggaagagcacctggaagctgacggcgcggccgctgtcgccgccgccgtccagggcgtacagcctgtcgccgacggggacgaagacggtcgagcaagacggcagcgtgctgtcaccctcacccggcggccaagctgggccgcggagactgcctgtgcccgggcatcgtaggccgggatggcggcgcgggtgggcgacgggtgtgtggcgatgatcttggtgccgagggccttgaagagcatcgcctgatgacgcggcgccttcacgcggagacaccggcgggaaggcagatactccgtcatcctctctaacgcgctgtcgtcgccggagtcgtcggcttcgaagtagtactcgtccatatcgattctgcggaagccgtagccgtgcttggagtcatccagcaccaagtacaggcgccgtttcccgccgccgccgccgccgccgtcgccgtgtgatgacatgctgcgctctgaacccgtcttctgttctacccacgtgtcacggtgattaatcgggttccctcctctgctttcgtaattcgtatcgcgctgatcccgtgctatatcgtgacaggttatataggagtagacacgtagctaggctgcagtgcagggtccgagtcggaaccgtacttattagttctaccgaccttaactcctagggagacgccatgccagctttgctactccatttggaccaactccaaaatacagcccataacttgtgcgcacaagtccttttgttccacggcccaccgtgccggcacgaccccatctcggcctgtcaccccttctaaaaatctctcccgtttgcaaatactgctacttaacatcagccgttgccagaattaaaatattaaaaacttttatcgaaatttattttttaccatacaattaaatcgctaaaaacatatatatataaaattcttgacaatgagctactcaataccaatcctccgttatgtgcagttagtgctatcagtcggtatacctaaaaaagtactacatcggtcccaaaaatgtagtgtaaagcatacatgtgatacagaactagaatggacagtggtagtagaaagtttgaatagtaacgtcagtacagctaaaaaaatatagtatcaaccatttatacagagtgttttcagcctcgcatcacactcctaaacacgtgaaaccatttatacgcacgagtcactgcgtgcggcagagatttttgggggtagggatgaaaacggatattccgatcggatatgatacctttcagattggatatttctcggatagttcggatgtggatacaaatacggatattttctcccagatacaaattaatacggatatggtacctgggtttccatcagatacggataatcagtggcggacgcaggattaaaataaagatggggggcgaagatgctattctcaataagaacaactaaacgcaaaaaataccatatttatgttgtaattatatgttatataaacatatagtataatcaataaattaaggcaaacaaaaaacaaaaatgatattaaaataaagtaataatttttgcgccatattcatcatacataaaaagatactagtaaacatatcaatttgtaaatatgagtcaattcagaaagcatagttgatagatatcttttaaaaaataaatatatgaaaagatatcgcatacccagaataagataattattattttgcttagaagggagagagagagaaaaacattaggcacctaactatagtaggggacgggggtgagtagtgtcgaggaattgactcaggaaagcatcacatacgcaggattaaaattggacagttgggctgcttatttatgggctaattgcaaattggatgtggtggtaggcagcccaag

SEQ ID NO: 5230 - DNA, 85182 bp, Oryza sativa
ttatgtgtaagattttacttgcgaacgagtaaattagaggttaattaagaagagatgatttatgcttacaagtcgtcgagaaccttggaggcgacgaggaggcaggcgaggaggaggcggtggacgttgcgggaggcgacggcggcggcggggcggcggtgctccccatgtctacgtactcgtacgccaccacgtagcactcgtgctccagcccggcgtaccggtgcacgcgctccatatactgcgccacgccgatgcgcggtgccggcgcgcccctagccgcctcgaacgccgccatccttgctcctagccccgccgccgcctcccctccgccgctcagcgcctccaccgcgtcgttccgcgccaccagccgctgcacggcgcgcgccaccatgtccagctccggcggcggcggagccgacgccgtcgccttctgccgcgacatctcgccgcccgctgccgcggcggcgtccatggccatgcacggcatcgacagcgtggagtggcgcgcgttagctcaagctgtagccctgtagctgattcggcttggcgcttttttttttcctctttttggttggcgggggattaaccgcgggaacggacggtggatgatgcggcggcggtggggccgtggccgtccgatgaagctgtctctcttcgattttaggaacggaattttctgtttcgcgattcagacaacaccagaatggactgttcaacccttatttccgattttgtcggcattccgtgccaaaatcgtgatccgaaatggttttttaggagtggtggacaggatgctcatcctctcccactcaccgctctttgctgtccataattttagcacagtttatcgttaaaaaatatacaacttttaaagcgataaactttaagaaaaaatatgtatatttagtttattgatgtcatattattctcatgtttttttttcatccgttcgtcatcgccacttactgaattctaccgtaatttttccccttaaaaattgcacacttggacacttggttcatttaagtccccctctcatgctctaattacgcgttcaccgctgactgaaatttgggttactagaaggattttgctcacaaacttttgactcttctatcagtcaagaaaaaggaaaacctttcactctacttgttaggcatgcggcatcaaagttttcttggtcagttttggacttgtggttggggctgcacggcctaatcaaagtgtgatccaaatgatggttttatgccatcatgggccagtggtgtcactataaattcaggcctgataagcactagtgttctgaatatcttcagagttcagaggtgaatacccaaaatattcagaaatcagtagtcatgagtttatacttttcagctggaacgaatttgctattgctcgagcaccgaatgtaggatcaactacttcacaatctccagaactccagaagaagtttatcactgaacacagttcatggacaaactacccggtaatccgaagaacaacacctgcaaaaaaaagatgtgaaagatcacatgtcaggttgtcttctccacaccgctttagctcacatggctggagaagcgagcatgtcaacttgggaagtgtgctaatgactccatgaaattaaaagatcggaacggtggggacgaagtaattaagcagatggggggctggtgctttctgacctccggaattcatgtctgaattctgaaaacacaccggacaaatgctccggtctgaaagatgacagccgttttttctctgttccttcctcctcgcttttattatggctttctgcaggatggtgcaggtgactgttggctcaattctggagaacgcttttcttggccattcactggcctgaaactctggatgatttgattggattgacatgatgcattgtatcatatgatggcctacatgctaccttgaactcctcaattgatcagagagaatcagttgcatttgcaaaattctgcaatcttctcatttcaggcttcagagatgctatgggctgcagttgcagtatcctggcatcaccaacctgacggtccttaatcgtagaattattgaaaatcttcactttatctgcataaaagaggtgacatgtagggacacggacaggcatagatcactcgctcgctaccttcctttggcataggttaagttaataatcattgtgattctctgcgatttattctctgcttgaagagttgggtgagtgagaataataaactttgatgttctggccgtgcagatctctctccctttctcacgtgccacggttgttcttggtcccatccaagaatgggctcccactgggaaggaaggaacaaaagttcagatctatgatctatcgatctgtgtttcctcacaacgacagtcacagtaagtcagtaaaaaaatactcaggtaattaattactgtcttaagctgtaaataatttttgtttacccggactgttctgttcctaatcatcatcgagaggaggagttggagatgatgttgtggatttcgaggcgagcagctttaccacgagatgaagcttcgtctagttatagccagcgatttgacagtatgcgaataatgtagagtgtgatgtgttgtaattgcttcaaaattaatttgctttttattgaaggtttcggttaacttttgtgcacactcgccagtgagagtttggagcgtagtaacatggtttggtgatcacttttttgtagggcagtactgagttaattataatatttagaaaaggattaccatgtggaaaagggattatggtacaaccaaactgtgatgagcagtaaggtgtgcaagcgtcggttcggtctactgatgttacaacagcaaacgaggaaaaatcatggccaatcgcttgactaaagttggagagaattaaaacaggagaggaaaacacaaagcttaagacaatagaggagagaacaatgctgtgttctttcgagagagttaccaactcatttttcacgtgcacgattttcaaattactaaacgatgtatttttttaaaaaaagtttctatacgtaagttgcttacattaattcatatttcaaaacaataacaaatacttaattaatcatgttattttaaaaataagttaatatgatttttaaagcaacttacacgctcactatacttcaaattaaaactaattaaagttaaatggtcatgtcttaacatgtccagattttaacatgttttactgccttacacgtccactgtacttcaaattattaaaaccaataaaagttaaacacgggtattgatctcacgagcatcatttacaaaacaatgcgaatctgaacctgtcaaattactacagctttgcaaaaaacaaaacaaaagaaaaaaaaaagataaaaaaggcttaaggcgaaaggaagtctcagacctaaaagagggccccacattttctttcaccttctcttccattccacctctccatctcgccggaatctcacctccgatccggcggcggcgccgccaccgacaccgagaaggggcgtcccctccctccgccaccgcgcgcgcggcacgaagagccaccggagcattcaggggaggggcgttgtaaaagcgcgggcggggggaaggcggggatggagtcgatcatagcgcgggcgctggagtacacgctcaagtactggctcaagtccttctcccgcgaccagttcaagctgcagggccgcaccgcgcagctctccaatctcggttgggatccgcttctccggttgaggatgccaatttggtcgcctccgggtgctaactttttttttgggcgtgatttgggtgatgcagatatcaatggcgacgcgttgcacgcgagcctggtgctgcctccgtcgctcgccgtcgagaccgcgcgagtcgggaagctccagatcacggtaatggcgggagccctgacccggtgcctttgtatatgtcagtgtgcttactcttcccggcttctccccctgaaggcttaaggggtgcatttagtgttagatttcttattgtttggtttccaaatttagatgattttcgggagagcattgttttgcactttacttgcgcctctgcgtggtagaaatctgtgatgaacttgtgatttcgctctcatgtgatagattatagctctgggtttgaaacgtttgtgtgggaggctaagtgaatgatgattaggaagcagctatttgtacctgtcttgacaatgccatgaaatttggactcccattaatttttatcatgtggccatacctgtgaaaaatctagagaaataaagctgcccttggtattccttgcgcatctggttattgcaagttttggttgggtggtgatctcaggtaaatttggaaaattaaaatctatactccattagcattgacctcaaagcttcaggcaattattgaatagccattgggtacttgcaacttttggtgataagcttatttcgtttccttgctacagcttccatcagtgtcaaatgtgcaagtagaaccaattgtggtgaacattgataagcttgacctcgttcttgttgagaaggacaattctgaagatctttcaagcactagcaggcaaattcattcttctggctctggtctcatatggttgaatgagcacagtcatttactgatttcagtcttctctgtcattttgttttggtttgcagtgctttatcgccatcaccagctaaaaacagcggatatggatatgctgataaggtttatttctttgaccttgatgttcaacgtaaacacattccaaacttttactctgtaaaaaattcaatatgctgtctaaaaataaaaattgtcacttccagttatccatgatggttgcatccaatgcacctattttgctatctgatttgataattcttctatattcttatgtgatcttgtctgatattctgaaaagcaattctctgctcttttattacaatatatacaattttgaaaaaaaatacgtgcagaaaattgaactatggatagggcttaatttgctataccgtggttagattgcagatggaatgacagtccaagtcggtattgtgaaccttctattagaaacacatggtggtccacgtcatcaaggaggcgcaacttggtattcatctttgtttgaatgatttttggccctttttcttatggcttagctccatatctcagttcttgttcatttctcttattaatatctgtttcatgatgtagcttttccctgcaatgtttttctgcaaacaggaacattcattccatctttccttttcaggtcaccaccgctagcggctatcacatttcgtgatcttgtactgtacactacaaatgaaaaatggcaggtactcttgcaaattagattagcattaaatatagtaaatgattgcacttcagtacctgattagaatgccttttatataggctgtaaatctgaaagaagcaagggatttttcgaacaataaaggattcatttatatttttaaggtttggtactctccttttctctccagaagattaatgtttatttatgttgctaactgttctattgacatttcttaaaaaaaaaactgttctattggaaacataatgaactgagaaatgctacacttgaaaggatttatgaccacacacatttcttctttcaaattcacagaaattggaatggcaatcactgtcagttgatctgttacctcatcctgacatgttcacggatgctcggtttaactcttctagcagtgaagatggaaaacgagatgatgatggtgcaaaacgaatgttttttggtggtgaaagatttttggaaggaatatctggggaggccaacgtgagtgcttttgaacttcaggacatatcatatggaactcgatgtttttcttttcagtttctcttgaacttccctctttgtgtgcttggcttacacattgctttgaacatcagatcacagtcaaacgaacagagcaaaacaatcctgttgggcttgaagttcagctgcatattactgaagctctctgtcctgccttaagtgaacctggtatttggttacttttcatgatgcttgatcccttccctttctgaatgctgtttgaagtggtatttgagcttgaatgctattttattcaggtttgcgggcttttcttcggttcatgaccggggtatctgtgtgcctaaacaggggtgatgtggatccaaaagctcaacaggtttgccttttccatcatgcattttaatcactgcattgcatgcagtacagaagtaggatgtttattggttttctttgtgtccttatttcttttctgcttttcttttttgaccagcttgcagaagctgcaggatcttccttggtatccattattgtagatcatatattcctctgcattaaggatgctggtatgtaccagctctggaaaacttcaaatatgctatgtttactattctattctgactttaaaccattttgtcaacagagtttcagcttgaatttctgatgcagtctttattcttctcacgggtaaatttctttaccttccaatttattgtactgatgtcatctgctgatgatatgattgatttaggttatgtaatttatcttattgtactgatgtcatgacaatcgtttttaaatttgttgaaggcaagtgttcccgatggggggatttcaagaaacttgtcttgcataaagattgccgggctctttctgaggtactatatgttactccctctgtaccctaatgtcgtgaccgagaaaaattaccttttcccaaacgctagtgtattaatccccgtctcaggaaaagccggggtacaccacacaaacatgatacaaaaggcacatctttattatatcaataatatttacattattacaaaggcactttaggcctgacaatcaaaaataaacagcagcggactagcgggcctacggctccatcttcacaggcgctcaactggggtataagccaggactccacctaggacatcttctccaaagcttctcttactgaaggggggaaagatagagcaaggatgagtacaactacagtactcaacaagccacaccgggagatgcacgattaatgcaagggggtacaaggggtaataatataggggttaagttttgcagtaaacagcatttaaaagacacttagttgctcaaagctattttgtaaagacgatcctagagatacacaatattattaatcaagaccgtgaacccacacgaacctgccttaacccaaggcgtacgatgattcagaccgaactggcaacccgacctgggtcccagctcgtcccaagccaatccgggccaaccattccacattttagttgttaagcaagttttaagaattaaaccactaacttgggtacattgctaggcttgcccataatcgagggcgcggctattcgaatagattatactctgatcagaggtgtacatctttacccacaagacacatctttactccgcattccatggccgtggaacccgtcataaagaatgtgacataacccctttacccatcctagccatgacaaaagcaccgacccaacctcgcctacggccagaatcccgggataggtaggctaggattgaacccctagcagcagaacaccggccctgtgccatgacatctcgactaccgagccgcagcccgtgtagccttcatttgccctagagatgtccatcgagccccgatttcgtccatctctatccgtgtcctcttgccaggactagactgagcaccgagttaagccttacccattagacatgtggttagtacagtagtgctttgcaatagaggcccgaagactggtccttacggtggccgaggtgctcctaggaaaaccatgcacctcgagcccaacctaaaaccattttgggaggtttgaatagaggggggaggtgtgtgttcggagacctccggaatgacagaagctacgcgaagcacacaagcaaagctacaaccctgtaaagaagcaataacaatacataaaaagaaagcacatggttctttaggttataacaaacattaagagacttgaacgggtcgattcggagttcgtatggccaaggcatggtcatccgaagtttaatgctgttatatggagatttgcggattattataattaagctttgcaactataaaacatgtgtaagctctagcctggaaaagacaagaaggctgcgctgctgacatgcggaccccacatgtcaacctaagggaccacggtggaccgggtacacagagacagtccacgggtcgacgaaagcggacctcgtgtgttaaccgaggcaagtggccgacaaacggactctactagacaccacgtgggctgcacacgtggaaaccacgcggctaccgagcgggcacactaacacggtcaccacacgcacacacgaacgactaccgacaccggtacacgggtactggggtcgacaaccacacaacgggcacggggcaacaccgaaaggacgaggacggagcaacgagaggagggagtgggccgggaaggagaggagggaggggcggcccgggagaaggaagggagggggagggagctggtccgaggggagaggaggcccgagagagaagggaaaagggagggaggagagaaagactttgggctgaactcggcccaaaggaggaaggaggattatttttagttttctttttaataaactttcttaattgttgttgttgcttaataaatatttccggtgctctgaaaattcaagtaaaaatttgagggctccttttagaccaaggagaatttaacaaaaattctccgggccacattcgaatttttcttgtacgtattttagtgtttgccaatttcttttcgaattttaattaattctattattccttttagagaatgatttttatttcgggatgaatttatcaggacgtgacacctaatataagggattttgacattttgcttgcactgtttgatcactcgtcttattcaaaaaattttggaattattatttattttatttgtgatttactttattatccaaagtactttaagcacaacttttcgttttttatatttgcacaaatttttttgaagaagacgagtggtcaaacgttatatgaaaatagtgaatattccttatattagggggcggaggtagtacgtgcatccttgagtcctttttactggagattatatgcacctggaagttcatcgtaattcacttgctcagttacaatacatactaaattcagtgcattttgttgatgcctataagtatcacatgcattaagcccaacagaatttagttgagtgcattgctaggttaccaaaagatgcatatggtgcaaaataggatacattcacagtttaacttttcgtaagtaagggaatttgtgttctacctgtgctagaatttttgtttgagctatcaaagcaattgaagaacctctgttcgatcctcatgtactgacatgttatttctccagggacacattttctcgtccaccatgcacattgatacagccctctatgcaatctgttccacaagaacctccacctgtgcctgactttggtaagactttatgatacctttgctgagataaatgaattggtcaagtctaacgcctcctattgaattgccaggtcaaaatttttgtcctcaaatccatccatttgagaatcagcaattggaattcacgtcaggaattcctttattttccctctattgtcttcagctcactccttccccattacctccaaagtttgcttcaaaaactgtcatcacatgtgaacctcttatggtgtgtctccttaacattgagagtgaagtaatgctcaccctttttttctgcttaactaaacaccgcccatactttctcattcctaggtaaccctccaggagcaatcctgcttaagaattgcctcattcttggctgatggagttgtggccaaccgcagtgccatattgcctgattcttcaatcaacagtatgtcattttatattaaagaatttgatctctctattccattagatgctgaggaaatcacgaggtacagtggaactaagaatgtttgcccgcaatcatcatttatgggggcaagacttcatgtggaaaatctatacttctgcgagtcaccatcagaaaagtgtctgttgctaaaccttgacaaagatccagcttgcttccttctctgggggtaccaacctgttgatgcaagtcagaggaagtgggctactcgagcttctcatctaagcctctcacttgaaacctctagcacttcgaatgaacagagaacagttaggggctcctctccaagtttgtggaaatgtgttgagctggatgacatccggtttgaggcagctatggttacagctgatggtagccctttgttgattgtgccacccccagagggtgttgtgaggattggtgttgcttttcaacagtttacaaccaatacttcagtagagcagttgttttttgtgttaggtctctacacttattttggccaggttggagaacggatttcaaaggttagcaaaggtaactgctctgcgacaaagacatcagctgacaaacgtgagagaaaactgcctagtgacacagcagtgagcttaactatgaatagtctccaactcaatttcttggaatctttatcatcaaatgacttacaattgcccctggttcagtttggtggtgaggatctgtacctgaaagtttctcatcgcactcttggtggtgcctttgcagttacaactaacttgacatggaaaactgtctcagttaattgtttggaaggagaaagtgctatatttggtgagaatggcactgcagttactggtgaacctaatattttgttgcatgaaaatgggcatcccaatatgagagctgtgttttgggttgaccaccggaataagaaccagtctaaagaagctcgatttattgacatagacatcactcacgtaatgccttatgacatgcgggacatggagtgccatagcttgagtgtatcagctaaggtatctggtgttcgtcttggtggtggaatgagttatactgaatctttgctgcatcgatttggtatccttgggcctgatggtggtccaggggaaggtctcttgaggactctgaaagatttatcctctggtccacttgcgaaactattctcgccatctcacctcaccgacaaggaaggtagtgaattttctgtctttgccatttaatttgttaattcatgctggaaattttgttggtaagcatgcatgttgattgcttctgctcagttgcgagatatttttgctgtttttccttgtattattcatggattcttccccgttccccttgaattgcagatggaatgcccaattccaaagacaatgactacaattcgaagtttgacctggaggtgccagatgatcttgatgtgtcaattgagctacgaaactggctcttcgcccttgaaggcacagaagaagtaggagattggttatcgcctcatggcagtgatcatatcagtagagaagagaaatgttggcataccacattcacgaatctacatgtgtcaggcagaagtagtgatcggcctggatctgcggagaaggtgattcacaaaagggcccttccaatagaacgttttacggtatgtagtggattattttcatacttttgcatttctatgtggcacttttattttttatccagttcaattctgagacactatgctgcacttgcaggctggaattgaaggtttacaggcaataaaaccttgcctgagagatcaactaattggaaatgcaacatcaaataatcttcaaacaggcagtgtttttgataacacaagtagcattggtgaccaaggtgtcgatgttgaagcgaccatggtcatttgcgaagatgagattgaaggtcccaagtggacaatggataatgtcaagttttctgtaaaagaaccggtatgaacatcttctgaatatttgtccaaacctctcggaaattaacaactgcttcctgaactagttctgtttgtttgactcggcagattgaggcagttgcaacaaaagaagaattagagcatctcaccatgctttgtagatctgaagctgatgcaatggggaggatcactgctggaattctccgtctccttaagcttgataagtctcttggccaggggactatagaacaactcaggaacctaggtatgtgttccctacatgtaccctgatttattttcttgtagatgccatgctaccctgtgttttggacttttccccttcttttgctcctttttggtttgctatgaatttttactagtaatacactgctatcagctactccttctgtttcgtattataagtcgtttgactttttctatagtcaaactttgttaagtttgaccaaatttatagaaaaaattagtttcaaatatcaaattagtttcattaaatctaacattgaatatattttgataatatgtttgttttgtgttgaaaatactattatatttttctataaacttggtcaaacttaaagaagtttgactatgaaaaaagttaaacgatttataatatgaaatagagtgttctttatctaactcctttgttgggtcattaaatgctgcaaagaggagatctagttacggttttttatgcccaagtcgaaaaaacaatcctagataagacaaaactgtctccaaatttttcatcgggggtttttgccttggtgtatactgtcaacaaatgccacctgggagttattttgatctgatgctttgtgcttcagcaaattatgcagcaatcactattatttggttatatgccattgcttttctttcttgtttatgttactgtatttttatattccctcgtacaatttatgctgttaaaactgattcttttttggaaaatgcttacctacttcattttctcaaaacaattttagattatcttatgaaattgtgatgtcccaggaagcggaggaatcgacaatactttttcacctaggaagttgagcaggcagaacagttttggcagcataggtactcctaggactcctaatctgcactcaactacagatgcaggaacgaaagagttactggaatcaacagttgcttcattacaaatcgaaatcttagaatccaaggccaaatgtacagccctcgtttcccaggcgagcggtgtggaggatcagaaatgcgccgaagacatcaggcaattgaatgacaagctagagagcatgcaatccttggtgacaaaattgagaactttgatctaagttgcacatagttttttgtgtataggttcgtgcagtccaaaacttggaagtggctaatgctgtacttcctcttcattattctttttgtgtacatctttatgttccttggggtgtatacaggtggattctggaataatgagctgacacgcagcaaatataaaattttgtagctggaatgtcacatgtagcactgtgttcaaaacttcaagtgcagtcattaggaataacatttttgtcatctgtatgtgactcatgtagtatcatatgcaaagttttgctgttgtcacatacaccatctttctactggtggactgggtgttttgcgaccaaaatatgtatacataaataattttcaaaaagaacatatgtactaccaatatactctctgttttatattgttttatattataagtcgttttgatttttatcttagttaaacttatttaagtttaaccaaatttgtaggaaaaaaatatagtagcattttcaacaccaaacatactatcaaaatatactaaatgctagatttaataaaactaatttagtcttttatatattactaaattttcttaaaaattaaatcaaacttaaaaagtttgtaaaaaagtcaaaacgacttatagtatgaaaaagaggagcaagtttttcctctgatatctcacttagtactaatatcagcagtgaacctttatttttgtcatgtttcaattttttgtatggatttatcccgtgcaaaaattttagtaatgagaacaagatatgaggggataaatttgtaacaaaaatatttgaagtacaataaacctattggacctagatatatgtttgtatataggtgtattttatcggcatactcaatatacacgaaggcaaatgggtcattttcatgcccctccatattggcaatgtgacatgtcctacatatgctaaattggcaatatgtaaagatttactcttcaatgacattttttgtaatttcatccaaaaagagtggcatctcaatagtctagttgtaaaaatcgaactgaaccaagggtttaaccaaataaaccaaaaccaatgcctagtccgaagatataactgacttgagaaaaatcatttaaacccagatggtttactacataaccgaaggaaaattggggtggcgtagggattgaaccccccacggtcaaggcccatgggttctttcacaaccttacataacccttaaatattttcataccaaaaatgtataaaaaatgaacgcatcgtattttagacctaaccctcaaattttctaatcaaaatagttgggctcgttgctacctctatttgcatacatgcgtgcgcacctgactatttaggttagttgctataatggttttagaaaacgaaacaaatatatattttatgttgattattaaaccaaaattctctcaataaaatatataattttattattttattattgaaccgatggttgaaccggtgaatcggtggattcattcaccggttcgaacaccggtcgggtttagagaggcaatccgccgccgccgcctgcgccgatccccatccgccccgcgagcgagcagaggcggcgctgccgctcgtcctgctgcttccgccgcatccacatccttcgccgccgccgccgccgcctgcgccgatccccccatccatcccgcgagcgagcatcctgctgcttccgccgcatcctggttagcacatcctctttcccatctctccctctctctttttttttatcgaatttgcgttaaccctagcttctgttgcagaaatttggcttaaccttgatgtttgtttgttcccaaaaagtttgggggtgttgaactgaaccccccatgccccatgttagatccgcccatgaatggatcatgattcactccaaaacactatggagcatcctgttcctggagaggagcatgaggaggataacagcatgaaagtggatgtggcatttgatggagtgcacagcccgttccggtacaggcacaagaaaaggtccaaggtttgggaggagtacaagcccatctttctgaatgggaaggttcagtttgcggagtgtctctactgccataatcgcctcagctgcaaagattccaacggcacaagccatctatggcggcatcagaaaatctgccctggcaaggaggaagcggcgcagaggcgacagaaggattcctacttcccatgcggtataccattcttgcctattctgggttcattcattactcaatagtgtagataagttaacattggtgtggtttaggatcttgagatgtagatattcctttataaaggcgatttacctcaggaatataaataacgtttccatattttatatgcacagttttggtgaatgagaacgatccagtttcaccccacgatccggtcaatgatgttattacagagacgcttagtgatataaactcggtaacacccagcggtaacagattcacgtcaaaggtgtggaaggagtttacacctgtctatattgaggggaaactccaggctgcagattgcattcactgccagaagcgcctcagtgcgaataagttcggggggagaagccatctgagtcgacatcttataacctgtgcaggacgacgtggacgtggagggggccaaattcatcagaagggtttattttatccttctagcgtgcctagtttgaagtccagggtgcaagatgagctctcacctgccttgacaaatgggaaggttcagatcgcagaatactctagcaagcttctgagggcaagtagctctggtgactcgacccctaagcccattcgagtggtaccagcagagcattccgtgccgactccagattatacaagcctgatgaaacagaggacctcatttgtgaccactccagctggtcaggaaacatctgatccagacctagtcgggatgatagctttgcatggttatcctttgtcaattgtggagcacgaagaaatgatgagatttgtaaagaaactcaaccctgtggtcaatttagtctctcgcaatgctatggaagaacattgcttgacactatttcagaaggaaaaggaaaatataaagggtaaaattgcacatttttcccgacgtgtctctctgtcagcaagcatctggactcctgatggacctgagacaacagtaaattacctctgtttgacagcacattatattgatgaagactggaaagttcataggataataataaaatttggaatgttttggtccgcgcctgctgatttggaaaggatgatacattgtatggaagcctgtgtcccagagtctgagagcggatcatataatgtcatattggatgccattagagattggaatcttgatcagaagcttttaagcttgacttctgttggtgaagttaggggtgacaccaatacttcattgctaaaggaaatgcttatagagaagaagtgccttcctattggagggacgctattcaatgttgcctgtgtggactatgtccttaacagtattgttttcaaagtgcaagcagatatacttcgtcttgttggtgacatagtaatggattttttagtgtcattgacccagcagcagcttctggaagttatttcacagacgggtctaaagtgtccacaagaagatgctaagtggtggcacaaactttattttagacttgaagtgcttttgcatttcaagaagtcatttccttctgaagaaagggtgtccccagaagatacaaaaactgctgagtccgtttgcaagattttgaggacaatttatcgtgtcattgaagttatttccagccctagctctccgacagcaaatatatattttaacgagatatggaaagtcaggacagttttgcaagaagaagcattaaatgatcacagagaaatagctacagtggctatggtgatgcaggaagcattcaatgagtattggcaaaattcatatttgtggttggccatacctgttgtgctagaccctagattcaaattcagtttcattgagtttcgtctgaaacgagcttttggaacagattcggcaagctacctatctgtaatacgtgaaacagtccgggaactcttcaatgaatactgccattctttgaatcaggcaagtgatgttgtttcaaacagtgaagctttgtgtgcagatgataatgattcgttggaagattgggatcagcatctccatgaacaagcaagtcgtcagctatcttcggagcttgatgattaccttgaagatggtttagttcctagaaaggatgattttgatattttaaactggtggatgactcatagtactaagtacccaacacttgcaactattgcacgggacatcttagccatgccagcatctgctgttcaatctgaagcagcattcagtagcagtggaccagtaattccaaagcaccagagtacattaaacatcagaacaatcgaggcacttgtttgtactcgagattggatgagataaaactggtaagattctataaattgctactcagctccatcctatctttgtgattttggtagtgtgaacacactgtgatttagtccatgttttcttattaccagaatcttgtttccttgttttcctgtattggaagtttggaaccatactatatgatcagatgaatgtcagaaaccaaagcctacaatgttagtaactttatatggaagtacatattagaatcttacatgttcatgtgcaatcttagcagctacatcactttaggatgttttagatcatgcttgtaatttgtaattgaaacattttgatcccattggcaatcatgaatatcttgttctgtgattgcatgctttggatcacttaataagtttgtgcgttatagtttgtgtccatataatcatgatgatatctcattaggaacttgattcctcacatctttttgctatatgctcttacatgacaaaagaaggtcgctgttgaaatttcacttattaaatcaatgcagttctggtatatcctcatccaatctattcatgtgcaattgcttgaaaaatggtatgctgcagtgaactgttgagatgggttgcatgcagctttcgccggtggaagatttcaggcagtgtatgatggtgcttctgaccaaggataaccgctctgatgatcgagccccaacatggtgtatcaagcatttgggagctgttaaacttcatttcagtcgagatgtgtatgcatataaatgttactcccatcaccccatgcatttgcctggtgtagtgcagatgtatgccgttgtttagccaaagttcaggtcagcccagagccttaggtcaagtaggaactaggagttgtacgacgagaatgttgcaaatatcctctgttatgagcaattaatctgtgttatgtgcagccttgtttacctgcttatctgaattgtttgagggtacgtaggcaatgcgtgttgctgtctggtcctaatggaccgaatttaggatgtggcccactattcagcactatcccgtaaaggtaaatgttgtttaaaggcccaacagctgaacagcataaccctcatagtttattagagaataaaaattaatttataggtaaaatttgtatatatgtgtttttataacaacttaaaaactaatactgaaaaaaaattatgttgaacatatttaaaaatcaacttcaaaattaaatttgaaaattcaaacttgacttttcatttagcttgcgatgggctctagcctctggctagcatagcatgccatgtctgggagggggctggcccattggtcagacacaactgagccttctttttacatgggccggaattgtaggcccatgtacacagcccacaaggctattttctgggcctctatcctcctccacgccggggagccttccgtcgatgaggctccccgacgcgctcctccgccgcatcgccgtcaggaatggatagttccaaaaacccatcgatttaccacatgttccattaatgtaaataattctacatgctaatgctaaaatttaatttctactcccttcgtatcatttgaagtgcagccataattttccacactcaactttaatcattcttcttatttaattttttttaaaaaaattaaaaacataagttatgaataaagtattattcatgttttattatctcataaaaaaataattatcatattttttttcaaataagacgaaatattaaaattgagcatgaaaactcataattgtacttaaaatgggacggaggagtagctaagtagctagctaaattaagctagaagaagtcgatgccgcatcgcttctgctggaactccggcagcagctggccgtcgggcccgaccacgacgtcgcaggtggcgtgcaccgggtgccagtgcgacccccagaacgccacgcgcacccgtatcctcgaccggaccttcaccgtgaacgccacgccgccgccgccgccgcccgccgcggcggcggcagcgtccctcgccatcatgtccgtggcggcgccggccggcacggcgacgccctcgaacccgaccgccgacgtgcccctcggcggctcgtacagcggcccgccggtgaggtccttcccgtcgacgaccacctcgccgtcgccgcggtactgcaccgacatgtacacccggccgaagaagaaggcgaggtcgtggttcgggttgtggatcgtcagctggccggagagcgccaccgggccgccgccggactggacgccggcggcggtgaacgcggcgacgtggaaccgcggccggtgggggcggacgacgaggtagacgacgaagaggagcacgccggcgacgaggaggagggagaggaaccacgagcagagaagcttggtgcagcgcgtcaggtgcggccgctccctcggcagcgggcgccggatgcggccgccggcgatgaagcccgcggtggccgtcggcggctgcgacgacatggcggcgtattatatatacgtgtgcggcggccggcgagcttcgacgacgatgggatggagctcgttggtgcagcaaagcatgggcggcaaagcatcgccggagaagatggaattcgggagaggttaaggaggtgtgtacgcgtgtacatacgtagaggttgcatggcaagttggtttttgggtttcttttgttgcgcgtacatgggcgattctttgaggagatagcaaggaacaaaaggggtagcagtggccggttttcttcgtgttttggttctctaatctcctacttattttatttgaaaactagcatggtggcccacgcatattgcgcggctagcatcattatattttctgtcatataatagcatatatgttttctcaatgtattattcaaatatattaaaatgactacataattttaaattttgtactacctttacaaaactactaatgtataatattcatattgtattttatatatgtgttagttattaattatttttaatatcaaattttagttatttgtaaattatattcctatatggactctaggctcttctttcaatattatttatttttaattctgaacttttattatttataattgtatttctatgtggactttaaactcatcttttaatattctttaatttttaatttcgaatttcaggtacttctaaattgtaatcttatattaactttagactcttcttcccatatttttttaatttcaaattttagttatttgtaaattgtatttttatacgaactctaaactctacttttaattttattatgtttattccgaattttagttagttttaaattcctatatggactctatactctacttctaatattccatattttttaattcctaatttctattattttcttaattgtatttttatatggactctatactctacttctaatattccttatttttaattccgaatttctattatttcctaattgtatttctatatagactctatactgtacttctaatatttcttatttttaattacgaaattatattatttctatatggactctatgctctacttctattccttttttaattctgaatttcagttatttcctaattgtatttctgtatggactctagtctcctcttctaatattccttatttttttaattccgaatttcaactatttctaaattatatttctatatggactctagtctccacttctaatattccttattttttaattccgaatttcaactatttctaaattatatttctatatggactctgccttttctttttcttcgattaatgtgagaatttctaggccatgagagcgaacgtggaggcttccttttctatttctttaataatataatagatttcatattagtaaaatatttgtgtttgattacatggaagctagtggcacggctaatcagggtttgcaattttgaaacaggggcttttgccggtggggctaaagaaccgaaatcaccgaaatttcggtatttttaggccgatttttttttgaaaatttgatgtactttggatgaatttgaataaacttttaccaaattcacaaaaaaaagagaaaaaaactgaaaatttcaggagatatatgtgcttgctggtgggggcgaaattaccgaaatttccaaaaattcgtcccgaaattgcaatcattgcagctaatagtgttttcaaagatcaactagtttacaaacatcgatggtaattcgtagtgcagatggccgcccaacctgcccgagagttgcctccatcatttgggatctaagtgcgctcgcctaacatacgtggagagaaatagagcccgacagtaaaatatatcactcaatttctattaaatactggaggtgtgcaataaggagtgttaagatttcgggcaactaaatttttcaaaaatttaaagcgggtttctcacccttggatgatatatatttcaatggctctcatcaatcctctattatttatttaaaaatgactcttctttcatagataaaagtttaaacaacattttttctaacataaacatgaaataaatttgcaattaatattacaaaattaccggaaaaaatgttcaaacttggataagcataaatcaaaaccatttacaaaaaaaaaatgtagttcaaatgaacttaaattacacgtagcactataattttaggcttagcaatgtacaattttgggtgaaaattttcagacagttcaaatctagcaaatacatgtttctatttcaattaaggccagtaaattaatactactatacaggtagatgtaaaagttctgttgttactgcagatgttgatagtatggcgcaaggctggaaagtgatgaagaagcgagacttaagtttgagaagttgaccgagtagatatgccaccgtatgtacacaccatgtggagctagcttaatgacttggtatgcttcttcccccctggctagggtcactccatgaatatccacttcacaaagtaaacttttctgaccaaatggccagcgagcatatttcggcctcaagtttcttctgcagccgacatgacttcttgcttgtcgatactgctataatgcagaatcataattagcccaattcgttttttgatttctccatttcaatcagtaacacttaacacccaaaatcatacagttgctggatagcggtacattacatcacagtacttatcaaacatgtaacaccgaaggcattacgcaacattttatttccttgaatgaagcaaatagtttactttgattgtacatcataatacaaacaaaggcataacaaaacatatttcacaataattctacatataccaaggaatatcaaacagctaacacttcagacaaatgcagttcagcggttgtatatatatttgcagcctaattcacaaaggcacagtgcttcctgatctccccctgggcgccggtgagcacctgcatgttccccatcttcaccatggacgccgcgaagtcggcgaagaactccgccgggtagccggcgacgcccgcctggcggaggatgtagcccctggtgaaagggtcgagcatgagcgtctcgtcggaggtgaagagcgccctgcccctggcgatgtgcctgtagtagctggtgtcgaacgtcctgaagctccccgggtccatctccaccagcgtcgtcttgtcgccgggctggcacttgctcttcagcctcggcacgtagtacttgtccagcgtcgggtcggccatcatcatgccgctgaagttgtacagccggctggcgaaggatgaacaatgggaggttccaagagtgtgcccacctgtgaacaatgtgtcacttctcaaattgcatatgcacatttgtgatgagttcttggtaattaaacaagtttggattgcaattttgccatggttttgaatctctggctatagctgtttgagaagagtcttagccactatagctccattaagttcgctatagctgtttgagaaggtcaatcgctaaatatcttaacccgctatttaaaaccatgaattttgcaagtgcacaaatgagtatggtgctgaacaggaaacgatgttttgaccactcgaataaagagctatgctgtgtttgaggataaagtggtcttggtctcctggcttggttctgtactgtgccatgtgattagaactaagaaccacatagttttgtacttcccattttgttgacttggtatgcgcatatgataccttcctttattaacaagttgtatagtaattaaataagtgatcacctttattggagaatgctactgggatatatcgggatcagcagagtgtttaaaaggagcacaggcaacagaaccgagagttgcaactttcagtaagtacagtataaatcatctagggagctagtctatgaagattaaacattgaagttagtgaagaatagtatatacctagcagaaccacctgatcctttgcgtcaaggccctttgggatgaagaattgatacaagttccgcgtggcatcgaagaaggggggagggaggttgttcacagcatcatccttcactgatcttgtcccatccctccgcccagttggaacttcccagtgaggccctttggtctgttgcacaagggaagaatagggacttttctcaactatagttctagttactgtaagcagcaagaaatccaatagccacgtagaatatggtgaaaatcaaactgtgtggttttccactattgtcggcctaaaacagccaattctcaccacttagccaaactatactaacttttctaactaaagaatgaactaagattaatgaacatggaagctagttcttaccaagaagacaacatctctggctaccagagcaaggatatcagcacaggacacaactccagggcaggcttgctccagcttagctttgacacggtctattgtgccaaaacctcgcagactgaggtttggtattgattccttctcagatggtgatcctggtgtgctatccagaagtatagagccatcgcaaccctgcaaaacacatagaggcacatagcttagtaggataaactcaattcaaaatcaaaacagctcagagcatggtaagcagtatgcatacattcacaaaacaatcatggaaatgcatgcgaagtagagggcctgcgagacttggaactcgggatatgatcttggtcatctcatcacgaacaatgacctctgcttttggacatgtgtattggtaaaagccaatgtttagccctggtggattggataatactaaggagaactgtaggacaagagaaaggacaaatccgaagaggagtctgtaaggcatgttgtgcatgactactgtggaaccactgcctatgatgaaagagttgccttctatgattgttgaggcaaattataacttgcagcctgctttatagctcagttgcttaggttgtactatagtaaacaagtgacataaaccatttcccacagcttcattttatttttcctaatgcaacaagcagatggtctaagacttggagatcgagattttacaagccctatgagttgtgtgcatgtacttcaattgaagaatacgcaagtcttggatcaggcatctagatagtattacctggtaatattgcataattagttggtggtggtcatccttcgtggcttgtgcacttgtgagtaatacaggctcttgtattgatgaataggtcacgacatgttgctaaaaggtaatactctctagctgttctaattttttattttaaatattatatgggttgaatttattctggtaaagaagttcagaaggattcaaagatatgagataatatatcagtttatccgttgtcgtttgttccagaggaaattgtgtatgttcatgcaaagtggaaaagaaagaaaaacaatccatttcctgttttgttagtatttaagggaaccagggaatataatatggttgcctcgctatgacattatcactgctagtttctcttgggattgcatctgaacactaaaggaactgcccataataatttcttaactggcaccagtcagttaaagtaaataatatcaaagcaacaacccattgtttgatgaaatcaatcttcttcctttgaaattaagttgagaaaaaaaaaggttgcatgacagttgtgctcgtgtcaatgaagcaaatcaagggagaaaagttagaagagaatcaacatgatcactgctagctaattattgaatgccaaacgggtgcagaagcatctcaggcaatgtgcagatacttcattttgaagcaaatttaggtttgatcaagcatataaacactctaagaaagatgagaacatgatgtgcaagttatggaaaaagattctctatgtttgaataaaaaatgcaagagtttgtgtaagtaaaccttcagtgaatccctatcatactgagaaaatcggtccattggtcagatattagttgcagcctttaagttaataaataactgctgggctcaagataaccttccgctgagctctccagagaataataataaaaaaaaggtgaaaacaagtcaggagtagtgaacagaaccaatggtggacaccatagtgcgtgggggtacagatgcacccctaaaacttgaaaaaacaccaaatatataggattacatgtacgtatacaatgtgcacttagataagaatcccaaagtgttaaaaattttgtatgtaatacatgtcaaactttatttttctttatttttttagattccattggtctttatagggcatattttaatttgaaaacaaaaattcaagattaaacattggccattgatttctcagaattatattcttaatagctataaagccaatattttgtgaacgcactttgaaatatgaatctatgggcacaaatttcacattaaatatatattaattatattaatttgattaattgctggtcaaaatatacataatttgacattttgaaatttaaagatgccctataaaaaatcaatgcaggttttttttttctgtctgttgtaatggaatcatggaattttctctatcaatattccatactatctactagtgcatcattacatcttcacccctattgtcaaaatcctgcaccacaggagataacaatggtttaagtgttcactaccacatggcttgggcaatgtattcaattactcttggagtaactgaaaagtgatgtcttttggttgttcaagaattcaagtctaagacattcacagcaggtaaagaaatttttagttgacctagctcaaaatgtgtgcttcactcaaacagcaagggagtgcaggacagttttgaccatgaagttgttcaacaatggtggacattgacaagttcgaccttttccataggaattaaacagtactccaatttttacctcatgacttgttcatgcacataagaaaaaaaatgccaacccctttagtcatgttcagcagcaactcacagtctagttaatacttaataaatgttttctacgatattcttataggacatcaaaattgcttttaaaagagaagggttaatatcccataattattctgtctaatcaacgttatgtgacttgcaaaaacacatctacagtcctaaacaattatgggactaattaagatttaaagcacagtaacaattcagaaaattatttatcaaggaaagtaacccacagaagtcagatgaacaaaaaacttacactgaacgaacatgatggcaggtgaatttgtgataggtcaataggtcatgagctattcactgtttaactgaacaggcagaaattggttaactctggagtctgaactctgaagtgtgttgcggcttgtcaaagtggcccagaatttgaggttcatctgatgcatctatcagtggctaaaaactgtgatacaaatttcttgcagtggaaaagtttctgtcatattcagatgacactgaaaccaacttcctttccatctgttgtttcatctattacttctctcgtcctctgtgcatcctcccatagactacattctgcatacatgtttgcaagaacagcatagtttacagaactcccaggatctatactaaaaaggttcttggctgcagtttctccaagaagcatgtttccatgcaatttacaggctccaagcattgcacccagcattgatgagttgggttttaagtttgtcttctggacaagtttccatgcatcttctaactggcctccacgagcaagaaggtcaatagcagagctgtaatgctcagctcttggatcaataccatacctgctcatcatggaagtaaagtactccatccctttgtttgtcaaaccacaatgaccacatgcagatagaagagaaaggaatgtcacatcgtttggcctaacaccatcttccaccatcctattaaaaagagtcacagcatcttctccagaaccgtttcttccacaggcagtaataagtgacgtccaagaaatcacattccgatagggcatttcatcaaaagcacgcttggcatctgaaaattctcctgcctttgcatacatatcaaccagagcattgtccaatgcaatatcacccataggctgcttcttgcacatatatgcatgaatttgtgtcccaaatcttgcagaagcaacgcttgcacaaaggcaaagcactgagcttaatagaacaccatcaatccataaacccttccgatgaattttacagaagagctccattgcatcttcactgtagtttctatccatggtgtacccactgatcagtgcggttgatgacacgagatctggttcagagatggaatcatatatcactcttgcgctgctcatactccgacattttgcgtaagagttgataagtgatccgatgacaaccttttcatcccagtaacccaatttgatgatgcaactgtgaattagctcaacattgacagcaacaccgactattccacatgcttttagagcacttccaagcgtgtaatggtcaggaatcatcgctgtcaattattttgatgtaaaaaaaagaaagcactttcaattttagtgccaataccatcagcaaaaactaccttgcaatttcatgctaggacataataggcagcatgattacaggaaaaatgctcaagattgttaaagcaaaaggagggacggcataccttctttcagcattgaagagaataatccaagcgcatcaccgtcatgcccgcgttccacaaaccccctgatcagggcattccaggacaccacatccttcttccccatctccgcgaacagctgccgcgcatcctccacggacccgcacctcatgtgcatgtccatgagggcgctctgcacgaacatgtcgcccgcaaacctccccttggcagcgcacgcgtgcacctgctccccgctcctggcgcacccggcccccgcgcacgcgctggccgcgctcccgtacgtgaactggttcggccgcgcgcccgacgcgcgcatgagcgcgaacagctccagcgcctcccgcgggcgcccgttcctggcgtagccggagaccatggccgtccaggacacgacgctcctgtgcggcattccatcgaacaccttgcgggcggcggcgacgtcgccgaaccgcgcgtagaagatgacgagcttggtgctcaggtgcaggtccggaggagaggcggacgcggcggcgaccctgccgtggacggacttgccttgccggaatgcgcaggagctgatgcagcactggagcagggaggagtataatggggcggtgggtttcgcccccattaggagcgccattcgcgcgcgcttttctccctcctcggagcaattttgatctcccgagactcaacaattcatgaattcatgaatttatggcagggtttggcaatccaataatatgagcacgaaacacaccaggagcaaaaatctgaatatatttagattcagttctactaaccggcagtagaaatgagcagctgcaaatatatttttcatgcaaaagggctagaaaactgaactatacaaagttggcttcaatccataaatccaataaaggccttctgaagaatcaaattcagtcataccaccatcagttatccatctagcacatgaaaatcaaagtgtgaaaaaaaaggtgattggataaattaaacgtaccgttatgattcaatagcatagaagaaagattaaatggagaagaagaaaaaatggagatgaagaaaaaattatgtgcttttgcagattggaaagcagacaaaagggaatgaccaaattttttaggctgaagagaagaagcagaaagagataggacagaggggacgacaccaaaaacagttgaactgcagccgcgcagggacgctggtcgctggagccggcgaaggagctccttggcggcggccatggcgccgacggacgtgggtggcagcggcggctggagtaggacgcgatggttgggattggggaatggccgaatgggccctcaaccatttttgggcccaaaccaattttttttcaattttgctatatctcactcgaaagattttttcttatctctcactcgattttctcacttaaatttacagtgcattttcttgtaagttacagtgtaatttatgaaacttacattgtaacttttgtaagttacactgtaatttttgaatcttcgcatgtaaattttaaattttgtattggatttggtctttttcttttttattggatttggtctttttctcgaggatatggtaatttagtgtccattatggtgtttcttaattactttttactttttattatatctatcggattttaattcaaagattaaaaatctgtgtgatacgatcatcaaaatctgtgtgatacgatcatcaaaatctttcgaaagatgtataggtactcccattttttttaggcaccaaaccgcaccagcccaattgtgaaatcaaccaacaccattagaattccaagcatcagaagccgtaaagactgaaatgcgcatgaaatcaacaaacataccaggatagataaccaaaccaacatcgacaccccaattccaagcatcagaaaccgtcaagcgcaaacagattgatcaacaggcacgcgcaacagtggccggttacgaccatgtgagcaatgcacaaacagaatctcatctcggatcaaacatctcagaaacattaacagaagtagaatgataatatcatcgattggtaccgatgcacagtgaagcaaattgtactagtatggataatagtatcaacacaacttagggactctaaaccagaacacaacacaaccatgacacgatgatatgacagacgagcggcataggtataatgaagtccaatgctgcaccacagcacacgctcagagaccaccacggaggcgcaggacaaggtgcagggtggactccttctggatgttatagtcggcaagggtgcggccatcctcgagctgcttgccggcgaagatgaggcgctgctggtctggagggatgccctccttatcctggatcttggccttcacgttgtcgatggtgtcagaggactcaacctccagagtgatcgtcttgccagtaagggtcttcacaaagatctgcataccgccccggaggcgcaggacaaggtgcagggtggattccttttggatgttgtagtctgcaagggtgcggccatcctcgagctgcttcccagcaaagatgagacgctgctggtctggtgggattccctccttgtcctggatcttggccttcacattatcgatcgtgtcggaggactcgacctccagggtaatggtcttgccggtgagggtcttcacgaatatttgcatgcctccacgaaggcggaggacaaggtgcaaggtggactccttctggatgttataatccgcgagagtacgcccatcctcaagctgcttgccagcgaagataaggcgttgctggtccggagggatgccctccttgtcctgaatcttagccttcacattgtcaatcgtatcggagaactcaacctccaaggtgatggtcttgccagtgagggtcttaacgaatatctgcatctggaagaggcaagaaaggattggaattaacataggtaaaaaaaagcagctggagaataagttggcaccagatcctacgatatcggtactgtcagctcaaaatagatgaacatatcaatcacatcatactacactacaattggacagcatcattaatcataagagcgctgctcacagctcacaccacatcaacaagcaacaaccaaaaatatcttcagataataacaaaactgacataagtaactacaggacaacagatctatgtaagaacacagaataaagccacctagttctagcatctgacagatttgatttgcacgagtaaagcaaataaaacgggtaaaaaaacacagtacaacatcagcactacagttcaactaggcaaagagccagatacaatacagattaaattgaccttagaacccaagctctacagttcaagtaggtgtacacgatacagatgtaattctctaacccagctccacacaattccaatccaaatccaggggaaaaaaactaagaacacaattccaatccaaatccagaggaaataaactatgtgtcgcctaactcaacctaaagattttaacctaacgagctattcatctattggaacaatatcagaacaatcccatccgaactaagcacaaataagtaaaactaaatctgatcacaaaactcaaactatgtggcaggatcaaaacataactgtgaactactcttattatccatcattagggtaatatatcgaaacaatccccatctgacacatcattagggtaatatatcgaaacaatccccatctgacacatcattagggtaatatatcgaaacaatccccatctgacagaacaatctcaaaaccaatccatctattagatcgatataaataacacagatccctacctcgattctcacgaaaccctaaatcaatgagagattaagaggattaccctaaaatcgcacgaaaccgtaactcgattaagaggtggatcaccctaaaatcgcacgaaaccctgagagattgagactaactcgcacgggatcctcctacgctttccaccacgagcatcaaaatcgcgagattagacgggcaccacgagagattcgaggattaggacgaggtgattgattagttaccttgacgaggcgattagagaacgcaaagcttcgctccccctccccttcggtcgattcgactcgctatgcgattaatggagagaaaacctctctatataaagcgtgggcaaggcggtgcgaggcagcatccggtgcggtcaccgccacgcgtacggcccaatggcagcaccacacgtgtccatgtagttggaggcgcgacacgtgtccggtcccggtacgaccatccagacggtgcccggaaccaactccgcgtcaggtcatgccgcctctctttgacgaagtcggcatgcctgatcaagaccgtacgtttccgatccaacgatcaggaaacatcgtacttgatctgctataagctgcgtgtgggccttaataatcctctggggaaatatttgtgggctgaaatgaacgggatattgggcctagacaaaccagggcccatgaattttacggcccaatagattgttgagacctaattggctaagcccaactcgcgcactctgaccaaccgatcggaagttcgcgtccacgccgccctgctcctccgtcgccgccggctcggcggctgacccccgcgccgccgcaccagctgcgcgcgcgcgcgcgcgcgcccccaccaccgcggcctctccctcccacgcgcagagggcacgggcagaggccgccgcggcgccgtactcgccggcgcttcgtcggcctcggcctcgggtcgaggccggtggcggggcctcgtcagatcgccccccttcctgtgcagtaagtatttcccacggacccaatatggattcgttgttctaatcgatagctgctatcagagatgggttcttctgcgtgatttacctgttcttcacatcctctgtcgatatggggttgggtggggttcgtttcttgcgctaatgcaagatttgaacttgcaggcgtgctctgctgtgtgtgcgtgtgtgtggcaatggcgttgatgcggcggagagtcgggggctacatttgctcggagctgtgtggctcggttatgaatcagaggctgtactcttcgagggtggactggaagcagcttcggcctatgatcctcaagaggataaagaaccgggcaaaggagtatccaatcaagcgcatgattccagtagcggaggaggtagtcaaggctagagagattgtcaccaaaggtgtctcgacgctgcttcaagttgttcccatacattcatgcaagtaagggcgagaaatgtggaatttttatgtatttgtctgtttgtcttaacacttggggaagatagtatggctaaacaagtgttttatttgtagtagatcaacttcaatttaggcatgcactaaaaatgttccagaacatccagaaatggggcaacattacaagattaccagtcttctatagattaccgttgttattgtgtaccttgattgcatatagccatgattgcttttcttgccatgccaagttaagagcagctctctctgatgtgcatgtttgatatcattttcttgattcctgtcctaaaatattattgaatctttctaacaccttgtgtttctattctcactgaaggttttgtcccgaagttcatattggagctgtagggcatgagatgcaatcctgtcatggtttcaagcgtatgatcaagaaccagccgcataaatggggtccaggatgcttgaatgacatccttatccctgttgaatccttccacctggaaaacacgttccaggatgagataaaacatgaccagaggtttgatttccctcgtgtcccagcggtactcgagctctgccatcaggcaggtgcagatatacctgatgaagtttggcataggagtggcacgtcatctgcaatagtcagagaaaatgatgaaaaacctgctgcttttttgccagaagagcttagattcataggtcagaggacaatagaagcatgggaaaggcttagattaggtgtgacaaaactcctattggtttacccatccaaagtgtgtgagcgttgctctgaagtgcatgttgggctgtcagggcacaaggccagaatgtgtggggtattcaagttcgagggctggcgtggtaaacacaagtggaagaaagccgatgtggatgacctagttcctccaaagattgtttggcaccagcgacctcatgatccaccggttctggtcgacgctgggagagactattatggtcatgcacctgcggtcattgagctttgtatgcaagtgggcgcaagagcacccccaaaataccattgcatgatgaaggcgcaaggcctagcaccgccaattaaatgaggccaggggatctaaggagttgattgccaaattagatcagcaccatgatgttatacaggaattgtacagatcagacatcaaaagaccaatgcagagaaactccaaggttgcaaatgttgtgattttgcccaagacattagttctttgaagactgcatgttatcagaattcaggaggtcagaactaacacaattatttatacccattgatctgagtgagagccctcagatgataacaagggaaaattgtttctgtggacaacttcgtgcatggtaatttatcgactatcagcattgttaagtattcagagcgattactttgctgccctttcatttgttcatcctccatcatttgccaagaatacgggtggaagggctttatgagcctgctgtttggtcttcttctcctctgcttgactactgtaacatcattggtttctgctgttttgtgtaaactttctcacattacctagacatccttataggcagttctgttataagttagccatgtagagacgccttgttgcaagctgcaacatatggtgtggaacatcacagaggaatgtaatatcacttgctgtattgtaagccctagtcaaaatccctccttgaagctgtaatctgtgtacagatttttacctggggctccttttgctgtgccaataattacagccacgttggctgattttttttttctggagataaatgaatggatggtgaagtttttgttctttgtatttgaagttgaacattacctcgagtacttgaccccatatgttgctgatgttttttcagttcaagtaatcttgtctctctatgaatgcatcattctggaaattaaagattacttggttggtatttgatgcgtctaacctgttattaaattttctctgcaaaacgtgtcactcaattgtacttcttccgtttcaagttataagggaactgttcactttgatgcaaaaaaaaccttaccaaaatttggatgccaaaattttggcaacttaccaaaattttggcaggattttttatatagttaccaaaatttagcagcaaactaaatgtagccatttttttttgtaactttaccaaaatttggtaaggttgaaaatgacatcaaattgaataggcccaagatgtttttgattttggtcaaagtcaaagtattttaagtttaaccaaatttatagaaaaaaatagtaatatttataacaacagcatagtaattgaataaattttcataatatatttttcttggattaaaaatattattatattttttctataaaattagtctaatttaaaatagtttgactcgtaacctgaaatgtatggagtaccatgtaaacactttttaccgtatgtggccgtaacctggaaggaaacattagcagaatttgcaaccgacatgatttccttggctaccaatcttccttctgcgcgtgcaattttggtacttccgtcagttccgtgtcgccgacgtacccggatagaaaccgtgagagccaagtttggcagcggcgtacgaggaggattctactcgcgacctgggtagtggggaccgtagatgcgccgtcggacggccgagatcacgccacgtctaacaacttatccgacgtggactccacgtacgacttggactcctcggcttgaacctttcgcgtcccctcataaatacacgcgaggaggcgccccctgattcgtgcaatgcaaaaaacgaacgcgaagaacacgaatcctccggcgatctcgagcgcaacgatccccagagccaagaaacccgccgctgccgccgtgtcgccgtcgtcgaagttggcgagcagcaacaaggtcaccaaggtgtcgccgccgccgccgcagttgtccgcgctgtgggccgccgcctcgtcgtccgacgaggaggaggaggccgtcgccgtcgccgtcgccgtcgtcccagcgccgccgccgccgcagccggcgagcaagaagggaaagtacgtcaagggccgcgcggcgtccaagaacaagtaccttgtcccccgccgcggcgaggaggatcaggcggcggagggcggcgggaacagcggcagcaagttgatgtccggggcgccggaggagttcggcctgccggcggggacgttcgacgcgttcgcggacgcggagggggaggacgccgccgcggccgcggcgccggcggcgactacgtgcacgtccgcgtgcagcagcgcaatgggcggaagacgctgaccaccgtgcaggggatcggcggcgagtacaactacgccaaggtgctccgcgacctcaagcgggagctctgctgcaacggcaacgtggtggaggacaaggagctcggcaagatcatccagctgcagggcgaccaccgcaacagcgtctccgacttcctcgccaaggccggcatggtccgcaaggacaacatcaaggtccacggattctaagtccagagagatcgtatatcacttgggttttagtataggttcttaattatcagttttgattagtataggttctggttcagtttagcagtgtgtcgtgtctgccgtaatggcttgcagtcgtcaggttgatcatgttaagcctcatacttcttttccgtattggtgtcaatggatgattttaagtatatcttgtttgcttactgttctctgaatacgtacttatccttgtgatgctctgcactttgcaacttgtgacacagatgatttttactggtgacaaaaaaaaattaaatactgaaaatatcgctctgaacaaatttgttggtgatacaaacaagtcaataatttcagagatcagcgtagtcgaagtcgtcgtcaaaatcttcgtcgtactctatctcacttacgtggctatgataatgtggtattgagctccacgggctgtcgtcgagcacgctccggaatcggctccgtaggaacgtgacggcctcccatgccgccatctgcttcgcctcctgcaccgacgacccgacctgcgtgaaacgcaagcaatcgcggttgagaacgttgacactcacggttacggcatggtagtcggcggcgccatcatcatcggcctccgtggtcgtcgtcgacgtcgtacgacggcggcggcggctagcgctgtaatagtaggttggctctttggttgctcccatgccgttgatgacctcccatagcagcagcgtggctccgaactccgtcaccggcggtggcaccatgctggcttcgacgcccaggtagcgctagctgcagcatgatgcactcccatggcgacgacggcttatggggtttttgctggtatctacggaagcagctggtccgcatgtcgtacgattgcaccgaccgcaatgcccaggaggagctgatcaccggaccatcaccggcggcgacggtgaccaccatgttcctctcgtcgtcgacgtaccaaatctgattctcggtgatcttgccgccggcgccggacgacgtgacatcgaacgcttggcaagaagcgtcgccgatgaagagcgcgtggccacgcagcctggggattctcgtcagccgcgtcttctttcgccaggatccccacgtctcgagtcgtgctcctcgaccacgtacaccttgaatctagatgtgtggtagcgcgccgcggcgcggccgccaccggtgtcggggacgcgggctctgccgaagtctctggaaactactagaaccttccccatcgtgtggcaggcaaccaggtagaactcggtgcggccaaacgccggcgcctgcttgtcgacatgcgtccaccgccactggtcgctgggcaagtgcgagtagtgctcgatgtccgcgtcgtcgaaggcgaagatctcctccgcttcggtgacggcgtacagcttcccttccaagaacacgatgtcttggatgtagaacaccctgctaatgtccgaccaagcattatcatcatcatcgggatgatgtttcttcttcttcctccccgggaggtggcagacgaagatcttgcctagccgcgccacgaacctcgatcgggtcggcgcgggcgatcgcagctaccgtgatgccgccgccgccgtcgccgtcggcggcggcgggggatgcggacatgacgaccttggtgatggtctctgggttggtccacatcggcagcttcacggtcgccatggtgaaagggttgaggaggaagggctggtagggaggaggcgacgacgtgggcaccatcgccagccagttgtcgaacgagccccggcagacgacgtcggtggcgccgccgtggaggctgcagacgcggtggatggcggcgtcgtggaggctgacgcagtggccaggggccacgagccacgggacggcggggcgcgggtagtgcgaacgctcggcggctcgccatgctcggcacacggcggcgaagcggaggcggtctcccagggcggggagcctctgcaggacgtcgcggagcaggtcgtcggggaggtcacaccacaactgtcacgccccgagctagtcccgaccggaactaacccgtgacgctccaaactaacctgttaatcgataccagtcccaggaaacagtgctggtatcacagggagacagaatatcacagcaacagaagtctctttattatagagtagaagtacagtcatgttgggctgcggacagatcccgagctcacaactgcattacaaaaggaaagcggaagccaggacttggaccaaacaatcacaggcgcgacttgggaactaggccgaaaccctaaaactcatcgtagccggcttgctcctggaagaactcctcatcagcaggatctgcttcatcttcttcagcaactggggggggatatttatatagagcaagggtgagtacgggggtactcagcaagccatgggaattaagtgtttaatgcaagcttcaaggaaaggctgtttgtttttgcgattggttttatttgaactcttttctaaaagcaactaagtgagtgcttctcaaacgacacggatgaggcagtgcgtctcgtccggtcggagtatgtgcaatgtatcagtctttagattttgaaacaaggttggcacccggccaaaagctttttaaacggccacccgggccaacacctttcaaacggccacccgggccaacaacttttaaacggccacccgggcctagctgatcccatcagctgcaggttttccaaacatagaacccagtttctcaacagcaatttcacaagcagtagtcaaacaaaactacgctaggaatcacctcacatccgcccatgaccgtgggcacggctgttcgaacagtttgttaacctctgcagagggggtacactttacccacatgacattactaacccggatcatccagcccgtggggatcagccacgtcgggagacctccaagctttcatgacaaggcatttcgaaagccgacacaggtttaccatatgccgacgagaggggtcccagaccaacaacaggttaggtcccagaccatactgtgccaggaagcccaggggtcctccccgacaccaccccggcgaatccacatgtctctcggcatcaaggctcccctgataagctagttactcagccaggggtgtcccattccacccatgtggtcgtacttgacttatgtttggatgaaattccaaggaatcggtccttaagtgcgagagcgggaaaccgtacacccggtacgttccccggtccgcggttttggaaattcatttagttcacaagcaccgacccaagtgtcgggttttccaagtcttttgtaaaactccagttttacccaagttgttactcaaattttaagtttgaaggcgaccgtcgatattcgcacagagtgcacgattatcgaggcgcatctgggtggttacaaggggacatggtgtagcaattttcaacggaaggatcaattgcaacaagttaggtaggtccgccaatctgccttgcagacgggacaacagattaagtgtgatcctatcaatgcataatattttgcaagcaatataattaaatttcaaatataggctcaagatgttcaaaggtggcttgccttgctcgagatctggagcttgatcctcgaaatcctcgcactgcgggtcttcgggctccgaaactacacgcgaaacggaacaactcaacaaacggcgaaaataaagccctattaatgacctctaagcgtgccattggatagatctcgagatttgggaaattttggaagttgaacggagtcaagcggagttatggttggaaagatattgaatttctaagattattggatttttggtctaaaggaaaaaggatttaattaaatccttttttggaaaaaggaaaaagaaatgatgaagggagggaatctagactttcctcggacggctagggcgcggcccaagggaaatggagcggaccggccaagctaaatgggccggccggcccaaggcggcccaagcgcgcgcgcgcgcgcgggagggaggagagagagggccggtggaccgggctcaccacgcgcggtcccgggtgggacccgcttgtcggcggctcggctcaccgtgagcggggtgcacgcggcgtgctagggtttggggaggggaggcgcggcgcatgcgcgcggctcgcggtgagggcggaggcggcgggcccacgtgcagcctcacggcttaccgcggaccacgcgcacggggagaaacggagggagcggctggccgggtcggcttatctggtcgcggccgaggtggcgccgacgtggcgcctacgtggcagccacgcgggtcggcggaaggtagacgaaggcccagccgaaacggacggcgggcggcggcggcgatcggcggagcgagccacggcgatacaagcgacagcgagtacaccgggtggttgcacgggacgcggggaggcgagccaacggctcggattcaccggagggagcttgacggcggcgaatcgcggcggcgacaaccggcggcgggaggagagggaaacggcgacgaggtcacgaggggccgattcccggcggtgggagcatctacgcggccacgggaactcgatgctagcgtcggatttggagggaacacgccgagggaggctggcgacgtgcgggtgctacggaactcgggcggcgacggcggcgagcacatggcgagcaacggcatcggtcggggcggcgccggccaactacgggaggtctactcgagctaaaaccgaagtctaagggggggagacggagcgaggagggagaacgaagcgaaacatcaccgcggaaaggagaggcgctgtgacgagaggccgacggcgcgggagtgatctctccggcctcgggccggggaagaggaagaagaggcgcggccggagtcctcttcggcgtccttgctcgtgccggctcctccgacacgcgcggcgacgatcggcgacggcgaaaacagagacggcagtggaggaggcgaaaatggggagggaaggagaaggggaggccgggggtttaaggaggcggcaatgtcggtttggggaaccgacttgcgcggtcaagagcgcgagctggcgctcggctagcggccaaattggcgacagggaggatgacgccggcggagaggtaaaggggaaaaaggaggggagaaagggggcttgcccctttgccggttcgggaaaaaggaggaggggagcggggcgacgcggcagagggagggggcgctgcctccgtcccttggcggcttgcgcgcggagtggcggggccgggtgatgacgacggcgatgacggggggaacgtcttggagcggagcggcgacaccggcgacaggcgtgcgcagaggctgacggcggcggcgaccgggcggtcggccacgcgcgcgcggctcgcaacgggaaggcgcggcggatggtgcggcgcggctcggcacgcgcgctggctgcggggccgagcggctgcaggctgcagggcggcagggcagcgggaccgggcggcatccacgcgggcgcgcgcgagcaacggcccgcggggagcggcagcgagggatggggagacggagagcgagggggggcgctcggggcggcgcgcgagcagcgtgcgggcgaggctgagcggggggggggggagagcgcgccgggggagagagagagagagagagagagagagagagagagctctcgggagagtgggccggggagggagagggagatgggccgagcgagtttcggcccatcgaccttgggggaggtaaactagactttgcggagggattttgatttagaaggaattggattcggagatgaactcgacgatagatcggggattgagatcatgagatggcacgggcactagacaacaagcaaggaaacaaatttcgcaattagggtttttaagagataattttcccgctaggcgccacgacggaacgggcgctacagaccaacccccctaacaagaatctcgtccccgagattcagcacctaagggagcagctccggaaactcggcgcggagaagatcttctcgttcccaggttgcttcatcttcagaatgattgctccattggactttgtagaacttgattgtcttccttcgagtctgacgttctgcttcttcaagaaccttgatcggtctttccttgtaggtcagattcttttccagctcgatattacctaggggaacttgctcttctggaactcgaagacatttctttaactgggatacgtggaacacgttgtgcacatctgcgagaccttcaggtagctcaagctgataagccacttcgccacgtctggcggttatgaggtaggggccgatgtagcggggtgctaacttgccggacatcccaaaccttctcattcctcggagtggtgatacccgtaggtacacatgatctcctttttcgaactcaaggtcacgcctccgattgtcagcgtaattcttctgacggttctgtgctgtcctcaaacgttctcgtatcagcttaacttgttcttctgctgacttgagtatgtcaggaccgaataccaaggcttcgcccacctcattccagcacaagggagtgcggcaccttcttccgaacattgcctcattcggcgacatctgaatgctggcctgataactgttgttgtatgagaactcggcatacggcaaacaacgatcccaagtgccttcgaaatccaaggcacatgctcgcagcatgtcttctaggatctggtttactctttctgtctgaccatcggtctgcgggtggtaggccgtactaaaattcagatcagttccgagtgcttcatgcaattgcttccagaaccttgaggtgaactgagtgcctcgatccgacactattttcttgggacagccaaatctacatacgacatgagtcatgtagagttctgctagtttctttccatcataggtggtcttcactggcacgaaatgtgctgacttcgtgagtcggtccacgattacccaaatggagtcgtatccgctgggggttcttggcaaaccggtgatgaaatccattccgatctcttcccatttccactcgggaatcggtaggggttgtagcagtccagctggcctttggtgttctgccttgactctttggcaaatgtcacacaaggctacgtattctgcgacatctcgcttcattccagcccaccaaaagtatgccttgatatcttggtacatcttcgtacttcctggatgaatggagtaagcggactcatgagcttcctttaggatgagatttcttaactccttcttggccggtacacagatgcgtggaccgcaccaaattgtgccttgatcgtctatggagaaattggtgtctttcttctcctgtattctttttattaattcttttatcccttcgtcgtctttctgagcctcccggatttgcgactctagggtaggctgtactgtcaagctggcagggacacctgactgcaccacggtcagccttaacttctccaattctctgcacaggtgatcttggtcaggccgtatttgagctatattgcaataggccttgcgacttagcgcatcagcgaccacgttggctttaccaggatgatagtggattccaagatcgtaatccttgattagttccaaccatcttctctgtctcatatttaactcggtctgagtgaagatatacttaagacttttgtgatcggtgtatacttcgcatctgttccctattaagtagtgcctccagatcttaagagcatgaatcacggctgccaactcgagatcatgggtggggtaattgacttcatgaggcctgagctgcctggatgcataggccacaacctttcgttcttgcattaggacacatcctaagccctgtcttgatgcatcacagaagatctcgaagtcttttcggatatctggcaaggtgagaactggggcagtggtcaatcttttcttcatttcttgaaagctgtcttcacaggctgtggaccattgaaatttcttttccttctttaacagctcggtcataggtctggctagcttagagaatccttcaatgaatcttcgataatatccagctaagccgaggaagctgcgaatctccgacacattcttgggcgggttccacgcaagtacagcttcaactttgctgggatctacttcgacaccgttggaggagatcacgtgaccaagaaaagctactcggtccaaccagaattcgcatttcgagaatttagcgaatagttgatgatctctgagcttttccattatcagcctcaggtgttcagcatgttcttcctcattcttagagtatatcaggatgtcatcgatgaataccactacaaactggtccaggtattccataaagattttgttcattaagttcatgaagaatgctggagcattggtgagtccgaaggacattactgtgaactcatatagaccataacgcgtcgagaaagcggtcttcggaatatcttcagatctgattttcagttggtggtaacctgacctcaagtcaatttttgagaagactcttgctcctttaagttgatcgaataagtcgtcaatccgaggcaacgggtacttgttctttatagttacttcattcagggctctatagtcaattaccattctctcagagccatcctttttcttaaccagaagcactggggctccccaaggggatgagctaggtcgcacataacctttactttccagttcttcgatttgtcttttaacttctgctaactcattagcggccattcggtagggtctttttgcaattggagctgtgcctggtgccagttctatggcgaactcaatctctcggtctggtggcattcttgttaattcttccggaaatacgtcgggatattcacagactatgggcaccgactccaaggaggtgacttgcaaacaggttaggatagaccgacttgcggtaggggtgttaggggtaaagcggacttgctttcctccaggtccttgcaaggtgatggacttttcggcacaatctatctgtcctttgtgcttagccaaccaatccatccctaggatgatgtccaagctttgcgagtctaggactatcggtttggctaggaagttaacttcctcaattctaaggttaacttccgggcatatttgagttgcccttatattccttccaggggaatgtactatcattggtacacgcaaattttgggttttccaaccatttcttttcacaaaagcttgcgatatgaaagaatgggaagctcccgaatcaaacaggactattgcgggtacggagttgacagagaacatacccatcacaacgtctggagcatcctgagcggtttcagcttgaatgtgattcacacgtcctcgaccaaagtggttggaagcacgagaaccttgtccacttgcttgagagctaggacgagactgagctgccgctggagtaggagttctggcagtgctgccattagcatgtcctgggctggtgttggtaggattctgaggacactgtctagcatagtgacccatctggttgcaccggaaacactgaactgctgacggtccctgtggtgacttgaaggaggtaacactgtttggcgcagtgttgccactaggggcacgctgctgtggcggaggtgccggacggttcatctgaggacgaggggcgtagcttgactggcggttagcctgagtgaccgactgatggtattgcatgggctgaccgtagcgagggcgaggtgcgcctcgggaagaatttccctgatggttagacttgcgtttcttgtattcttcggtggcctcttttctggcatcctcaagtagaagtgctttgttgatcatatgttgaaaagtggggaagtcatgagcaagcaactggagtctcattccaactgcgattcctttcaagaatttcctgatctttttcttatcggtgtctacttcctcaggggcgtaccgagccaacttgttgaactgacttaggtactcattgacactgctgtggccttgcttgagtctgttaaattcttctttcttcatgtcaatagtgctttcaggcacatgagctacacggaaagccgtagcgaactcatcccaagcaatgttagtgggttcaggatgtgcattgcagtaattctcccaccaatctgcggcaggtcctcttagctggtgagaggcgtagagcgtcttctcaacaggagtacactgcactaagttgagttttctatccacatctttcaaccaatcgtcagcctcgacgggctcgatggtctgagagaactctggtggacgtgacctcagaaagtctgtcagcttggatctattgttgcccacgtgagggtggccatttccatgcgcattatgctgaaagctggctatggctgtggttagaccttgcaagatctgtgtctgaactgccattatgtgttgcatgttgttttccacatgaggtggggaagggaggcgttcttctccagaattgtgactggcagtgcggtgagagcggtgagactgctccaactctgcttcacgggaaactgtgcgatgcgagcggctgctgcggcgaggttgctcaacctctgcgttgcgggaaacagtacggtgcgaacggttgctgtggtgagaatgctcattagctggttcgtgatttgcttctgcttcaactctaccatcttcaaaaccaaagcggactggtgcacgagctgtacgacgggggcggctagccatctaaactcccagaaaagggcggggtaagagtcagataagcacttaggagggcaaggagcaaagcaaatagcaactcagatagcacacactaggcataaactggattttttcaaatcgtaaaaacacctgatacaacgggtgtggacaagtcacagagctacgccgagcttgactgtgcgcacacctcctaggagaaccagactaccaaacaacacccacatcaaacacacacacgcactacctcgccacgactccaaaagagttggcggcggaacaaaagggcctaacacacggacggctgctgaagactgcctcctctactcctcgtcggcctggctgcctcctgtggtcggctcctcagtcgaagaaacgtcgatcggctggcgcgaagggaccggcgggacctgtcgagggccggcagcagcacgggccgctggcggtgggggagctgggtggcggaaacggaacacggtggaagaaccaacaacacgcttccgcgcagtgcggataaagcgtgggccacggcgggaggaagcgactggagtgtgtccgggggtgtaggaagggctaactgggtgtgggtagggggagtacactggtgagtacggcgcacgcgagctgggggagcgcgggccactgggagtgcgagcagagccgcgggagctgtgggaggacaggtggctggcgtggcagagacggcctgagtcccaagagatagtgtcaactgaggtgacaccctcctcggccagacgggcctccaaggcggcgtagcggcgggcaagggagcggtaagcctcaaggagtaggtcgtgctgagtggcctgagcctccgaaagctcgaccatgcgagtcagcactggctgagactcgctgtacggacaagggtatctggcgtctgcgtggccagaaggaagacgtggaagctgccggaaggcggagcctccgagacggtggccgtagtcgtgggccaggcggcgaagcgcagtccaggagaggtcctggtacgcgatctggagagtgggcctggccacagtgaagtggtgggggcgaaggccaactccgtgtatacctccacgagggtaaaggtacacagagagctcacagtgagggggaacacggtccacggagtaccccgtgtactcgggacacgagaagccaaggaaacgggcgaggtcacgaagctgggcgacgtggtgaccctcaccaaaaccgtgggaactgaaactggcgttcactgccatctacaattttgaaagaggaagaaaggatcagtaaccattttagaaacaaactattgaaaagaaagaagaagagagaaaccttagcttttcgcaagtagttttgaatctagtatccttagggtcgtcctaagcgtcgggtttcgccctagggccaagcctgtgctctgataccatctcttgtcacgccccgagctagtcccgaccggaactaacccgtgacgctccaaactaacctgttaatcgataccagtcccaggaaacagtgctggtatcacagggagacagaatatcacagcaacagaagtctctttattatagagtagaagtacagtcatgttgggctgcggacagatcccgagctcacaactgcattacaaaaggaaagcggaagccaggacttggaccaaacaatcacaggcgcgacttgggaactaggccgaaaccctaaaactcatcgtagccggcttgctcctggaagaactcctcatcagcaggatctgcttcatcttcttcagcaactggggggggatatttatatagagcaagggtgagtacgggggtactcagcaagccatgggaattaagtgtttaatgcaagcttcaaggaaaggctgtttgtttttgcgattggttttatttgaactcttttctaaaagcaactaagtgagtgcttctcaaacgacacggatgaggcagtgcgtctcgtccggtcggagtatgtgcaatgtatcagtctttagattttgaaacaaggttggcacccggccaaaagctttttaaacggccacccgggccaacacctttcaaacggccacccgggccaacaacttttaaacggccacccgggcctagctgatcccatcagctgcaggttttccaaacatagaacccagtttctcaacagcaatttcacaagcagtagtcaaacaaaactacgctaggaatcacctcacatccgcccatgaccgtgggcacggctgttcgaacagtttgttaacctctgcagagggggtacactttacccacatgacattactaacccggatcatccagcccgtggggatcagccacgtcgggagacctccaagctttcatgacaaggcatttcgaaagccgacacaggtttaccatatgccgacgagaggggtcccagaccaacaacaggttaggtcccagaccatactgtgccaggaagcccaggggtcctccccgacaccaccccggcgaatccacatgtctctcggcatcaaggctcccctgataagctagttactcagccaggggtgtcccattccacccatgtggtcgtacttgacttatgtttggatgaaattccaaggaatcggtccttaagtgcgagagcgggaaaccgtacacccggtacgttccccggtccgcggttttggaaattcatttagttcacaagcaccgacccaagtgtcgggttttccaagtcttttgtaaaactccagttttacccaagttgttactcaaattttaagtttgaaggcgaccgtcgatattcgcacagagtgcacgattatcgaggcgcatctgggtggttacaaggggacatggtgtagcaattttcaacggaaggatcaattgcaacaagttaggtaggtccgccaatctgccttgcagacgggacaacagattaagtgtgatcctatcaatgcataatattttgcaagcaatataattaaatttcaaatataggctcaagatgttcaaaggtggcttgccttgctcgagatctggagcttgatcctcgaaatcctcgcactgcgggtcttcgggctccgaaactacacgcgaaacggaacaactcaacaaacggcgaaaataaagccctattaatgacctctaagcgtgccattggatagatctcgagatttgggaaattttggaagttgaacggagtcaagcggagttatggttggaaagatattgaatttctaagattattggatttttggtctaaaggaaaaaggatttaattaaatccttttttggaaaaaggaaaaagaaatgatgaagggagggaatctagactttcctcggacggctagggcgcggcccaagggaaatggagcggaccggccaagctaaatgggccggccggcccaaggcggcccaagcgcgcgcgcgcgcgcgggagggaggagagagagggccggtggaccgggctcaccacgcgcggtcccgggtgggacccgcttgtcggcggctcggctcaccgtgagcggggtgcacgcggcgtgctagggtttggggaggggaggcgcggcgcatgcgcgcggctcgcggtgagggcggaggcggcgggcccacgtgcagcctcacggcttaccgcggaccacgcgcacggggagaaacggagggagcggctggccgggtcggcttatctggtcgcggccgaggtggcgccgacgtggcgcctacgtggcagccacgcgggtcggcggaaggtagacgaaggcccagccgaaacggacggcgggcggcggcggcgatcggcggagcgagccacggcgatacaagcgacagcgagtacaccgggtggttgcacgggacgcggggaggcgagccaacggctcggattcaccggagggagcttgacggcggcgaatcgcggcggcgacaaccggcggcgggaggagagggaaacggcgacgaggtcacgaggggccgattcccggcggtgggagcatctacgcggccacgggaactcgatgctagcgtcggatttggagggaacacgccgagggaggctggcgacgtgcgggtgctacggaactcgggcggcgacggcggcgagcacatggcgagcaacggcatcggtcggggcggcgccggccaactacgggaggtctactcgagctaaaaccgaagtctaagggggggagacggagcgaggagggagaacgaagcgaaacatcaccgcggaaaggagaggcgctgtgacgagaggccgacggcgcgggagtgatctctccggcctcgggccggggaagaggaagaagaggcgcggccggagtcctcttcggcgtccttgctcgtgccggctcctccgacacgcgcggcgacgatcggcgacggcgaaaacagagacggcagtggaggaggcgaaaatggggagggaaggagaaggggaggccgggggtttaaggaggcggcaatgtcggtttggggaaccgacttgcgcggtcaagagcgcgagctggcgctcggctagcggccaaattggcgacagggaggatgacgccggcggagaggtaaaggggaaaaaggaggggagaaagggggcttgcccctttgccggttcgggaaaaaggaggaggggagcggggcgacgcggcagagggagggggcgctgcctccgtcccttggcggcttgcgcgcggagtggcggggccgggtgatgacgacggcgatgacggggggaacgtcttggagcggagcggcgacaccggcgacaggcgtgcgcagaggctgacggcggcggcgaccgggcggtcggccacgcgcgcgcggctcgcaacgggaaggcgcggcggatggtgcggcgcggctcggcacgcgcgctggctgcggggccgagcggctgcaggctgcaggcggcagggcagcgggaccgggcggcatccacgcgggcgcgcgcgagcaacggcccgcggggagcggcagcgagggatggggagacggagagcgaggggggggcgctcggggcggcgcgcgagcagcgtgcgggcgaagcagaacggggggggggggagagcgcgccgggggagagagagagagagagagagagagagagagagctctcgggagagtgggccggggagggagagggagatgggccgagcgagtttcggcccatcgaccttgggggaggtaaactagactttgcggagggattttgatttagaaggaattggattcggagatgaactcgacgatagatcggggattgagatcatgagatggcacgggcactagacaacaagcaaggaaacaaatttcgcaattagggtttttaagagataattttcccgctaggcgccacgacggaacgggcgctacaacaacgacaaggaggaggagcagtgctgcctcctccctcgtttcgctcgccgtggcattatcgcacgtcttcttttgtacattaccaccggccgcgacatatccatccacagctactatatgtaggagtacgtactaaagattagacgaagcaagatcactatctagctagcactaggtgccacgaataaatagaagtgcatgacgatcggagagcgctgggcgcctagcaacagctcccgcagcaactcgggataaaaaccgactcgatcgctcatcgcgttggaaaccgactcgatcgggcaccctgcaccctgttgtcgagtttcaaaacgggcctcgcgcatatccgccgcgggcgcagacgccgccaatggagggtcccgcgcagatgtggcgcttctttttgctttttttttttcccgctgctgattaccgcaccgtgtagggggactcaacatttaaaactttcaacttaagattttttgaaatttttaactaagattaaaaaatttcaagtcaagatttaaaaacttttcaactcggatttaaaaactttcaatttagaaaattttcaactcggatttgaaaactttcaattcagacttgaaaactttcaactgaagatttgaaactttcaactcaaaattttaaaaaatcaagtcaaaatttgaaaacttaacacatgtttgaaaacttttaactcagaattaaaaattttcacattcgacttaaatttgaaaacttccgtctcaaaattcaaaacatttaagttaaatttaagaaactttcaactgaaattcaaaactctcaactcatatttgaaggcgaaagattgaatttgttaaatatcgtaaaacaaatcatgcgtgtgtgtggagaataaaataggaagcgatttcaaaaaaaaaaaagaagcaatatcaggtgtaacacgtttcttagttccctcagctttacgctaagtttgaattgcatcattcaaccgcaatatcaggtgtaacacgtttcttaacttgcaaaaccggtgtacttgaggtctcagggcaatatatcgcatggttttgcctgacgtggttaatgggacctacatgagccccacatatgtcatcgaccaactcttcttcctcatctctctcacattcttccctcttttccccatccctctttagggcaggtgctgctctctcgccgcacaaaagcgtcgtcatcctattgcacacacggaggtgcggaaggacctccagccaatgtatacattaatcatcgaatctgcatctatcccactatatcagtatcggccaattggttcattggtacagttctttctgtcatctttgttatagtctctaatgacatgaattaatacatagaatttatattagacttgtaaaaaggtagagtctattaacaaatttatattaggcatgaattaatgcaatttcaaattcaacttgtaaaggttgtaaaaaaataacaaattttgttacaacccgcagaagtcaaatttgaacttgcattttgtgaaatgatatattaattgcacatgaatctatcttgtcaatttttttaaaaaaaaaatcataactatttagttgacattcatggtcactgctgtagtagtacaacatactccctctgtctaaaaaaaatctaggattggatgtgacatatcctagtacaatgaatcaggacggactaggatatatcacattcagtcttaggtttattttttgtgggacggagggagtatatagtaacctcttaccgctttatgtgattcctgctgaaatatttggaagtccggacaaaatacagccttcttttttgccgggtcggccgaccactttcattaagatttgagggagaaaaataataaattgttacaaacgacaatactacgatgtcgtgccagttcgggaaagatccccggtccagctaagaacgaaagagaaagaaaagaaaatagccggggcaaatcctcgagacctatccaccgtgatcactcgccaaattgggaaaagatcccagccactctccatacagtaattgcagtgacctgcatatagcctagtggttacagtgacttgagtagtaccccaaaatcctgagttcaaatctccatatgagcaaatttcagattgggttgtttatggagctagattccctatttcaatggcagtatatatacagttggttgtagaggtcgggtaaaaaaaaaacccttctctaaaaaaaatacagcaatttcctctcttatatcctccgctagttgctccggtaacttggacacatgctgaaatattcttgcattacgttccttccaaatcaaccagcaaattagcatgaatgcactgtcgaaatccgacatgtagctcgtccgaaaacaacgtcttgttgcaagccaccaatcggccagagtattgacatcatccgccgggattgcgaagttagcattgcaccatcttcagagaaggatgtgtggtgcaagaagctttcaatagaaacaactgaggaggggcatcaacatcatcaactaccctctagctatatcatccttgtcagaatgatacatctttgtcagggatatttcattctgcacataatcacaatatctggttaacacatctttgtcagggatgaaaaagccttcgaaacttctgcatattgcttgcctttgcttgtaagatttcttttttgtgttcttattgtttctgaagagcgtgtttgtaaggaacatcccaatggcgtacaagatgaaagggatcttcaagggactcaaggtcatctctcagatctttggtcagtacaatagtacaatgttttgggcttttcatgctcctctgcatctaatctcctttcttgcttgctgacatctctcattttctactgacggtcttctttcttgcattctctgaatggtttttgcagtagtgaaggagcatgagatgcagattggtagtccgacagacgtgaagcatgtcgcgcacatcggttgggatggcctgacagggaatgcttctccaagctgggtaaatgtacctgaatttcagtgaaatgatacaatcatcttcttgtttcaaattgtctgatttctctcatctgttctttagatgaatgacatcagggcatcgtctgaacttctgtctttgggcaactttgcaccatctgcagggacctcttgggcttctcaaggtatggcaagaattacttgttcttcagagtggaagattttctgtgttggtgcgattgcttcatatgattgtggcttctttgggaaaggctttggtctgtcttatgagtggcatgtatggataagcatgcaaacttggcaagttactctagtttaatcctagaatcatgggcacgtctgcatgttcttgatctgggatccggagttgcagggaacactccgataaaacaaatccacacttctgatttcctaactaccagcagcatcttttgccaggcaatggattgtgtgtacacatgattactgaaccttttgaaagaaaacttgatgaatgataaaaacatgtaagcctctggtaatcctcttcaatcattatgtgattgatggttagaatcacgagaatcgaaatttattacgagttaagtaagtgtgaggaagttcagagaaaacaatgtttaaccaagaacaatacactgtatcatgcatagtttaatactgcaatacggagtgagctcgagacgtggtctagctaataaactagcagaaattttcttgttgaactcatatggcaggacaggattcggatttgataagaacatgatgtccattgtccactcatgcataaatagatccttcccaaggcacaaacaccgtagattagattcccattgtcacaaactgctgtctgacagacaacaaacaagcatgctaatggccacggaacgactgaaattttgcatgatcactcaacatattcagttaaacactgctgcaacaatgcagttcttggacagcatcagcaatcggccatgtcgatcctaatgtcttcttggcactcacatgctgatctgcttccactgttgggacagatttcgaccagcctcgagactcgtcgtccttcgccacgccgtcagagaacaccagcctgcagcagcaagaagcggcgccgcctcctgacataccacgcccgccggcggcgaggaagacgaggcggaagcggaggtccacgagcgactgcccggtgccttcttcttcttcttcggcgagacccagctgcgattccaccatggcgcctgcttccgacgccaatgcgtcgcaagatcaaaactgcaactctgcaacgtgaagtgcagcactgatcgaatttccgggtgtgctactgctacttgcgcagagagtgctgtacatcgttgtctgttcagtgctctctgctttgcgccaactgtacatgtaaatgggtttggagtttggagtgcagattaatcggcgatcgtacggagaaattggaatgtgatcgccgtttgtgtgtttgattgtgactaaccagagaagttaatttgatgttcaaggatagggatttcgatgagtaggccccaattgcctctgcactactctgtagtctgtcctgcctggccggattactgtcaggtgaccacatatttttctcttctagaaaaagagaagttttttttagtgaaaaaaaagttctcccaccaattttaagagttattgagaggtattacctctgcttttaaatttatgacattgttgatttttggatatttcatttgactatttgttttataaaaaaaagctactcatttcattctagaaaataaaccaaagatttaccttataaattgtttttttatgaagggtgtatgtaagtatcatttattttgtgttttaaactaaaattatcattattttattattaaagacactctaaatatgactaatatttttttatatttatattttttgaatgagatgaatgatcaaacgtcatattcaaaagtcaatagcgtcatacatttaaaaacacatggagtattatatcttctagcattatttttttttcgccgggcttctagcattaatttgcctgaaactaataaaagttacttgtgatgggatgaacaggggagtgactaaaaagaactaagacacttggaaaagcctgcaaaaacaatcatgttgccttctggataaactgatatcacaattgccagtgtggaatctcagcgccggctctccagcctccagccatgcgtattccctgacgctaaagaacaagttgagcaagccaaccagagactaagattcgttcaaacaatgcagtacaagattcctaccaatggtggacagtttttatatcagctccactgttttaatttatacacatggttaatatgcagttatgttccaagccccagcctagctatagtctctgcttgtctcttccggagccgatgaactgatgaacaccgagatgcttttggttggataagatgccgttcgtccctgaattctctgaatccgtcctacttctggtctgtttatagctggatcatcatttcggtttgttgccgagtgaaccaagaacagaaaggattttaggtgcacctttcgctctgacgctgatgaatgatgagtaggaggttgacattgtcacaggtctgccattgctgaattcttaagtttagtacgatccctgaaggtcaatatcaaatcggtgttaatgtgtgtagatggtactaagtttgttgcagtgatcattttcagaaattgtatagtacttgtgctgttccctaacccagctagccttgactgactgcaaaatattcttagctagagcagattcgtgtgccagatggttcctacctcgaaatatgtcttaaatagtacgttttgttcttcaatatctcagagtgatacctgattcagacttcgaaatatatcttaaatagtatattttgttcttaaatacctgattcagactctaggcaatttttactccatttcttgtacttgtactattccctaacgcagctagccttgactggctgcaaaatattcttagctagagaagattcttgtgccagataattccaacctccaaatgtatcctaaatagcagtatagtacattttgttcttcaatatctcaaagagtaatacctgattcatacttcgaaatatactacctccgttttttaagtacataacgctgttgactttttacatcatgtttgaccattcgttttattaaaaaaaattaactaaatattttttcttctgttgtggcttgatttatcacttaagtaccattaagcattacttataacttttaagatgtatacaaaattttcgaataagactaatggttaaatgttgtaacaaaagtcaacaacgtcgtatattaaaaaactgagggtatatcttaaaagtacattttttcttcaatatcaaaaagagtaatatatcttaatagcatttgatcggcctaatcctttggccaacccggcaacaaaagagtaatacctgattcatactgcaggcactttttactccatttctccactggtctttgtcacaaatgtcttgaaatggcaaggtaacctaaaagaactttttgataaatctttatactagtacttttacagctgccaagttgtcataaaaaagtttagtacattaaagtcagtactaaggattaaggaatatggataacagtcagacatgtcaagtggcattgtttaaagagcaaaacttatccacactatgaaaagagattttcctagcagagtcggagataggatcttcatggaaagaaaatagtctgcaagttactactaaatactaacataagtgtgaccttttctagacaactaatctgatgtataaagtataaacaactgggcctatacatatcatatatgattagtaaggcaacatgctatgctccatattctatcttcagagcaaggaatttcacatgaacttcgtgagaaccttttgccttaatcagttcatttccggtaggagacggaaaattttcagcgttctagaagagcccgaaaagaacatgttcaatatctccactcaatcttaatgaaatttggccggcctaatcgttcagccgacccgacaaaatagaacatggtcaatatgatgtttggaagtcttcaaaactaactatatacagtacaattggaaatgctcctgaaaattcaaaccagttaatgaattccattatttaaagaaacaaattcaaaccagttgaatgagaatcacatgcctacatcctatgtcctgtaaaatgctacagtttgtactacttagaagggatccatggatgtgcttagaattgtcaagaattcaaggtccactagatgctagctgcatccttgtgatggcacatgggaattttcttatgttgtgatataaataagctacctgctacccctgcaacatgtatatattctactgaactgaaattattcaagcagacaattggtacatgctgtttaggtattttgggaaggtcagagagatgccccttgtacttattctgactgaataagcagaggcaagtggcactttctggtcactaaaaaaagattagcttcttgtattaacaagtattacagcctgcttctacctagtgagcgatcacatcactgacgtttgcagaggtgcaagggcactcatttaactattgatagaatgtaaactgactgaactagttgattaatgattatacttagttattaaagtttgagaatttaacattgcacttaacactctgcaggtactaagttgctatcttctagtaatagatttacaggtcaatacctgtacttcagaagaatgaatgcagcgtgaaaatttactaagtattacgatgacataattaaggtatgcagtaacacatagataaatgactaccctgtcacatagataaatgaattgtactgaaagtttgcctaaacttggaaatttttaacaattgaatacttagaaagaactgaagctatgcgtacaaattaaatttcctcactggcgtatgcactagctagattatctcttcctacttgtttattgttctccaatagttgaatacttatttttctaagcgagtggtacgatcagacagctcaacagcatgataggaattaggtttctgatcatcagctgacacaagagagtgatatatgaacactatcgttgtatacgattaattaaactgaatactgacagtacacattaacagtacaatcaatcatccgaggtaatttatcaacatggagagagggaccaagcagagccctttcttcctcagctcattacattcatacaaggacttgtcgttgttgttatcaacactgactgtttcttgaagcacttcagccgccggctgtcgtgaactggcatcgacaaaatacttggcctgcaatgttaagtaaacttgtaaggaaacatacatggatacatataattgggttctgaacaaagaaagaaaatatagagaaactgtttcagaaacttaccagctgtgtgatgttgatatctttagcctccattgttgccattgacttcatatcaacattgttcaagttgctagttaactgtaaaacaacagatggtagctatgtaagaaatgcaggttatatatgtaatgttgttttgaacaacaagaagagatgaacagatgaacaggcatacaggcagaatcttttctaaccttaggggcagctgcagaagaacaggcagtgtcctgcaaggaatcatcgtcatcgtcgtcgtcacacatcatctccgacgtgatgaacgatgcgtcgtcataggaagtagcaaacgaagaagagaagccagaggagaagctgctgctgccagagatcactggttcctggcacatctcctggctgttgtacggtgatgccaagaagttcgcaatgtgcatcgcccagctgctctctccagctgacatggacgacgtctcagctgctgggctaatgcaagaagagtaatgagatgtgttgttctccatgtgtgattctttctagctcgacctgtctctctctctgaatttgtgcctagcaatatgcagcagtagcagtgtgtagctagagctggatgatggtgtgtttatatatagctgcaagaatgcagagaatggatatgatacacaagagaatgaactgtctgtcagagactgaggcaggccagcattggaaaaactaatgctagctctatgggaatcttctcgttgcaattgtttaattcttgcgatggagaattattctacagtagtatacaagtatgattattatggtgatgatggtttttatattgtgctggtgattaggccgaggcggttgggacatacaccatccaatgatccccagtgagagctccacttcacctactgctaattgcagcttctctcttaccaattcactgtactcttggccaattcttagccttaaatctgaactgaactgaatataatatataaaatgcaaattaaagctcctgcctttctttcagaagaaaatctatcggaactgaaaatgcagtacactaataatatattatctccatttgcatctaacttctacggatgaacagctagctacccctgttccagtactaagcttttgacgacttcgcgagtaataatggcgaaaagttgcatgtagtagtagtcttggcctcttcttagccttaaatcttaactgaactgaacataatactcccttaattccataattataaggcacgactaatttttaaagttgtttcataatataaggtatgcatgcatgcatgtcattaactagcacatcttttacactaaaatattattatttgaatcctccatcatcaaaatctctaattttattaggtgcatgcattctatttattaggttaatccaaactatgaggtgatgataattatttcttggtatttgtgttaagggtggttgtgtcttatattttggaatggaaggagtataacatacaaaaaagcattgctcttgccttatcttatgaaaagaaaatctgaactgaaaaatacaaatacagtgctaataatatatttccatttgcaatttctactgatgaacagctagctatcccagttgcagacttgcagtagtcctgagctttttttgacgaattccggagcaataatggcgaaaagttcccttgcaatggaggatgcagcagtagtactgaactactgaagagaagacgaatcaggattcagagggattaagatacgctgcattttctctagccgatccattctgatcatgccgggcgatcgggcgccaaagaccaaatcgggccgtggtccattgctcatatcaggcacgtaatcagagtcgtctctacctaatccgatcatgtggatgatcacaaatttcacacgaaatgacacgatcttaagcagagggacggccaatatgcatgcatgcatgcaaagaccgtatctcgcggaaaccatagtttaactagatttttatctctgaaacaactcaagcaagcttttctgaggtgtgatagatgatgatacggcggtgtgatgaactgataatatatacaatctgcatatgcttgcatggtttgcttaacaaaggattaatccatgcagctagtagcatgcaactgttataatgcagccaataacaataagcaagtggtcaaatcaaaaaattcaaaaaccaaaatcgaactgaaaattaaatcacatcgaccattacagacaagtgtgtacagctcatcactctgttctgtgtgaggtgtcatgtgggcaatgcagggggtggggcccacatgtcagtcaatgaggtaggcatcgctcctaggtgacgtcatctcgcgcgtatctatcggatcctgagttagttggtcgcgcgcggcgcgcaatccagacagatgaacggctggccgggtcaatgcgtgaatacgtagttgatgattcgtataattaactccatcgtctaagtacctagctacagtagcctagtgttcatagccagtagctaccaatttaacaatcttgcagcacacccggcgtagcctcaaccattgattagagatttagaaaaactcagcgcgtgtgctcgtttttctcacaagcatatacatacacaacatttagttatatttagtgcaactggtggtgtctatcaagaaattagctgtacgtcatatatacctatcgatagcgaggagtccatcactttatcaattttaagatataccgctccagaatgcatgcacttatagatttaggtgtacgtgcgttcatatgggtgggtgtgcgcgtgttgtgtttctaaaaagaaataatcttattttggttaatttttgatgcagcctattagcatcaagccatgtgttgatcgatgaagcgctggctgacgttctcgtggacgaatggagattctagatctcagcgacaacgacatgacttgctaacgaacgcgcgacaacaaagaggatcatcgtggatatgccgatatggctcaactgctcaatatagaatttgctaaggccctgtttagttctaaaaactttttctcaaaaacatcacatcgaatctttgaaaatatgcatggagtattaaatgtagataaatttaaaaactaattacacagttagggaaaaaatcgcgagacgaatcttttgaatctaattagttcataattagccataagtgctacagtagcccacatgtattaatgacggattaattaggctcaaaagattattctcgctgtttctaggcaagttatgaaattagttttttcattcgtatccaaaaaccccttccgatatccggtcaaacgtccgatgtgacaaaaaaaggccctaagtaaaattgtttttgttagaaatgaaagaggtaggaagagagagattttatttatacccaacttagcgattttatatatatggtgatgggatggacaatagctagcttggtcgtccagtagttgagtcagcccaagacgaagtgtcgcatcatcgccaaccaaaactcatcagtcatcacggtaatgaatgtcaacttgccaagaaaagaaactcataaggaattaaaaaaatctacagttaagctaccagtgtgaattctcatttctcaaccccctgtgctcaacctatgcaagtggaactgtggaaggccttgtttagttgctattttttttttcaaaaacatcacatctaatctttggataccgtagaacattaaatatagataaaataaaaaactaattgtacagtttgcatgaaaaatcgcgagacgaatcttttaagcctaattagtccatgattagtcataagtactacagtaacccacatatgctaatggtggattaattaggcttaataaattcgtctcgcggtttctaggcgagttatgaaatttgttttctcattcgtgtcaaaaactccttccgatattcggtcaaatgtccgatgtgacgcttaaaaattacttttttcgcgaactaaacaaggccgaaatatggatcctccgtcttgacgatcactataagaatactttctggggttcgcatcaaatgctacagatacaaacgccaccaatgcagtttcagtccacagttaaatttccctggtaaaaaaaagggttgggaaaaaaaatcaaggattcaaaaaagaagaaaaaaagtatatatatcacgttttgacaatcttttattatcgatgtttcactttgaaccaccttttaattaactattatttttattttggacatgataattttacctttgtgatatttagacaatctacatcaattttgtcatacataaaaaaacggtctacatacatccgagggagtttattgacgagtaagagatggcgtacacaaggttgttcatatgcttgagaagagagtcaggtgatccaaagtaaaacatagataatattatctggcctaaaataaaaatattggttaaatgacagctcaaaacattaagaaaaacatcggtaacacaagatagctcaaagtaaaatatacattaagaaaaaagaatgggaacgcgggccaggtcacggcctcaaaccggcgagcccattcggatccccacggcccatgattggctaaagcccattaaatcctcgtagaaaaaaaggcccagtaaaccactcaccacgacactcccccccacttcgtcgtctccgcgcgccgccgccgccgccgccgtcgcgcggcgcaccaagccaccaatcctcccgccccccaccaccgcggcgccgagcccgcgcgcgcgcggggctgaaatggcgccgctgaagcccccgccgccgcggctcctcctcaacggcgtctcctgcatgcggaacgcgcaggcggtgctccgcgacatcaacgtcagcgtccacgacgggacggcgctggtgctcaccggcgccaacggctccggcaagagcaccttcctgcggatgctcgccggcttctcgcgcccctcggcgggggaggtcctctggaacggccacgacatcacctccccgggcgtgttccagcagtacaagcttcagctcaactggatgtcgctcaaggacgccgtcaaggagaagctcaccgtgctcgagaacgtgcagtggttcgagctcctcgaggggaagcacggcaagtcggccccggccatcgagctcatggggctcggcaggctcatgaacgagaaggcgaggatgctctccatgggccagaggaagaggctccagctcgccaggctgctcgccatcgatcgcccgatctggctcctggacgagccgtccgtcgcgctggatgccgagggtgtcaagctgctggagtacatcatagcggagcaccgcaagaagggtgggatcgtgttcgtcgccacgcatttgcccatcgagattgaggatgccatgtcgctccggctcccgcaacggttccctcggaggaaaactttggttgatcttgtgcgttgatgtggggtcaagaattcagctgtatgattctaattcatctccattcatatgaaatccgttggaacaacttcttgatggttcagttttgtgacactttctttcggaaattaacaatgcactcaccatttgaatatgtatgccggttcctttttgctaacataacatacattgaatttggtgcattcacatgtatatgctggtggtgggttattctgttccctaatcaatgtagaaattgaagagtatttgatcatgagttgtgtattcactcgagaagtttcaagtggggggagatcaggtggaggaaatgctgaccaattttgtctgaaggaaatattgactgaatcaggtaacctattgctggtttaagagtaatttcgctgtacacattcaaattgaaacattcctgaatctcatgtattgactaatgtagattatgtacatatagttatgtttgtctgaaatttgtgtacaatggtacatcttacatatatttttgtttacaagcacaatagtttcaaatggcttactgttagttcatttttagggtctgtgctggctagtgcaatatacaactcaaccatgtctgatctacattaactaattattctgcctggtatacattttccggctggtgtttctccttcctatttgaatttttggacaaaaggcatgatggccctgcttttactgaaaacataacagctgtctttcctatttgaatttacttatttgtgtgcaattctcatgaatttaagttaggatgcccctgtagaattgagcaagtatgttggtttatctagaaatttgccatctaatggaagtctcaaatgtttggtatgaatatgaaaagatcctatcgtggtcttctgaatctctaacttatggcttgttacgaatatggcatcacattttgcacgcatgggtgtaatgatgtgcaatagtgttgtgttgttttatactctcattcactcattcctgctgtaaaagattctaacctgttgtgttcataaatataggcctcagatgttcttggggaagtagcttgctttgttgattttatgaacacttctgacctctgtatgccatatgctgaaattaaattttctgtgctctgtactgttttaaaactatttcaggtggcaatcttttgcgttatgtgtagcacattccattcttctacatttttctggcaacagtatcgaagttttccttttgtccttgtataattcattaattctattatgcttgtatacttctaacttataaacctaaactgatgttcacattgatttcagatgcaaagtatgatcaagcactattttgaacttgaagagtagactggatctttcacactgattttctcttcgctgtaatgtgaaatagaagatcattgcactaaccagtcacattcgccttaagttgaatatggaaagtaatgtgcagtagcaatctcgtatgtccatctatgactactcaaattctagttcctactctgaactttcatgtattagtatttacctgctagcttcaaatttctgcaagctactagctttattatcatcagtaatctatcattctgggcaaaccatcatatttttttcttagatgtacaaataatttctgcattattttgtatacggaaatatgtaagatcagtataaccattgtaagtgtttccattctccaaccatgttgttccctctagactaataaaaggtagattttcaagagagatatgcatatctccctctcttgcaatgttatctctttgtacagggaaaaacatatattatttgggagcaatagctaaaatgaagttaaaattttatttccacctgatactctttgagtaacatcatcttgctgatagcaagtcgaatggtctgggatagtttacattcagtatactaggctggtctgtgactctgtgttaactctggtactacacaggtgcaggctgtaacaagggagcactgaatgctccactaataagtccccagggaccattggaggtgctatctgaccccatgctggaagtagctggcccactattcaagacaaggtataaagccacttcccagtccagcaccaagccaccaatactacataaatgcgcactgttcttttgctgtattttgtttggttgttaccttctcttcaggcccaatctagaggatgctagcgtggaatatgtgcgcaatggatcacggtcgaaaattatctttatattgcaaacgatcaggtctagcccagatctgagataacttgttatttttttctaaatgaaaattactgatccgtggtggaattcaattaggatcttggccatctggttcaatacagttgtgttgaaatgctcatgttgtcatctgacataagattgtgattgccctctatcgcgttggtgaactttgttttctcttcactttataaatcccatgtttttcaattgcagagagaagcctccggtttgcattctacaagaaccaagaagggtggtaacttgttgaggtcaaacagaatatttaggatggtttgacacattacgtagcattaattgtcaaaatgctattctattaactaaagggctattggatgtgggaagactgagagtatagataaattgcctgaaataggtagaataactttatgaaaaaagtattggatgtggagacttgagagactggtatatccgtccactcattttcaaagatgatcttttggtttatcagtcctcttattttcaaagataattgttccattagttatctcttcatatcttaggagatatatttggtttgttcctgcaattactactgttttccagcacataaaccttagttatgtttaaatgtttaataattgtgatggaaggagaaagacaactaattgcattgagaaggaggcctgaagatccaaatatagacaagctctaacaggtttgcagcttactcccaagttcagcttactacttgtagcttcacatgtgtgtataaactacttgcattaaattgtcatcatggaagactaccactattaaactggaaaggtatgatatgccattcagataaagctcccaattaattggcagcttagctctttcttttccgagagctgaaacagtatttggagttatggatgggctggtttttattaaacactggagtagaaggaatatgacaatgatacctagagtatatttatgacattaaaactaatgtttgctagaattcaagcatcatgctgatttagctttaaaggatggcctaaaaggggaacttcttctctgtttgcctggttgtgcttaagagaatatgcatgggccaagtgcccaacccttataaatattgccaggtgaaattgttcaccatgcctgcctcttgtttgcactctttccttaaagactgttgtagttggccacatcaaacatttaatcacagattcaaatcctatatcattccttaaaggaacaaatataacgcacacacacacacaaggccttattaatacccatactaatgtgaaaaggtgcagtgaagtgcttgatttccccaaaagtctaggactgagacatggggcataagccataatgtagcgctgccagtacgtcctctctctagggcatactataataactgcttgcactcagatgtcaataccactctgctttaaggcctgatgtttacataattagtacatcataaaactttggaatcggcacttatacttcaacaagcacaataatacaaggccgagtcccacatgtcaatgtcaatgggcattattagtataatttgtatgacttggaaacagtgcttgcattcattcatcaggttgcttaaatgacaagcacttttaatcaaagttcattttaaaaacatatggtgctaagcttacatgatgttagtttttttttttgggtccttttttccatgtttgctacaatccttttgtgtacagtttcattttggcacaagcaagctagaggattctgtctatatacaaagtaagagaaacttgtaagtaaatattaagattaatacggttcctatttgtggggtccacaacggccatgttaggcagggaaggtagccacatctgctgtagtccatcataacgaaagaaagatgttcaccaatgatatggagatacttgtcatgtgttatatccacggattctccgatggaaaggaagatgctatgaagaaaacaaacgctagtttcactttctcgattaataattgtgctacatcatagactacttcaattcttgaaagaaagaaacttatccagtggagcaagttggttgctcctgaagattggatatcaccatcattatggtgtaattctgcggttggttagagatttctctttctaaaagtttgtcatgcctagtgtatcacagacttaagcaaatgctcatctggaattttcccttgatgcttggaaaaataatgggaccaactactttaagtttgcctgtaataaaccggaaaaatagagaaaacaaagtaacattagtacatgccagccaatttaaggagatgaaattgtttaatttaggttgttttaaattaacatttctaagttttagacaattgaaggaggcaagattgtgtataaataggttgctttatatagtagacagttctggaccctaggagtacatagattgtgttctttggtattcataggtaggtttgagagaattgaattcatagaacacgttttcagccctcaatgtggatatccatcgaaaccctgagagtggtctgtctaaattattcaaattatttgaagtacactaccgctaattatttctcttttttctcttcgaaaatgtccttatcaatcatacatgtaccagagcaaaattttaactcgggaaaaggaaattgcttaacagagataattatgatattgaagtgtggttgacaaatatatgaaaaattgaaaagaagaaagcgatgcatataggtattttaaccattaaaactttccttaaaagggggcactcactttctttatcataaacagttgcttattttccttgcactgtaccatgtacgtgaatacgttctttctcatgtgcatgagttactctgattgttttttttatatatatcaaagagtacgctgattgttacatttgtcaaaagaaacactctgcctttttttcctttgtgtaccttttttatatattacatgtatgcatgctgagtctgctgtatgggctacaggtagctcagctggtcatgcaaactactagctgagtcgattgtatatctagccaatcctctggattattactgaatactgattgatgggtactgacgtcaattagctagtatttacattccttgctcgggttcttccaggctccagcagctcacccatcagtttgcacttccgattttctctgcagaatgcaattttctgatgcatagatgcatagtcaatgatgttgctcatgtccgttatattggcttgtgtttttcgacagggatgttggaaagagttctgcataaatcgaaggaaaggagtggcccttactgagcaggaataaaggaaagggtacagtgaaaaacttatagcaaaacaccggcaatcacttctcagctcatacctaaacaggtatgcaagtcaattggttaccttttttagatgccttggtaatagtatttctttgcttactatattttcttggatttcagcatcagtttctccttaaagttgtggtactgttgacagaaaacacgaggcctgggagatctgcttaactccagtgcaggtccaaagctcgccttcgaatgtatgagcgtgccagttgatttgatcctgtaatcaacaagaaatagaagcaaagaaaccgcatttaaatctataaatgatagccgatcggctaggtgccgatgacatatcatttatctttgagccgatgtcatatatacatcgatcggcagtcattaataaataagaagggactaaatctactcgatcggctgcagatattgacaatatataatctttgtatcgatatatacttaaatcaagtgattggaatagatcggtcgccatgccgagacaatataaatcacttaaatcgaaatatatattaataatgagactatatacattcatagcatagccgatcaaatagatctagcctgtatcggctaatactccgataccactctatattaagatattaaagcaagtagaatatactagacaaaagcctaatatacttaaatgcagcaagatcttaacataaagggcagatttaacatgtcaatcaagcatataggataaaaagtagttaaatcaggtaagatcggctgaaactccgacactaccctaatcggcaaccagagtacatgctagagattgatattctaagcacgacttaagagatcaaattcggctgatgcagcattaagtatgaaaagaagaacaatatctagacaatcaagccgctggaagtttcatagagtggtagatatcttatataatctaggtcaacgtcgctatttaaccaaatcggctgccttctgttaacagatgttagccgattgtaggttagatgacgatattgtcgaagattatgtaagatatataataacttgacgaattacatagacaagattagagtatcataaagatggaagcactaatctcgagaacataattcatcataacaagttttacctcttgttgaagatcgaaaccgatgcagctcaacccgaaagcaagaactcgttgaaataaaattaaagcaaaaaggtggcgatgcgccgagattgtattgagcgtgtgtgttaaaagttacatagggctcgggtctatttatacccgaaaattacaagatatgtccataacggacatgacaactatctctaacaaactctaagataccataagtctttacggcagacttttgctcaagcatatctctaaggaaattacataaaacactctaattaatagacacaattgccttctcaggactctatccatgtgcggcaatcaccttgaagcacctcaattcaacccgatgtcatacatcaagtcgcattgtcggaatcggttgcatcggcttgcctagcctgactcagacccagctgatcctaatcgtagccgatctggactccagctgattcctgctctgtttccgaactcgatctccgcctccgactttgcttcgatctaatcttctttcccgatgccgaaattaccaaatttggttgtgaacaggtacaccaaaagaattcagtatagaaggtttcctgattcttgtcaaaggtagtcctataaggttatagacagctcagccatatctgcgcatgtggcctccagctttcatatggcttgttgagttttatccaaaccgtcgtaatgagatttgatggctcctaagaccttattagttattgtatacttgaaagtcgtctcacctaaaatttcaattttttccccttttcatttcagaaaaggaggcgatagctctagcattaaaaaaaaaaggaaatacgcccatgttaggacctgaaccaaagttaggtaggtagggtgcagccattgtttttagagaaaaatccctgaattttctcttgtttttactgtgacaaactgactgtaacatccacatcctttcacttcagcttgacaatttgatggagtacatactactatcccaattatgatcacaagaatgtcaagaaccactcctactagacatatgctgtgtttagttcacgctaaaattggaagtttggttgaaattggaacgatgtgacggaaaagttgaaagtttatgtgtgtaggaaaattttgatatgatggaaaatttagaagtttgaagaaatattttggaactaaacacggcgataccaacccatcgtagttgggtagctagcagttgactcctcataaatgaatatctgaaatacacacaccaaagtcacactcatactatttttttttctcttcttcccattttgtttgttctgcagggaagattagaagaaagcctaaaacaaagacctccctcctcctccggttcgacgggcgtggcgtagctgtacccggccccgccaatgtaaatgtgcgcttgtctagttcttcagcttgggtcaggaggacctcatggccatgggggccattgcttgcaacgcatgccccgagactgatgcaatgttgtgacagggagcgtggcaggcagcgtccgtccacgagatgagatgatgggggatcgaagcagaagcagaggagcagcatgcagtagtttttctggctggctgatcttgcaacaaattggtaagcactttcggctgggctgaggttctagatggtgtggtgtactggttctagtaccaccactaccacacctgctcaaccgcaaagctctttggattgtatcgccaacaaaatttgccacccaaaaagcagcttttctgcagatggtactactagctcgttgctgacttggagtgtagggtgctgtgcatgtatgcagatgcatgtcgtgctccatggggaagaagacggggttggttcttggttcttgttgcacggcaggcagcggcagattgaggtgagctggtgaggtgaccatcgtcgtaagggtaaggcttcccaaatgctaagctaaaagttcatttgatacagtattcaagtactctgtaccacatgaatttgccttggtgtcaattgtggatgtgcaaatttgctaaacaacaaattgaagtgttcaatcttgtaataataccagtactcactttctagtttctacttcaattcaattccttgcatttatgatagtagtccagaaagtgaggcatcattcagccattgatcatgagagatggccgttttgacctcttctaaccagttactcgtattaatgaattacagttacaggtcttacgcactggaagtctcattgttcaacttcaacctccatttcagaagccagtcaatgccccaatctcctgaatccttaactgcatagctattactactacactttgagcgagtcaggaggaggacgaaatgcacacacatactccatatggggaatgaattactccacaacacctcgcaatcagatcgatcatattcaacagatgaaaaaccgaggaaattaaatgagagtgaataatggtcaatgcactggctgctagtgaatcgtgatcgatcaatcgatggactgaccgagtcatcagttcatcacgtatgcatgctccgtgcagattgacctgcatatctgttacgagattggcaggcaaattaaggcagcagcagcagcagcaaccatatatggatcagaacttgaccatgtcgccctatagccagctactatagtagtactctagtataggagcagtagacatgtacatgtaattctacgtgatcttcctatatatcgatctctatgttaatgaaccactgtcaggcttgctggtgcacggaaagagaatagtgctgtagccaagccaacggcgccggtgccgtggactcgtggagcctgggtgacgaagagcttttttttttgccggctaatttttaagggcattttttggtgattgacaatggtgacattggcggcgaagccttatcagggttgggagtagtatatgataaattacagggaaccaactcccagactacacggactgtcatagtccgggagctgtgtcgtagtccgggagctgttccgtcgggtgtacaatttatcgtatactactcccaatcctaaaattttagtccttattttcttcttaaatgctgctctccacaagtcgcaagcacctcttgtgccatgtttagttccaaatttattcttactttcaactttttcatcatatcaaaggctatgtttagttcacaccaaaattagaagtttggttgaaattagaacaatgtgacggaaaagttgaaaatttgtgtgtgtaggaaagttttgatgtgatggaaaagttggaagtttgaaaaattattttgaaactaaacacgacctttcctacacacacaaacttctaacttttctatcacatcgttccaatttcaaccaaactttcaattttgatgtgaactaaacacagccttgctcccaatcgccaagttggcacgcacctggagagttttcacacgggagtacgaaaagagcgattttgtttggaagtttcatatgtggtccaccttttttgagtttaaattagattctctcttataggtgaaaatattttcatcccttaaatcctattagagaaggggatttatttttaaccgtctatcggtaatgctcagatgatgtatttaggatcgacgaacgacatgatgggtcgttcgcttgtttgctttacaagaatatacgttgaggtgaaatgaagtggaacgacttggttttattcagtctattggtatcataattcagacaattgtaaccatggttttgtttgggctctttaaaaattatatatataatcagttaccaatagatgcgacgaaaaagagagttgatgggaagtacaggctgtttttgattaaagccaaaacatgacctactaatagcttgttatcttgaatacatagtagacaaggttgttttggtttaaagccaaatcattagtatcgccaatgttcaatttggtagtttctatattctaataaaaaattttggttttttataccaaatacaattttatcttaccaaaaatctatcgtaacagaacgtatttaagttttgacactaccgatagtttgagagttttgtaaacctaacaggccctactagtagaagacgacgacggatctcttagaacgaaaacagtggcatgaagggcgccgatcgatccatccatcgattcgatatatgagcatatattgccaggtcgtcgtcaccccctgacaggtgggccccacaggcgcgtgagacacatccgcggcgcgtggggtgggcctgcacggcggcggtgggtggcggcattgggccggcgatgcgagggaggcatgaacgtagtaaatgcggccccctcccttctctcttccatcttctctctcgtctctgctggagctggagtggtggtggtgtccacctcacgcggtgttgctcagagaccattcaatggagagagagagagggacgccatggaaagcgcggctgatgagctcgatctccagctcatctcatgtgtgacgcatgggcatggcaatggctggcatggatggagtcgacgtacgttacgtacgtactcccgtctccaaccatccatccaccgttccgtccataccatcgacgatcgatgaccgatccgttcacttctgtctactggaggagtactactacatgtactccctccattttcatccttcttttcgcatagattcgtctcattgttggttcattagtcttaactaaaatttatatttaaattgtaatcttatgtaaactttgtatatttttctatgttagtaatttattttctagcaattgctttttaagtcactaataatatacttcatccatcccaaatataaaaagttttaattggattggacacatcctaataatacgaatttggacaaagagcttgtacagatttgtagtactatgatgttaccaaaacttcttatattttaggacggaataagtggatataaaagatttatttataaattattggttgctagttcatgattttcatggtttatcagccgtagatcatacgattagagtatattggtagcgacaaaaagagaggaaaatcgaagcatctctctgctgacatgagatcagctccacgctcctccaacatttgtggtatatacgtgtgctgcgtgcatcactaacaaaggaacaacgcgccctttaaacaaaaacagtaattttcaggtgtccttttaacgaataaaatgtactgattctatgagaatcctgtaaaatctatatgttcaaaagtaaacctgggatcgatcaagtcatcactagccccgtcatcatctcgatacctggaaggatgcaacagagaaatattggaattattatggtacgcgtgcagtttaggccaacactaaattaacttaagactgtacacataaactattgaacttttaactagtactacagaacagagaacagagaacacgaataaccagtatgtatatgatggtcggactatatgttaaaagaaacaagcagccgaattaagcattcatccatgtctggttgtgtttagttcagcgcaaagtttgtattttggttgaaattggagatgatgtgactgaaaagttacgtgtgtatgacatattgatgtgatggaaaaggactgaagtttggatccaaacaaactttagatctaaacgcagcctctgtacaaaagttgaagtttttttttacgcacatgtttaattttggctactactcctacgtaagatggatcggaaaccgtatgcaaaaggagacaaacgagtccaggttggcaacacacctaaaagatcataagtgacaacacgctaaagggaaaaatattaatggtttcctgaccttggtaggtgtatattattatgtgtttgatcatgcattattattatggtttctgtttcataaatggtggcatgttcgattgactttgctggtgtgttaactttgacactctctaaagtccaaatatgttttctggccggggtgcctgttgcctatttatttcattaatatggggtcctgtatagtactgaaccactgatgatgagccagagacagccagtgctaagctagctcaagaaaagcaaccttgtttttttgggacagctagcacgtactgttgggttgcaaattgaaaaaaaaaatgtttctgccatataatttacaatgtgaaattaattttagacagtttgtaattacacagttataactatatattaatttgttataagaagctttattttttggagacccctgttataattactttgaccctgctatatgaacaagatgtgtatactcccatgtaccacttaatatggaaccatctcatgtagtcacgctatatatatccaggaaacaattgatggtaattaattaatcctatcttaaatttgtagaagtcgtatctcgtcaacatcaaataatccgaaaggcagggacagctaatttgggatcaatatgtgctatcttatacgctaccatgtgttaacatctatctgtggactaaattaattacatgaacaaatactggatcctaaattaagaggttagtttctttttctcgtaataaatatatatggtcacccactggaacagtgatgttcctaatttgagtcagaaaatatatagaacagcttcatgttgacctagttaaatcatatatatcttgaattaaattataatcacacaatgaataacttataaaaaaacaacatatttattctttaaggaaacatacttagcatgacctagttaaatcatatatatatatatatatatatatatatagaattaaattataatcacacaatgaataacttagaaaaaacaacatattttttcttaattgcccatagaggctaaccagtaatctaattaagcacaccagttctttaattttacactatggccactactctatggcactctgattttatagtcttgttggcttgttgcccgcaaaaaaaaaaaaggatttcgaatgttagttttaagttaactttgagatttttcctatcttaacgttcagccttgcctattaaaacgtcaacaatacaaatatataagtttacaggaatcctaattcgcgcgtatgcgcgacttctccaagtcgcgagcgtgccacgtggcgggtcctcctacgaccgagtctgcgcgcttcttttttcttttttattttctttttttcggtaggcacaactgccgtgtttctttcttgtttttttcttcttctttttttgccgttaactaccacacacgtctaagagtaggagtcaatatttgaaaaaattcaattcaagatttagaaacttttaactcagatttggaaacttttaagtaaaaatttaaaaactttcaactcagatttgaaaactttcaattcaaacttgaaaactttcaactcggatttaaaaactttcaactcgatttgaaaacgttcaagtcggatttgaaaactttcaactcggacttgaaaactttcaactaaagatttgaaactttcaattcaaatttaaaaaaatcaagtcaagatttgaaaacttaactcaggtttgaaaacttttagctcaaatttaaaagctttcacctcaaaattcaaaatatttgataaaatttgaaaactttcatctcaaaattcaaaacattcaacttaaattttagaaacttttcaactcaaattcaaaactctcaactgatattgaaggtgaaggtgaatgtcacgccccgaaatagtcccgaccggaactagcccgtgacgctccaaattaacctgttaatcgataccagtcccaggaaacagtgctggtatcacagggagacagaatatcacagcaacagaggtctctttattatagagtaggagtacagtcatgttgggctacggacagatcccgagctcacaactgcattacaaaaggaaagcggaagcccggacttggaccaatcatcacaggcgcgacttgggaactaggccgaaaccctaaaactcatcgtagccggcttgctcctggaagaactcctcatcagcaggatccgcttcatcttcgtcagcaactggggggggattatttatatagagcaagggtgagtacgtgggtactcagcaagccaggggaaataagtgtttaatgcaggcttcaaggagaggctgttgtttttgcaattgattttatttgaactcccttttttttttctaaaaacgactaaatgagtgcttctcaaacgacacggatgagacagtgcgtctcgtccggtcggagtatgtgcaatgtatcagtctttagatttgaaacaagattggcacccggccaacagcttttcaagggccaacaacttttcaaacggccacccgggccaacaacttttcaaacggccacccaggcctagctgatcccgtcagctgctgatttttcaaacatcgaacccattttctcaacagcaatttcacaagcggtagtcaaacaaaactacgctaggaatcacctcacatccgcccatgaccgtgggcacggctgttcgaacagtttattaacctctgcagagggggtacactttacccacacgacattactaacccggatcacccagcccgtggggatcagccacgtcgggagacctccaagctttcatgacaaggcatttccaaagccgacacaggtttaccatatgccgacgagaggggtcccagaccaacaacaggttaggtcccagaccatactgtgccaggaagcccaggggtcctccccgacaccaccccggcgaatccacatgtctctcggcatcaaggctcccctgataagctagttactcagccaggggtgtcccattccacccatgtggtcgtacttgtcttatgtttggatgaaattccaaggaatcggtccttaagtgcgagagtgggaaaccgtacacccggtacgttccccggtacgcggttttggaaattcatttagttcgcaagcaccgacccaggtgtcgggttttccaagtcttttgtaaaactccagttttacccaaattgttactcagattttaagtttgaaggcgaccgtcgatactcgcactgagtgcacgaatatcgaggcgcaactgggtggttacaaggggacatggtatggcaattaacaatggaaggatcaaatgcaacaagtcaggtaggtccaccaatctgccttgcagatggggcaaaagattaagtgcggtcctatcaatgcataatatttttcaagcaatataattaaatttcaattataggctcaagatgttcaaaggtggcttgccttgctcgagatctggagcttgatcctcgaaatcctcgcactgcgggtcttcgggctctgaaactacacgcgaaacggaacaactcaacaaacagcgaaaataaagccctattaatgacctctaagcgtgccattagatagatctcgagatttgatgaattttggaagttgaacggagtcaaacggagttacggttgggaagatattgaatttctaagattattggatttttggtctaaaggaaaaaggatttaattaaatcctttttggaaaagaaaaagaaaaagaaaagaagggagggagggaatatagacttttctcgggcggctagggtgcggcccaagagatttggggcggctcggccgagcttaacgggccggccggcccaagacggcccaagcgcgcgcgcgcggggggaggagagagagtccggtggaccgggctcaccacgcgtggccccgggtgggacccgcttgtcagcggctcggctcaccgtgcggagggagcacgcggcgcacgcgcgcgggcagggaggaacgcggtgcacgcgcgcggtccgcggcggacgcaggtgcggcgggcccacgcgcagcctcacggcttgcggtggaatgcgcgcacgcggagggaccgaccggggtcggcccgacccggtctgggctgagctggcgccgacgtggcgcctacgtggccgccacgcgggccggcgggaggtagacgacgatccggccgcgaatggacggcgggcggcggcggcgagcggcggagcgaaccacggtgatacgggcaaaagcgagcacaccgggcggttacacgagacgaggggagacgaaccaacggcttggatttgccgggggttgctcgacggcggcggattgcggcggcggcaaccggcggcgggagaagagggaaacggcaacgaggccacgagaggtcgattcccggcggtgagagcatctacgcggcttcgggaactcgacgctagcgtcggattgggcggaactacgccgagcgaggccggcgacgagcgggtgctacggagctcgggcggcgacggcggcgagcacacggcgagcgacggcaacggtcggggcggcgccggctaactacgggaaggctactcaagctactaccgaaagctaggggaaggagatggagcgaggaggaagaacggagagagacatcaccgagaagaggaggggcgctgtgatgagaggccgacggcgcgggagtaaactctccggcctcgggccagggaagaggaaggagagggtgcggccggagtcctcttccgcgtccttgctcgtgccagctcctccgacacgcgcaacgacgatcggcgacggcgaaacagagggcggcaatggcgcggaggcgaaaaatgagggagtttggagggggagggcttgggcttaaatggacggcaatgtcggtttgggagaggggaaccggcattgaacggtcaaggcgcgagctggcgctcggcgcttgcagccaaagcggcggcaggaggatgacgccggcgaggagaaaaaggggaaaaagagggggagaaaggggcttgcccctttgccgattcgggaaaaagagggggggagcgggagcatcgcggcagagggaggaggggcgcggctccgtcccttggcggcttgcgcgcggagtggccggggccgggcgatgacga

SEQ ID NO: 5231 - DNA, 161936 bp, Oryza sativa
atctccccctccctccccggcgccctctctctctctctccctccgctccaccccgcccgcgcgccgcgcgcgctgcgtgcgcgagcgcgcaagccgcgcagaacgcccctcctccgctcccaccgctctgtccgcgcgtgcgtgagccgcccgcgccgagccgagccctcctttccgcccctcctttccgctccccgcgcgtcgttcgcgcgcgcgcgcccgcgtggtcctcgcccgcatcgcgtctgcgccgcccggccccgctaccctgccgcgccagcagccgctcggccccgcagccagcgtgcgtgctcgagccgcgcctctccatccgccgcgccctcccgctgcaagccgcgcgcgcgtgccgagtggccgaccgtctggtcgccgccgccgtcaccctctgccgcgccagcccgcgcctgtcgcccgtgtcgtcgcgccgctccaaaccgccccgccgtcatcgccgccgtcatcgcctcggccccgccactccgcgcgcaagccgccaagggacggaggccgagccctcctccctctgccgcgacgcctccgcctccctcctcctttttcctaaatcggcaagggggcaagccccctttctccccctcctttttccctttttcctcccgccggcgtcatcctccctccctcctgtcgccgttttggccgctagccggagcgccagcccgcgccttgaccgccaaagtcggtttccaaaccgacattgccgccccctataaacccaggcgcccgcccttcctcttttccccctcccaatcttctctgtttctcgcccgcgccattgtcgtccctctcgccgaccgcagccgtcacgtgtgtgccggaggagccggtgcgcactaggacgcggaaggggactttggccgcgccctctccttcctcttccccggcccgaggccggagagattactcccgcgccgtcggcctctcgtctcagcgcccctcctcttcatggtagtgcctccctccgttcttcctcctcgctccatctcccccccttagttttcggtggtagcacgagtagcctccccgtagctagccggcgccgccccgaccgttgccgtcgctcaccgtgtgcccgccgccgtcgccgcccgagctccgtagcacccgctcgtcgccagcctcgctcggcgtagctccgcccaatccgacgctagcatcggattcccgtagccgcatagatgctctcgccgccgggaattggcccctcgtgacctcgtcgccgtttcccctcttccctccccgccggttgccgccgccgcgattcgccgccgtcaagcttcctccggcgaatccgagccgttggctcgtctcccctcgtctcgtgcaaccacccggtgtgctcgctttcgccggtatcgccgtggttcgctccgccgctcgccgctgtcgaccgccgtccgttccggccggcgtcgtcgtctacctcccgccggcccgcgtggcagccacgtaggcgccacgtcggcgccagctcagcctagaccgggtcgagccgaccccggtcagtcccttcccgtgcgcgcgctccaccacgagccgtgaggctacgcgtgggcccgccgcacccgcgtccttccccccaccctagcgccgcgtcgcgtgctccctccgcacggtgagccaagccgctgacaagcgggtcccacccgggaccgcgcgtggtgagcccggtccaccggctctctctctcctccctcccgcgcgcgcgcgtcttgggccgttctgagccgccttcttgggccggccggcccgttaagctcggccgagccgccccttttctctcgggccgcgccctagccgcccgagggaagtctaatttccatccctcttttcttttcttttcttttcttttccaataaggatttaattaaatccttttcctttagacgaaaaatccaagaatcttagaaattcaatatcctcccaaccgtagatccgtttgactccgttcaacttccaaaattcctcaaatctcgagatctatctaatagcacgcttagaggtcattaatagggctttattttcgccgtttgttgagttgtcccgtttcgcgtgtagtttcggagcccgaagacccgcagtgcgaggatttcgaggatcaagcttcagctctcgagcaaggcaagccacctttgaccatcttgagcctatatttgaaatttaattatattgcttgcaaaatattatgcactgataggatcgcacttgatctgcttgtcccgtctgcaaggcagattggcggacctacctaattttgttgcatttgatcctccctttgttaattgcgataccatgtccccttgtaaccatctagttgcgtctcgatattcgtgcaccctgcgcgagtatcgacggacgccttcaaacttaaaatctgagtaacaacttgggtaaaaacttgggttttgcaaaagacttggaaaacccgacacctgggtcggtgcttgcgaactaaatgaatttccaaaaccgcggaccggggaacataccgggtgtacggtttcccgttcttgcacttaaggaccgtttccttggaatttcatccaaacataagacaagtacgaccatatgggtggaatgggacacccctggctgagtaactagcttatcaggggtgccttgatgccgagagacatgtggattcgccggggtggtgtcggggaggacccctgggcttcctggcacagtatggtctgggacctaacctgttgttggtctgggacccctctcgtcggcatatggtaaacctgtgtcagctttggaaataccttgtcatgaaagcttggaggtctcccgacgtggctgatccccacgggctgggtgatccgggttagtaatgtcgtgtgggtaaagtgtaccccctctgcagaggttaacaaactgttcgaacagccgtgcccacggtcatgggcggatgtgaggtgattcatagcgtagttttgtttgactactgcttgtgaaattgctgttgtgaaaaggggttcgacgtttgaaaatctgtagctgatgggatcagctaggcccgggtggccgtttgaaaagttgtaggcccgggtggccgttgaaaagctgttggccgggtgccaaccttgttttcatttctaaagattgatacatggcacatactccgaccggacgagacgcactgtctcatccgtgtcgtttgagaagcactcacttagttgtttcagaaaagagttcaaataaaatcaattgcaaaaacaccagtctctccttgaagcctgcattaaacacttatttcccctggcttgctgagtactcccgtactcacccttgctctatataaataattcccccccagttgctgaagaagatgaagcggatcctgctgatgaggagttctttcaggagcaagccggctacgatgagttttagggtttcggcctagttcccaagtcgcgcctgtattgtttggtccaagtcctgcttccgttttccttttgtaatgcagttgtgagctcggggtctgtccgcagcccaacatgactgtactactactctataataaagagacctctgttgctgtgatattctgtcttcctgtgataccagcactgtttcctgggactggtatcgattaacaggttaatttggagcgtcacgggctagttccagtcgggactagttcggggtgtgacaagagatggtatcagagcacaggcttggccctagggcgaaacccgatgtttaggacgaccctaaggatactaagttcaaaactacttgcgaaaagctaaggcttcttttggtttccttattttcaatagtttgtttctaaaatggttactgatctttctccctctttcaaaattgtagatggcagtgaacgccagcttcagttcccatggttttggtgagggtcaccacgtcgctcagcttcgtgacctcgcccgtttccttggcttctcgtgtcccgagtacacggggtactccgtgggccgtgttccccctcactgtgagctctctgtgtacctctacccccgtggaggtatacacggagctggccttgcccacaccacttcactttggccaggcccactctccagatcgcgtaccaggacctctcctggactgcgcttcgtcgcctggcccacgactacagccaccgtctcgggggctccgccttccggcagcttccacgccttccttctggccactcagacgccaggtacccttgtccgtacagcgagtctcagccagtgctgactcgcatggttgagctttcggaggctcaggccactcagcacgacctactccttgaggcttaccgctcccttgcccgccgctacgccgccttggaggcccgtctggccgaggagggtgtcacctcagttgacactatctcttgggactcaggccgcccctgtcacgccagccacctgtcctcccacagctcccgcggctctgcccgcactcccagtggcccgcgctcccccagctcgcgtgcgccgtactcaccagtgtactccccctacccacacccagttagcccttcctacacccccggacacaccccagttgcttcctcccgccgtggcccacgctttatccgcaccgcgcggaagcgtgttgttggttcttccaccgtgttccatttccactacccagctcccctaccgccagcggcccgtgctgctgccggccctcgacaggttccgccggtcccttcgcgtcagccgatcgacgtttcttcgactgaggagccgactacaggaggcagccaggccgacgaggagtagaggaggcagtcttcagcagccgtccgtgtgctaggcccttttgttccgccgccaactcttttggagtcgtggcgaggtagtgcgtgcgtgtgtttgttgtgggtgttgtttggtagtctggttctcctaggtggtgtgcgcacagtcaagctcggtgtagctctgtgacttgtccacacccgttgtatcaggtgtttttatgatttgaaaaatccagtttatgcctagtgtgtgctatctgagttgctatttactttgctccttgccctcctaagtgcttatctgattcttaccccgccctcttctgggagtttagatggctagccgcccccgccgtgcagctcgtgcgccagcccgctttggttttgaagatggtagagccgagccagaagtaaatcatgagcagtctccccacagcaaccgttcgcaccgtactgcttcccgcaacgcagaagttgagcaaccccgccgcagcaaccgctcgcatcgcacggcttcctgtgatgcagagatggaacagtctcaccgctctcaccacactgccagtcacaattctggagaagaacgcctcccttccccacctcatgtggaaaacaacatgcagcacttaatggcagttcagacacaaatcttgcaaggattagccgcagccgtagccggttttcagcataatgcgcatggaaatggccaccctcacatgagcaacaatagatccaagctgacagattttctgaggtctcgtccgccagagttctctcagaccgtcgagcccgtcgaggctgacgattggctgaaagatgttgatagaaaattcaacttagtgcagtgtacccctgttgagaagacgctctacgcctctcaccagctaagaggacctgctgcagattggtgggagaattactgcaatgcacaccctgaacccactaacattgcttgggatgagtttgctacagctttccgtgcagctcatgtacctgaaagcaccattgacatgaagaaagaggaattcaacagacttaagcaaggcaacagcaatgtcaatgagtacctaagtcagttcaacaagttggctcggtatgcccctgaggaagtggacacagacaagaagaagatcaggaagttcttgaagggaatcgcagttggaatgagactccagttgcttgctcatgacttccctacttttcaacatatgatcaacaaggcacttctacttgaggatgccagaaaagaggctaccgaagaatacaagaaacgcaagtctaaccatcagggaaattcttcccgaggcgcacctcgccctcgctacggtcaacccatgcaataccatcagtcggtcactcaagctaaccgccagccaggctacgcccctcgtcctcagatgaaccgtccggcaccccagccacagcagcgtgcccctagtggcaatactgcgccaaacagtgttacctctttcaagtcaccgcagggaccgtcagcagttcagtgtttccggtgcaaccagatgggtcactatgctagacagtgccctcagaatcctaccaacaccagctcagggcatgctaatggcagcactgctagaactcctactccagcggcagctcagtctcgtcctagctcccaggcaagtggacaaggttctcatgcgtccaacaactttggtcgaggccgagtgaaccacattcaagccgagactgctcaggatgctccagacgttgtgatgggtatgttctctgtcaactccatacccgcaatagttctgtttgattcaggagcttcccactccttcatatcacaagcttttgtgaaaagaaatggttggaaaacccaaaatttacgtgtaccgatgatagtacattcccctgggagggatataagggcaactcaaatatgcccggaagttaaccttagaattgaggaagttgacttcctagccaaaccgatagtcctagactcgcaaagcttggacatcatcctagggatggattggttggcaaagcacaaaggacagatagattgtgccgaaaagtccatcactttgcaaggacctggaggaaagcaagtccgctttacctctaacagtcctaccgcaagtcggtctatcttaacctgtttacaagtcacctccttggagtcggtgcccatagtctgtgaatatcccgacgtatttccagaagaattaacgagtatgccaccagaccgagagattgagttcgccatagaactggcaccaggcaccgcaccaattgcaaaaagaccctaccgaatggcagctaatgagttagcagaagtcaaaagacaaatcgaagaattggagagtaaaggttatgtgcgacctagctcatccccttggggagccccagtgcttctggttaagaaaaaggatggctctgaaagaatggtaatcgactatagagccctgaatgaagtaactataaagaacaagtacccgttgccacggattgacgatttgctcgatcaacttaaaggagcaagagttttctctaaaattgacttgagatcaggttaccaccaattgaaaatcagatctgaagatatcccgaagaccgctttctcaacgcgttatggtctatacgagttcacagtgatgtccttcggactcaccaatgctccagtgttcttcatgaacttaatgaacaaaatctttatggaatacctggactagtttgtcgtggtgttcatcgatgacatcctaatatactccaagaatgaggaagaacatgctgaacacctgaggctaataatggaaaagctcagggatcatcaactattcgctaaatttttgaaatgcgaattctggttagaccgagtagcattccttggacacgtgatctcctccaacggtgtcgaagtagatcccagcaaggttgaagctgtacttgcttggaacccgcccaagaatgtgtcagagattcgcagcttccttggcttagccggatattatcgaagattcatcgaaggattctctaagttagccagacccatgaccgagctgttaaagaaggaaaagaaatttcaatggtctgcagcctgtgaagacagctttcaagaaatgaagaaaaggttgaccactgccccagttctcaccttgccagatatccgaaaagatttcgagatcttctgtgatgcatcaagacaaggcttagaatgtgtcctaatgcaagaacgaaaggttgtggcctatgcatccaggcagctcagacctcatgaagtcaattatcccacccatgatctcgaattggcagccgtggttcatgctcttaagatctggaggcactatttaatcgggaacagatgtgaagtatacaccgatcacaaaagccttaagtacatcttcacacagacggagttaaatatgaggcagagaagatggttggaactaatcaaggattacgatcttggaattcattaccacccctgtaaagccaacgtggtcgctgatgcgctaagtcgcaaggcctattgcaatgtagctcgaatacggcctgaccaagatcgcctgtgcagagaattggagaagttgaggctgaccgtggtgcagtcaggtgtccctgccagcttgacagtacagcctaccctagagtcgcaaatccgggaagctcagaaaaacgacgaagggataaaagagttaataaaaagaatacaggagaagaaagacaccaatttctccatagacgaccaaggcacagtttggtgcggtccacgcatctgtgtaccggccaagaaggaattaagagatctcatcctaaaagaagctcatgagtccgcctactccattcatccaggaagtacgaagatgtaccaagatatcaaggcatatttctggtgggctggaatgaagcgagacgtcgcagaatacgtagccttgtgtgacatttgccaaagagtcaaggcagagcatcagaggcccgctggtctgctacagcccctaccaattcccgagtggaaatgggaagaaatcggaatggatttcatcaccggtttgccaagaacccctagcgggtacgactccatttgggtaatcgtggaccagctcacgaaaccggctcatttcgtgccagtgaaaaccacctatgatggaaagaaactagcagaactctacatgacccatgtcgtatgtagatttggctgtcccaagaaaattgtgtcagaccgaggcactcagttcacctcaaggttctggaagcagttgcatgaagccctcggaaccgatctaaactttagtacagcttaccatccgcagaccgatggtcagacagaaagagtaaaccaaatcctagaagacatgctacgtgcgtgtgccctggatttcgaaggcacttgggatcgttgtttgccgtatgctgagttcttatacaacaacagttaccaggccagtatttagatgtcgccgaatgaggcaatgttcggaagaaagtgccgcacccccttgtgctggaatgaggtgggcgaagcgctggtattcggtcctgacatactcaaggcagcagaagaacaagttaagctaatccgagaacatttaaagacagcgcagaaccgtcagaagaattacgctgacaatcggaggcgtgaccttaagttcgaaaaaggagatcatgtgtacctgcgggtatcacccctccgtggtatgaggaggtttgggatgtccggcaagttagcaccccgctacatcggcccctacctcataactgccagacgaggcgaagtggcttatcagcttgagttacctgaaggtctcgcagatgtgcacaacgtgttccacgtatctcagttaaagaaatgtcttcgagttccagaagagcaagtccccctgggtaatatcgagctggaaaagaatctgacctacaagggaagaccaatcaaggttcttgaagaggcagaacgtcaaactcgaaggaagaccatcaagttctacaaagtccaatggagcaaccattctgaagatgaggcgacctgggagcgagaagatcttctccacgccgagttcccggagctgctcccttaggtgctgaatctcggggtcgagattcttgttagggggttggtctgtatcgcccgttccgtcgtggcgcctagcgggaaaattatctcttaaaaaccctaattgtgaaatttgtttcttcgcttgtcgtctagtgtccgtgccatctcaagatctcaatccccgatctatcatcgagttcaattccgaatccaaatccctccaaatcaaattcctccacaaaagtcaagtttgcctcccccgggttcgatgggccgaatccctctcgggccatctccccctccctccccggcgccctctctctctctccctccgttccgccccgcccgcgcgccgcgcgcgctgcgtgcgcgagcgcgcaagccgcgcagaacgcccctcctgcgctcccaccgttctgtccgcgcgtgcgtgagccgcccgcgccgagccgagccctcctttccggccctccttttcgctccccgcgcgtaggtcgcgcgcgcgcgcccgcgtggtcctcgcccgcatcgcgtatgcgccgcccggccccgataccctgccgcgccagcagccgttcggccccgcagccagcgcgcgtgctcgagccgcgcctatccatccgccgcgccctcccgctgcaagccgcgcgcgcgtgccgagtggccgaccgtctggtcgccgccgccgtcaccctctgccgcgccagcccgcgcctgtcgcccgtgtcgtcgcgccgctccaaaccgccccgccgtcatcgccgccgtcatcgcctcggccccgccactccgcgcgcaagccgccaagggacggaggccgagccctcctccctctgccgcgacgcctccgcctccctcctcctttttcctaaatcggcaagggggcaagccccctttctccccctcctttttccctttttcctcccgccggcgtcatcctccctccctcctgtcgccgttttggccgctagccggagcgccagcccgcgccttgaccgccaaagtcggtttccaaaccgacattgccgccccctataaacccaggcgcccgcccttcccctttttcccctcccaatcttctctgtttctcgcccgcgccattgtcgtccctctcgccgaccgcagccgtcacgtgtgtgccggaggagccggtgcgcactaggacgcggaaggggactttggccgcgccctctccttcctcttccccggcccgaggccggagagattactcccgcgccgtcggcctctcgtctcagcgcccctcctcttcatggtagtgcctccctccgttcttcctcctcgctccatctcccccccttagttttcggtggtagcacgagtagcctccccgtagctagccggcgccgccccgaccgttgccgtcgctcaccgtgtgcccgccgccgtcgccgcccgagctccgtagcacccgctcgtcgccagcctcgctcggcgtagctccgcccaatccgacgctagcatcggattcccgtagccgcatagatgctctcgccgccgggaattggcccctcgtgacctcgtcgccgtttcccctcttccctccccgccggttgccgccgccgcgattcgccgccgtcaagcttcctccggcgaatctgagccgttggctcgtctcccctcgtctcgtgcaaccacccggtgtgctcgctttcgccggtatcgccgtggttcgctccgccgctcgccgctgtcgaccgccgtccgttccggccggcgtcgtcgtctacctcccgccggcccgcgtggcagccacgtaggcgccacgtcggcgccagctcagcctagaccgggtcgagccgaccccggtcagtcccttcccgtgcgcgcgctccaccacgagccgtgaggctacgcgtgggcccgccgcacccgcgtccttccccccaccctagcgccgcgtcgcgtgctccctccgcacggtgagccaagccgctgacaagcgggtcccacccgggaccgcgcgtggtgagcccggtccaccggctctctctctcctccctcccgcgcgcgcgcgtcttgggccgttctgagccgccttcttgggccggccggcccgttaagctcggccgagccgccccttttctctcgggccgcgccctagccgcccgagggaagtctaatttccatccctcttttcttttcttttcttttcttttccaataaggatttaattaaatccttttcctttagacgaaaaatccaagaatcttagaaattcaatatcctcccaaccgtagatccgtttgactccgttcaacttccaaaattcctcaaatctcgagatctatctaatagcacgcttagaggtcattaatagggctttattttcgccgtttgttgagttgtcccgtttcgcgtgtagtttcggagccctaagacccgcagtgcgaggatttcgaggatcaagcttcagctctcgagcaaggcaagccacctttgaacatcttgagcctatatttgaaatttaattatattgcttgcaaaatattatgcattgataggatcgcacttgatctgcttgtcccgtctgcaaggcagattggcagacctacctaattttgttgcatttgatcctccctttgttaattgcgataccatgtccccttgtaaccatctagttgcgtctcgatattcgtgcaccctgcgcgagtatcaacggatgccttcaaacttaaaatctgagtaacaacttgggtaaaacttgggttttgcaaaagacttggaaaacccgacacctgggtcggtgcttgcgaactaaatgaatttccaaaaccgcggaccggggaacgtaccgggtgtacggtttcccgctcttgcacttaaggactgtttccttggaatttcatccaaacataagacaagtacgaccacatgggtggaatgggagacatgtggattcaccggggtggtgtctgggaggacccctgggcttcctggcacagtatggtctgggacctaacctgttgttggtctgggacccctctcgtcggcatatggtaaacctgtgtcggctttggaaatatcttgtcatgaaagcttggaggtctcccgacgtggctgatccccacgggctgggtgatccgggttagtaatgtcgtgtgggtaaagtgtaccccctctgcagaggttaacaaactgttcgaacagccgtgcccacggtcatgggcggatgtgaggtgattcctagcgtagttttgtttgactactgcttgtgaaattgctgttgtgaaaaggggttcgacgtttgaaaatctgtagctgatgggatcagctaggcccgggtggccgtttgaaaagttgttggcccgggtgaccgttgaaaagctgttggccgggtgccaaccttgttttcatttctaaagactgatacatggcacatactccgaccggacgagacgcactgtctcatccgtgtcgtttgagaagcactcacttagttgtttcagaaaagagttcaaataaaatcaattgcaaaaacaccagtctctccttgaagcctgcattaaacacttatttcccctggcttgctgagtactcccgtactcacccttgccctatataaataattcccccctagttgctgaagaagatgaagcggatcctgctgatgaggagttcttccaggagcaagccggctacgatgagttttagggtttcggcctagttcccaagtcgtgcctgtattgtttggtccaagtcctgcttccgttttccttttgtaatgcagttgtgagctcggggtctgtccgcagcccaacataactgtactactactctataataaagagacctctgttgctgtgatattctgtcttcctgtgataccagcactgttttctgggactggtatcgattaacaggttaatttggagcgtcacgggctagttccagtcgggactagttcggggcgtgacagggcgccggcgtggctgtacatcacgtcgtcgccaccgcctcagctcgccgccgccgctgccctccaccacaacgagcgggcgccggcggggctgtgcttgacgccgccgccgccccctcagctcgccgtcgccgccgcccccttagctagccgccgccgcacacacaagtgagagagaggtacgcacgagtgagagagagagagtcagaatagggtttggctttggagggtatttttgccattaggaactctggaaacattttcttttttaaaaaaaaattgaaccctaacggagtcagcgaaagagggtcagacggaaccttcgtactcgaaaaggagggtcaaataagcaaagttcaaaaggtagggtcaaatcggcaaaacagggtcaaataagcaattgccaaaaaaaaaaaggaaaaagtccccttagactcccttaatagttcattgaatctaatttgtgacccttaactagaaaaccgggtaggatgactccctgaattattaaaaccagtacaatttgactcctccagcggttttagagtgtggtttggcttatgtggcgctgacgtggcggtgctaacccggttttcattccacgtggcgcttatgtggcattaaaattaaaaaattatttgtgggacccatctgtcattcatacacaagaatatattatgggacccaccgacatgtgggacccacgtatcatcctttctcctccccttcttcctcctccctctctctccctcctctctcttttctctcccccttttctctgatctgatctccttcccttattcggtctccgccggatctcctccgccctctgcgccgaggtccacggccggcgtcgtcgggccccctccgccgcgttgctcccacggcgtcctcggctccgagcgcatcgcctcgtctcaacgccgccatcgacccctccgctccctgctccgccatggcctgaccaggcgaccagctcccgtgacgtccatggccggatgacgacgtgctgcgctgctgccatatatacgatcgaggaaggttggagaggggaataacaacgcgtttgtcagattgctgtacgcgtaatatcggccgtgtgcccgtgtctatgtcgtcgagctgcaaatggcgtggaatctccccggtgatacaatgttgctttctagtttgactcgatccggccatcttgtgaaaagatggtgctgattgatctgagagaaagacgccattcgccggagaccagggggatgagcgcccgtcgccgaccggcgcccgccctggagggcctcgccgccagagccgggtgtttgcgcccgttgccgaccggccgccggccatcctccgcgagccaggacggttcgggctccgccccgcttccaccaccaccagagatccacgccgcgtcgccgccgactccatctgcgccgcccggcctgctctcatggatgccgccgcccgtcggtcaccacgcacgccggtctcgccgagttgctgtcgagggaggccgaagaggcgcccccgggagcctgctctcatggatgccgccgcccgtcggtcaccacgctcgccgatctcgccgagttgctgtcgagtgaggccgaagaggcgcccccgggagatcagatcagagaagggggagagaaaagagagagaagggagacagagggaggaggaagaagggaaggagaaaggatgacatgtgggccccacatgtcggtgggtcccataatattcttgtgtgtgacaaatgggtcccacaaacaattttttaattctaatgacacgaaagcgccacgtagaatgaaaatcgggttagcaccgccacgtcagcaaaaccgtcctgtaaaaccgttggaggagtcaaattgcactagtttcaataattcggggagtcatcctatccggtgtttcagttaatggtcaccaattagatttggtaaacaattaagggagtctaagtggactttttccaaaaaaaaaaaaaagaagggaactccgggtcgtgttcaggcccaaccccgtgcgcttcttgggcccggaaggggagcagcctacaaaactcgcgcgagaggagattcatctgctagcacaagattcatctgctagcacacgcacacgtttgagatgatgggagcaccgatgccgcgcggcggcggcggcggcggagaggctcgtgtcacccccgccgtcgccggcgagcagcggcgcgcggcgttggagatgaggaaggagaggctggtgaggaaggcgagctcgctcgcgacgcggtgcgacgtccccgtcgccgtgatctgcccgggcgtcggcgccgggggcgagccgacgtggtggccgtcgaaggaggaggtctgggcgatcgccactcggtacaaatcgctgccggagaaggatcggcggaagcactccgtggacaacgcctcctactgcgagaaccaagccgccgcaaagcaaggacccggcggcggcggcggcgagttggccatggcggcggcgcaggtggacggcatcgccgccatgcccgacgtggagctactggagcttctccgatccatcgacgtctccctggccgccgcgagcgacacgatccagaaggccgccgacgaggctgaacaaagtgtctcgctcgagcgcgcgcacgcgcacgctcacgcgggcgcgctcatggtggactcccaggaggatgccgcgccgccgccggcggcgagcgggaacggcgtcgcgtacgacggcgagcacatcaacttgggcgggtacatgatcgagcacaaccgattcgaagcaatctggcgcgaacacgcgatccctcctccacaaagcctcctgccggacgacgacggcggcgaaccgctgcggctgtggtcgttcgacgacggcgaaacggtagtcttgccggacgacgacggcggcgaaccgctgcggctgtggtcgttcgacgacggcgaaacggtagtcatttgaaccgtgagtgtttttttgactaaagattttgtttttgagaatgttttgtgtatatagtagtttgatttatgcagagatggaaaaagccgctgcgaggaggggacgatcagagctcgctggacttctgtgttgatgaaatcctggataaactgatggattttcgatcgatactttgattagatagcaaacctggagagactgattagatagcaatcctggagagactggagggttatactttgattagatagcagtgtaaggattatcttttttgtgaaattgatgttcatgaattggattatcttatttgtgaaattgatgttcaacgaactagaacgagaaccagcaatcccagtactctttttttttttaccgagtttcctcttttttatcgagttttcacggaaaattatcttagattgaaaacgagataataattaggagaagatatcgtcaaacaacaagcgatgacttatggatgataattggcgctcatggataataattgggagaaggatatcgtcaaacaacgtttgacaagcgatgactcatgggaacttcttttctctttgtgcaacggaaacctgatagatcttcttttctctttgtagcaacggaaacctgcttatcgaaaccaattatttgaatgagcacgtatttggacatgacgcataagcataactttgtaagtgacgcataaacatgactttgtaaatctattatggttgagatccattttacatgcttattgattcaggctctatttgttttaacttaattgtaatctagattattgatctagattactataagctgtattataacaagctgatatagaataaactgtttgcagggtttaatttattggattgaccgactgtatcggaggtcaccgatagaccaaattttctgaaattttagtccgaaattttgaacaaatattactgaaattcatgaaaagttaaaaaaaataaaattttggccgaaataatatcgtatcaaaggaggtccgaaatgactggaatttccaaacctgattgtttgtttctctttctcttgattattaactgtttgttagctgttagtcactcaataatctaagaaaaacacatttagagtggatttatagattgtaataatctatcataataagctatatgtttgtttcatcttacttctattataatatagattaatagaagtaagatgaaacaaacagatagcttattttgatagattattataatctataagctagattactataatctagttatccactctaaaggtgtttttttagattactgggtggctaacacctaacaactagctaataattccgagaaacaaacagctatactgggtggctaacacctaacaactagctaataattcagagaaacaaacagctaacaacttattctatgtagagctaatgattcagagaaacaaacagctaacagcttattctatgtaggctttttataatccaacttataataatctgactcaataatctagattacaataattttaaactaaaacaaacagggccttagtacccttgggtatgcgaatttaacagtctttattcaatttcataaaagaataattcaatttcaataaaaataggaataagtttactgtaactctcttaacatctagtagctaaatctaatcggtatcaatgaaccataatactggatatagtggagtagcttggcggcgttgcgaccgggccgagtcacgggtcggcggtggagagcacccagcccgccagcgaatttttttcggttttagattttttttaaaatatttacagaaataatctatcggccaaaaaaattacaaaaatagaccataccgcccacctctagggcggcaagttgacgtggcaaacgggggaggaacgggcggtgacggagggagggtttttttgcaggaaaacccttgccgccctctggtggggcggcaaggggcccgaatgcaaaaaagccagtcggggccggccattttgcaggcggccccttgccgccctctagccgggcggcaggcctcgctgcctataaaaggcctgccgcctagcccccagccctcattcttccctcctcaattccagtgaaaaaaaaaagaagagaggggaggagaagagaagaaggggcgaagccctgccagattcagacgccgatttcaggtaatattcatagatcctatatgtgactattgagttaaatagtgtgtattctttaaaaatttgtttgaataaatgcattatatttttagggttttagttgtactaatctagaagtgcgtattgtagatatcggtaactacgtagatctgctagtttggaatcaatacattaccgttgcattggcttacacaagaagatattacgttgtagatgtttattgcatgaaagagtaatatgatctagttatttcattgacagatatgtcgaacaaacaaatattccaagtttaccatggaccaggaaacgtccgttacgggccaactggggtagatctgtcagattttattgtatcagaaaggggaattgatagaccggctgagaggagtgtaccttctataaaaggatagttaatgaggggcttgagagttgatccacagacaagtgacataacaatcaatgttatagtaagtcgggcaactgagggtttttattgggaactaatgccagttcaaaactctcgagtgtggagatggtatttggaaaatgcattgcaacgcgggtggcctctagctttggttccgtttgttcacccgaaggatccaggtgtgcagatgaacatggatgatggcgagggaccaagtgctgaagtaaatgagacttctgtggaggaggtcaacgcacgagaggacgggggcgtagtagctccagtgggcattcaaccaggtgaagtggccgacgagggggagactgtcggtgccattgtggatgaaatggagagggaggattctgacaacgagcgtgtagaggaaggtgattcgtcagatgatgagacggatattaatccagcagaatgggctagtgaggatttttctgggctgatcgtctctgaagaggatagtgtgagatgggagcacaaagaaaatgaggttattcagggagcgatttatagtagagaagaagatatgaaggaagcagtaaaacattttgcagtgtcacttcatagagagttttgggttgccaagtcgaaccggtcgcaatatgaagttcggtgtgttaagaaaaaagatggttgtccctggagagtgcacgcatataaggggaaatggaaggattattggacagtgtcagtcgttaccaagcatacatgttttctacctggtgttcagaaataccacaggaacattacatgtgcatttgttgcatctgagatgtatgcgcatgtcatcgataatctcacatatgaaccaaggtcaataatccgacacatcgaagagacatacaagtatactattagctatgccaaggcctggagggccaaacagaaaataatagagatgagatttggaacttacgaagcctcgtatgacaatttgccacgcctgcttggtgttatcgaggaaagaaaccctgagagctcttacgaagtgaagaaattcccctcaattgaacatcctggcaagagtgtgctgcaaagggcgttcttagctctacatgcatgcaagatagcattcgtgaactgtcgtcctgttctctgcattgatgggacattcttgacaggaaagtatcggggccagatactaacagcaataggggtagatgggaacaatcaggtattgcccttggcatttgcttttgttgagagtgagaataccgacagctggtactggttcctgaaattggttaaaacaaaagttgttggtatgaggccaaatgtgagcatgatacatgataggcacgttggcattctgcgagcgatagaagagttgcagtttgggagtatggaacgaggataccccggtgtttgggaagatgtatagagtaggtggggcatgcgtcatatgggggctgatttcttcaagcaattcaagaacaaggagctcatgaacatgttcaagaggctgtgcaatcataaccaggagaaaaaattcaatgagctttggaagagattagatgagttgacagccaaatgcagtgatcagcgtgcagcagctccatcgaccgccgttgctgaccctcctcaagctcttggacctctcccaacggatagtccaacattggttagaagaactggattggagattcggaaattttctcagtggattctgcatgaaccaaaagagaaatgggccaaggcgtatgacacaggtggtgctagatatggaataatgacaacaaatttggcagaagtttacaactgggtgatgcgcggtgtccgtggactgccactagttggcatagtggagttcattttacatgggacatgcaggtattttagggatcggttccaggcagttcttccctctatgccgaataacagcattttgtttggagctttcatgcagaaaaagctagaggagttgcataaaaaggccatgaaacatcgagctctagtgcaaggtacccaacagcacaggtttgagatactatgtcaagataaggcaggcatgagtatctaccgcaagagagtgaagcaggagtgtgttctcaaagccgacggcacatgtcattgctcttgtgcaaagccgaagctgctccacaggccatgcacccatgtcattgctgccgcagcggagtgtggcataccagatgcaatatatgtgtcatagtacttcagtaagcaagcaatatatcatacatggagcggcgagatttatgggttcggcatagctggggagttcacagagactaacgatgaagtactcaatattcctgacccatcgaagctccgaggcaaggctggaaggaggaggactcgtcgcatccgcaacgatatggacgagtcggaggctggcagggtgaagcgttgcagcaaatgcgatgaacatgggcacacctacaagcattgtcctaaagacaaggagaaaccaagtgcggcggaggcaggactatcaggatcaacagcagatggagctcgccctacgggtgaaggcactacctccactcgaccacgtcctaggcgtcgtcgtgccacgtctggctccgtggtgtagttcttatgttctatgtttcgtcgtgtaatgtcagacttcggcatgtcatgtcttttggtctcgtgatgtaacgtcggactaaggcgcctaacgtctttaggtatgctgatgtatgtcggacttcgacacgtaatgttatgttatattatcgagctctacatatatgttaaattgcacgtcatcggagtgtaccattagtaacgtttgctatatttaaatagcctgtactcttgttgtacataattattctcatgattttattactatttcataattttgcaaattatcttttgttttacattactactttctgaattgttctaacacgaaacactatatttttcagagatggcacgtcagtatacacctcagttgttggacccggcgatagatcaccgacaccggtctcaccttactgcggtgcagggggctcagcttgggacgttccgggcacggacgtgcggtgagctactcacggttcacgactcctttgtcgagaggtacgaacagtgtattactataagttagttgcgctgtaatattttttataatgacatattaatttgttattgcaggctgcgtgaggccggcctcctaccgatgtgtcggctggtggaggctgccgccggcgacgcggacccggccagacaatagactgtggacaggtccctcctagcagctttggtcgaccgatggaggccagagtcacacacttttcacttgccgtgcggtgaggtagcccctaccctgcaggacgtatcgtacttgttggggctaccgctcgcgggagacgctgttgggccagtgaccacggctgtggactggtaggacgatctgacggcacgtttcgcactagtaacgttggcgacttttgttgaggactggttcctcgcaaccgaggaggtcgtggaccacgagggagagccacacactgaggaggcgtaccaggcctacctacgctggtaccagccacgcacccgtactagggtcaccttcgctcccttggagcagcagccccacgttgcgagcactagagacctctacgccaggcaccacgaccaggacttcgctcgtgctgtgagtaccctgcatcgcaccattcctttatgttttcatgtctttctcttcatcaaattttacgaatatttacgaacaaattaaccatgcaggtcgacgacatcaaccgggtcgtcgttgatggttcaacgacgatccaacatttaggcgcggggattccggtacccgtagaggagcacctgacgacgtacacgcggatggtggagtcgatgcgctcgattctccgagtgctcacctgtcgtgcagacgacgttgctcgggcagacgcagctgtacagcggccacccgtactgactggtccccgtccagctgcgcacgttcctaggccgactccccctccgcacggaggtaagtatttttattactatttctgtacatgcctcgcacatataagtgagccgtttcacctgccgattgcttcagggtttcgtgcaccgttcagcaccccgccttcctcggctaggccttctgttgtgccccccacaggtacttaaaaaaacaacattacttcgacaatcaatttacatgcattatgtcttagcttacaagggtcccgttgtcgatgtgtaggtttcgcccagttcgctatgacgcaggccgcccacttctcccaggctgcaaggtcagcgtctcaggcagctgcgtcgacctcgcacttagcgcagttctggcagtacaccgggacttcatcacaggcagccggcacgtcgagtcagggtccaccactggaccatgctgggacctcgtcggaccgcttgctgccttccaccttgctcttcgacatcactgactttgacttcgacttcgcttcaggctcgacagaggatgtcatcggcccctcacagctgggaggcgcaccgccggtgcagacgcaggaccaggcgcaggccactcctccgcgggacactcgtgctacccgtgctgtgccaccggatcgtttcacctactcccaggactacgtgcgagcacaggcccggaggaccaagcgtggtcgcggcgcggggcagggccagtagagcaatcttctctttgtttatttgcttcacttttcagtactgtatgcttgtgtaatgactacgttgttgttatatgtgcacgatacctttcggcgcatgcacgatacctttcggcgcatgcatgactactttctgccgcaccgatgcagcctcctttattcgcgtgcgatacgatatttgcccgccatttggcgcatacgaccaatgtaactttcggcgccgatcatgcatgtaactttcggcgccaatcaggcgtacccaccataccccaccacgttcacatgtcaggggtatcactcgattttttgcgcctatataagtcgccttaacgagtgaggcctcacaatctttcagaactcagtcacattcagtactctcttccccacttgcttcattacaaatccaaccggctttcgtcaatggctagacgccggggtgttgaggatccaaactggcgtagcgatccttgtgtatacctactaccaccttggtgccagcgtcctctctgcctatgcggtgatcgatgccaattaatggcttcgaggaatcctgatattcgaggaaggcgcttttttaggtgccctaactatgaccgtgaggtattttattatctgcatatgcttattcattccgtatgggcaatcgctttattcttcgtaacactactctattcggcagacccgcactacggcttgtgcatacatcgagtgggtcgatacagaaaatcccgttctcgacctaaccacttgtttacaagaaggttgctggtatttcgcatccgaaagtactgagcaatacttacagagaaaagcggcttatgaacgacaatgtcgtgaacaacagagcgactggcgggtgctaactacggcactccctccatgggaagcccgtccaagatgcaggtgtggtgatcgttgtcaggttctttgttccataaatcctacaacattgggtcgaaggttctttgtttgtccaaatattcttgacgacgatttcatggtaagaatattttgattacatgaatccttattttctcacaacatttactaactttgcttgctttacatttaatctttcctcccaggaaccaccaaggagatgtcaatacagagaatggatagataccagaagggttctaactccacctagccgtgttgtgcagcttgaactaccagagcaatacagggttactaaagcgcggtttgagagaggagagggatcctcacgtaggggttagctattatcggacaacttagcatattgaaatttctactgtcatgcttccttgtcccattactatatcgtcgttgtgttcaactattgcactacctccctcctagttcgaatctaatatcatctatgtaaccgcaatggaaatagttgtatcatgttcaaattgtactactatttcttcatgttacataattctccttgtttaagtccatataatgtttctatgacccagactgcgataggcctatataaattatctgagtactaatacatcgaataaggtacaaaataatacctcacttaacatatgaaattgcgcaacaaccaacttcaatacatttttataacaatattaacaagttttaccaataaatacttctttatttattattaacataacatagaaatatcttttggccgtacttttttcatttgggtcccttgtcgctctctattggggcggcaagggacccagatgaaaaaattacggccgcaagctctttatgggcggccaaaattgcaattagccccttgccgccctagggtctaatcgcaattttggccgacggcggcagacggcgtggtcgacccaccgtctgccacgtcagcttgccgcccaccattggggcggcaggggctatttctgcaatttttttggtcgatagattatttctgtaaatattaaaaaaaaaattcgcccgccagccgagtgctctggagcgagacgatactcgacggagacgacgacggcccagtagtgattcttcatattgggctttatactgggcccagtagcttttagccttcttcccaccgcattggcgccgaaaacccccccaaccagcgaaagaggcggacacacggcgatggcggcggcggcggcgggggaggaggcggagagctctgccgccggcgagcagcggcgcatgcccttcgctcgtggcgggcccgtgttcgtccccttcatggtcggacccgtctccacggtccccgagttcatgtcctccgcgctccacgagctgcaggttcgaatccccttgagcacaccgccaaaccctagctcttcaatccgtgcccttgctttggtgtaatcgcgttctgtgttactttgcgagcagtcgctgaaagatgaattgggcgatcctggtgatgaattcgacgaagagctctggtaagccccccaaattccgccgtatcaggtggagaaatcccccagtgtctgtcatgttgttcatatgcttattcgtgttctggtttgtacattttgtggattctgcagcgtagatgagttgagggtcctctcagaggaggagctggtggagcgcgctctccgggaggctatggaggtgaccgttcctatcgagcttatgctaatgtgcttaattgtagttctagttttgtgaacaatattttgatgtgatgtctctgttatttggtgtttttaggagggctgggattccactgctttgtcacagctggaggatcagaggattgatggagggtaagctatttttgcttgattggtgcttcttttatgcgagttggaattagatgcaacacggacggttaattgttggatagcgtcattccatgccaactcataaagaaagttctattgtgaattggtagcatggaacagcggtttgcactttatgcaccaaatcatctcttttcaatttttatggcttgtagctgaattcctggcatctaaattttcttttcatattattatatttaatattcatgtcttatgtggctcacaaaatgatagggtctgatgttctttcgaactatcacatgcagaatgtcagctagttccacctttggaaatggtgctatcacatcaagctcatcaggtgagagagagacttccagatcacctactgaggatacggcaagcataccacatgtgcatggaaacaacggtaaaacaagaggggtaaaaggggaaactagaggcaggaagcgaaaaaatgtcactccgaccttaaattcgtcagttgaaacggagatacctggaccatctgttgacacggcagttgtaccatacgtaccacaacaaggcatcgaagggaaaacaggtggcatgaaggggaaatccagaggaagaatgaaaaaaggtggaaataccacttcaaattcattaggcgagaatctggaagttgtttcacatgagtctgtaccacctgtcgaggatctggaagttgtttcacatgatgctgcaggcgcagatggagatacaaaatgcggaaagggcaaaaagagaggcaggcattttgatagagaagttcgagcacatattttacaagtatgccttaccctaatgttgcatctctgcttaattgcatgcattttctgatgaatttatcttgtatagtagttttctctaaaaaaatatatatacatatttccctcttcttcttgcatctattgttaatctctggaaaatctgaccatggttttgcgtcatcatatgttgtggcatggctataactaggggagctatcttactaaagcagtgaagatggcagaaattaaggccaaacaagaggaagacaaacatgcagccagcttgcactcattcaggtaaaacagttaactttgtgggcatgtatttatttgaccttgatttgtgggtatgtattgttagtaattccattttctgattgtgccataagctcatagatatatattatttaattttctaccgaatgggatggtgttatcacagctttgctgaagagctgtggaatttctgttgataagtaatttgaacttttactgatgggctgtggcaaataacagtgtaaaagtaatgtaaatcgttctttgtggttcagatgatagcaggatgcagcccagtttggctagattcatgtttcagtaaaaaattggtacttctgtgctggctgaactaactaggtatagaaatttacctccccttaatactggattttgattagcccatacatttactcatgtatcctatttattagcccatttatgtaaatcatatatggtatgcccggtaggaatagtttgcttcctttttataactgagccactagagaataagataagtataaaatacagctgtccaggctatgcacttatggccataactagatgatttgattttatctgttatattgttttcattacagccttctataaacatatttttttgaacgcagtggtgattctgtgttggccaaagtttctaagccatcagctgagaaagttgatgttgcaaaatctcttaggtacatcagcacaacttggaaggtttgcattaaaaactatagcctatttcatttgctcttttacacaagtggctcatttgtctcaaatttcacactaaccatttttgttatcccagaacaaaactttcaaacctggggagcacagacctgtagtctatccagaagtacttctgtgtgtggaagtttatgagaagagatatggctctgtgaaagtaatgacttatatacatatattttttggtatacttatttgtagggtgaaatatgtggggaataaattttttggtgatctcctttccttgcagagccaggaatttctagtgttgggaagccagctccttacagatcttagagacaatatttactgtttcaaagacaagctgatgaatgtggcaaagcaacacgttcattctggttattttcttattgaggtatgcatctgtgaacagaaatttgctgtgtgttcttaaagaattgcaactgtattaatcaacgctctctattgtcaggacacattctataatgacacaaggcgttctactgttgattatagtaaacctatacttgactggattaaaaattccagaaatgaggcggaagagaagtgggatgccattacttctggtgtgctgaagaaacgacaaaaggatttactgatgggtttgaatgtttcaaatgttcctgattttaaatctgcaaaaatggaaaagactcgcttttctgatctgaacttccgtctcggtgctgggtacctctactgtcatcaggttcttatctattctccttatgcctttattgttgtgatgtttctgcatcactttttttgtggaaatcaaatcgtcatttagtcacaatcaaaccttgtgttgtttgttatctatgttttgtgatgaaatctaaaatcgattaacttgaagctgtagtaatgtatgatggttgaggtagagatctacaaccctttcccccatgtttctgacaataccctgcacatacgttttcagggaaactgcaaacacatgattgtgatcagggacatgaggttgatccacccggaggacacacagaaccaagcggaataccctctcatgacattccagatgcagaggcggctacagaagtgttcggtgtgccagatcttccatgccacgaagatgacggtggacgacaagtggactctgaacaatccctgttatttctgcgacaaatgctactacctcctccactacaaagaggacaactcactactttatcaccatactgtatatgattacctccaggagtaaagtactcttcgatgcaagtatattttatctgttgcatgtagcccggatcacaggtgcatctttcgatttgttgtccgtaaactgggcagttttggagcaacagaggtattcttcgtgtctatgggcctgtttggggagcttaagattctgagaatgagctgctgagaagctagctagtgagaatctggagaagctgggtcccagcttctagcttctagttcatttttcagattctacaactacagattctcaaaatctagattaaaagatgaactgtttgggggagcttctggcaactgaagattctaggagaagctgcagctgctaaaagctcccccaaacaggacctatacttcatccacaaaatcatctcccatttgcagtcccatctgctttctctgtttcatattacatgtacctttgactttttaagtttgatcaaatttataaataaattcagcaatatctaatacattaaattagttttatcaaatctaatattcaatatgttacaataatacgtttgttttgtgttgaaaatactatgatattttttatatacttaatcaaagtaactcgtaaaatgaatatgaaacagagagggcagaatacaagaattacataagtgacgcatgattttctagaacagtttctataagaaaacattgtgttcttcaacaaaacacgaagctagaggcacgtgaaagctcaggaaagtcatgcccatcctgggatacatcttcctcgttgggcctagaagaaggcagtccactagaaaatactagacctatagtagttggcacgggccaattttgttttcccttaaaaaaattgaggaaaaatagaagagaaatgagaaatggaatggactagcagttgttgggccagggctaatggagcggaggccacatgtggcaacgagaggccgtggagcgccgcgccttatcctcccgccttttcacgtcccgccacgccgaccgcgccatgggccaccaatggccaccgccaccgccaccgccgccgctctcttctcctcccgcaccctttccccctcctcctccccccggcgacggcgacggcgaggcatccccgccgccgtcaccggcttcctctcccgccgccatgctcccgcgctccaacgccgcctcgcccccctgcacggtgaagatctcatctcaccaatgcgatctcgccgtgcggtccagctcgcacgtacgtgatctaattaactcccggctctgtgcgtgattgcagttgtggatgattccaaggaggtagagacggctgccggagatggtgcggaggagaggtcgcagacggacaagctggtggacgggatggacttcggggagctctgcaacgacttcgagtgcataagcagcccctacgtggaggccaccgcgaggcagctcgcccgcgacatcctcgacctccgcgacgacaaccgcgccttcacctgctacgccgtctccgtcaaatacaaggtgtgcgcatcacccttgtaccaccaattaccactttactgctactccgtactatgtgttatcagtaattcagacattaatttggtaccaatctcgcaccaatgctttgcatctcctttcaagttaatctagcaaacatgtaagctacgagtctgatatgatcatgggattccatgaactgtggcaaacactatctgtagttttttttttaacagtactatctgttttttttttcttggaagggaaaaatagagctatgccatttcaatcagcgagtaacgcttttgcgtattcgctccgaaggtttagcaacaccaacaagaatagtttcaggcacagagtagaccccgagaagctcttgcaaaagctctatgaaccaacacaaaatactgctgttagctgatgaatgttttttttccccgaggaaatctgatgaatgtttaagtaggtaacatgcctccattttcagaagttttagccaggctgatgctgattttatattaagaagaatagcaacgaaagtaccactcaaacaacagcaagaaacaaactactgaactagtgacagattaggatgtccagatgcagatacaataactgatgagctacttgacatcaccttgtggtttcgtgcctttctttttttttcaggacccggtcagaacatttgttggacgggagaagtacaagaggccattgtggatcaccaaggcactcgaaaaccctacagtggtaaggattgctgcaattctataccatatccatgaagttagaactctgttgtaagatatctaacccaaacaagttgcataacatactgtccaaaagaaaaaggactttgtcagttcaaattcaaacaaagaatgcctctctccttatttcacattggcatgctcatgagtttggattgattccagtctgactatctaatcagcattcgtgttattgcgtcagacagtccaggaaatgtcaatgcaatcgacaagcaacctgaccatcaaatggacattcagaggcaaacctaagaatccaatcttcgcaaccatcggaggagacctgatcgtctctgttacctcacagttcgtattgaaccagattagcggccaagtgctcgaacaggtcgactcatgggacctctctgcctcgtctcctcctgcccaggcctacttttggttgtccaggagggccttctccactgttgaagccggaaaggacacaatcgaagctgcaaagggtacagcatctcggctatcatcaaagaaagatgagaacttggaggtttatccagatccctcaggggatcctactaaggtacatgaatcatacattgcaaaaattgatgtcactttatataaacccacccacttatctgtagctatccagtgatagtgttttcaactttttgagcttttgtgttcaatattgcagttcttccaaaggccggatgatggattgaaccaagatgtgtaccagattgcgcttttcctggccgttctctacttcattgtacagtttttgagaacgactctgtgattgtactagctcccacagtcccaactcaacctgatactctggcctgattctccaggtcaagcttttgtgtatcagtgtatgcatatatgtgtgtgtatctatttctaacgaaatcctatcagcggcatgatcgacagttgattcagcatctggctggccggggttttcagatgttccaactgttaagtggttcgtgtttgcatgcatgtatgccagattgcgcttccttttttttttggaaacaaaagaggaataacgtttggtcaaaaaaaaaaaagaggaataacggagctggctatctttgtattaagaataaggggtacaagaaacaccatgagatgacgggcctattcactttgataaaaaaaaaaccttaccaaattttggcattgcgaaaattttggtaacttgccaaaattttggcaggattttttatatagttaccaaaatttagctacaaactaaatgtagccatttttttggcaactttattaaaacttggtaaggttgaaaatgacattaaagtgaacaggcccgacaagtctgatttaggattcaaaaccaggacccaggttgactgggcgaacaccctcgcaccatgtcacctgagctatactttgaactattcacggttcccttgcatgaagaatatgtttttttttacaccacccattttcaagttctgaaagaaaatttaattataatttacattcggaaaatcatttgcatgttgtcataactcaaaatccaaaaacatctctgcagcttaaacaaccaccttatccagttaaactgatcgtcttatacatatatgttgaaaattgtacgaacaaatgtgttcctttttttcccccttattacaacttgcaagaaccaccacacaccacccaaacccattttcaagttctgaaagcaaatctataatttaaagggagaaactggtgctgcgcacaaacacacgagctccaaaccgcaaagatgcaaatgttgtcagctcagttcggtttgaagaattctatgaaagccatgtatatctccaaatggttcccggtgatcaccgccgagaccatggccatgactgccctgacgatccgcctgaacgtatcgaggaacccggccgatttcctccggtacttatccacctcgagcacggggaagctgttgcattccacaatggcagtcgaactactagttgaagaagcagcgcttgctccagcagcaggcggcggcggcagcagcatcttcggcttttgcacgccgtaaagcctcgactcgaactgcgaaacgagagctttccggacgcaggcgacgtgcagctggatcatcttctcgctggaggcgtaggcccatgggttgctgaagctcccctgattccgctcgtggcacatgccgcatttcttggtgatcttcctctccagtttcagctgcaccgtctcggtggttatcacgcgggggagatctgcgcagcaagggtgcaggctgaccttcttgtccgggcagtagtacacgtaacctcgcacctgcgagcttcctaaagcatggtgtaaattaacggcgggaaagggttttctactgggaaactattttcatcgagaggatatcctctcgttatttatatattacccaaatagctataaaaaattgaaaaaatttgagaagatgtattaacatgtgatatatatatcactctacaaatatgtaagttcaaattcaacttctacacctcgcaacgaaaaaaacaaattaaaccatgtaagttcaaattcaacttctatattgaatttgaacttgcatgtttgtggagtgatatatcacatattaatatatcttctcaacttttttattctcaatgtatatggctagcaccttttaatctttattcttctaaaagattaaattgaaggagtagttttgaggaaaaaaaatctactaatactattttcgtgaatacatatatatttcatggaaagtcatttttctccttaaggcatcgtttcttcgatgccatcttaaataaaaaaatatatctaataatatagatcaaaggtggtatgttatttcagaaacattaaagttaaattcaacctatatacaaattaagttggaatagaaataataaatatgactgtgaatatgtgaacaatacactagcttgctagttagtttcattatctttttttcaacttgtatgagtcaaatttaaacttacatgtttacataatgatatatatatatatattacatattgattaatgttgtcaaaaataatttatattgtttggatgatatgtaagaaacgagggacatccaaagaaaagaaacaactccatatgttttggaggtattatcgccggcttttacaatggatcggatgacgtctctttttttaatatgcatttaccttattcaaaatatgtacaaatatgtaaaaatacaagtcatacttaagtaactgtaatcataaaccaaaccataataaagaaatcataattatataaaattttaataagtcaaatgatgaaatctatgtaaaaaatcaaaacgacgttctttactaaaaagtcatagagagtattaatttgcagtcaaggtcaaccttgccggaaggaagtattaagaatggagagagcgaggacctcagtagcgcatgcctcgccatccaaggaaagaaacatcaacatatgtttcgggggagtggattctgataactcgaggagatgtctcatcgttgtttgtatgtcacttaaataattatgaaaaaaatttaaaaaaaaagagaagatatattaacatgtgatatatcactccacgaacatgcaagttcaaattcaatttctatatctagcaaagaaaaaaaataaaattgactgtgaatatatgttaactagctataatttaatttttttgcgagatgcataagttgaatttaaacttacatgtttgtagagtggtatatcacatgttaatatatcttctcaatttttttcataactatttaagtaacataagtaacatataaacaatgagggaacatccctcaagggataaaaatagtttctcatgtttcggaggtattatcaccggcttaattttatgatggatgactcctttgattttttttaaatatgcatttatcttattcaaaattactttggtttttaaatatgtatttatgttattcgaaatacgtgcaaatataaatatatacaagccagacttaagtatatctaatcataaaccttgccaggaggaattagtaattaagaataagagagcggagacctcagcagcgcatgcctcgcaacgggcaccagctgtactgaccgacttgaagaagaagaagtcgtgcttgtagaagggagctggcacgcgagtgttgagaggctgcagtgtacaggacctgtggtactgatggttgcagcccgcagtgtggcaagcgtaccggagctcgaagccgagctctttgcagccagagcaaatgaaaggttcgtccttgcgaaccaagcacaccttgtgctcgtgatggttggtgtccaaaatttcggtgtacccggccatgctgagtatacgtacgtacgtaaacgtacctcaccacctcacgctcgccaagctagatcgatcttttgagtagctaggtaggtttcagtagctcatagcataccgtggcttggatcgatctcgcggtcacttatatatatagaaacgtacgagagattaattaattagctagctagtgggagaaacatataggtacacagtatatgtagtatctaataacgtcgcgtaccacgcggggtttagaatgtaagaaccggcaagtgaacttccaaacttccaagtaaacgagtacatcgataggcatcgatagggataaggtgttgattattcttacgagaatgctccttgtcagtcgcccatgcacatgcactactagctacttgcatatgcgtgagagaagtgctgctaattgaccttgcatagttggcaacttttaaaagggaaaggggaataagaagagaggggggggggagtgaaaagattcatacttcatactcaagtataacatgccttaaagcatgttataaggatatcatatataaagatgacaaacacacgtgacatgtcttatagcgaggcacgctactttgtaaactattctaacctaaaaaataaatattaccaaactacatgaaagataaagatttaatttttttttagaagtactcaagctcagatacaaattaataaatcaaaactatatataagaataatattatagttaaaaataagtaaaattgtatattgcataccgatgcagttttaggcttatgaatgtgtaatttttaggtgacctaattttcgcaaatttttatgctcttggaatctagcaatacacattttttaaaatgaaattcatcccaacatatgctacaaagaagctataaccaattattacgtaggttgtggctggatcgaatggctacgaattaaaaataccaaccttaagataaagataataggtattgctaaactttaatctatgtttggcgagaatctacatagccattcgttgtttctgctcaatggcttataagttgcatgaagtctttatcttctatgaaatcagtggttgattattgtgctaatcgaattttgtgttgtatgaagtccttatcttctgtgaaatcagcggctgattattgtgctaatcgaattttgctcacatctgacatcgaacctaaatagaactggagtaacatcggagaatatcagtcgttgacctagatattaccacctccaaagtcatcaaagccgactaggcaaggatactgccacaaagtacacaccacatcctgccgcggttcccgtccgctaaccacgctcacgaaggtcgccgccaaacgcacgacctcgatctaagcatatcaacactgctccatgtgccatccaccaaaaaaaaaatcagaattgttgattaggcttgcttgtttcaaagacaattaataatgttgagttttaaagcgtactcttaggatttattgggaatttttcatcgttttatcacttagctatatcttttggtccactaactaaaggtaagggtataaaagtcttgctgtaaattaactgcgtttttccattagtggtcacatttttttttcacttacgacccataaccctgaaatgcctgaatgcccaacgttttgaatgcgtacgttgtgccccatacacactccggttagttgctacatatgtctgtgtcaatcagactatcaaagtacctagtttacttgcgtttacttgactggttcaatgcatatactacttttttagactatttttattattattatttttagactagttcaatgcatatacttgcggtcatgtcacttgcaagttgcaacatgtgtcctgatccacataaatggcgtagtgcctaaaacgacagctattaatctgatccatgtgcttgtgcatattatcttgcggcagctacacctacaaactagatcgatcgaccacgaattaacaacgcgttaactgaataaagtcgaatataaatttgacatgagataaaactacactactagaaaaatgatctttgctggatcggctgttttccacaataataccggttccaataagaaccggtagtcccggttataaaaattttgatctttagtcccggttagtaacacaaacccctgtcagaggcatgtcaggaggctgaggtatcaatcggcactaaagtagtcccggttgatactaccaaccggaagtaaatatttctctccatatctgatcggttaagtcccagatgatatttcctcctcaccaaaatatttagataagatcatatcctccttctatccctcgtatttccttcctcccctcccctctcctccccccttcctcctcttcccctctcctcctcacatctggcgggcagcgtcggcgagcaagcggctagcgggtggtggggcagcacgcggcggcggccagcggggccgcgcacggggcgacagcgtgccggccgtggtgagcggcagcaggcgggaggcaacgcgccggttctcctctccgtttttttaataatttgtgattaagagatgtataatttcttttattacaatttgtgatttattgcatggatctgatatgtataatcgatctatgatgcatttgatttgtgtgtaattttttttaagatttgtgatgtagttgatttgtgtgtaagtaacttaggatttgtatttgtgatgtgaatgatttgggatgttacgttgatttggggtttgatttaggtatatgcatagcacacgatttggggatctggtgtttgatttaggtatatacatctcactcaatttggaagggaaaaaaaaaaagaaaaatggaccaaccgggactgccgctccctatcttacggcagtcctgggactctctagtcccggattcgtacgttatatataaacaggtgctagtacgtacactaaggaaattagatgagttttcttgtgtggcgctatccatataattcttctatacattgtcctcgcaaactcgcaaggtagaaattcagtaactcatttgttagcagaaacttaaaagtttccctgttatattttatttaaactagttgaattccatgtaattgagaaatcacacttaaaattaaatattattacatgacgtattttattctagaagtattacttatgtcatatgagccaacgcatattcttatatatttattatttaaactctaatggatgaagtgatgtacatacttaaacttaactcaacacctatgatacttcttctcaccatatacgttgaccgaatagtatcaatattttttttttcgattgtgcatccatatggttagtgctatatggagaaaggtgtgatttttctcacacaagctgagaaaatagcccaacttgtcttgaagctaagtcatattcacacatacttaaactctactggatcaaatgatgcactcaaatttcaagaccacactacacaccaatattaattataactcgtctcacgatagacacatcacccagaaatttaattccattgatttttcgattgcgcgtatgtagttgatgccacacggagaagagcttgatttttctcgcataagctgtgaaaatagcttaaagtctcgagtcaaggtcattttcatggacatccaaacttatactctagtggatacccattacaaatgaggattatattatcacccatttgcgatgatgatatctttagtagggacacaaatagtactttctcacgatagatatatatccctaagaaatttatattattttttgattacgcgtacttagttaataccacgcgtagagaggtgtgatttttctcacataactcaaggtagtggtccaacttgtcttaaggcaacatcacacaatccccttcgttccatattactccctctatttcacaatattagtcattctagcatttcccacattcatatcttctattatattattaagacagctcgaaaagaaggcaccacgttcactgtgggggctagaaattctcacattaatcggagaaaaagagaaaattatacaccgttggattataatagatttagattacaacggtttagatttgctatagaaaaaataaagaattatagagctttgatatagattaaaaagtcctgtccgtttagaaaaatccaattggattactatacggtatcaaaaattcaagcgggatacaatacggtacagaatttgttatgattccaaaacgcaagtatatatgcattgttaccgcacatataaaacgcagatatatgaagtagatatacttgggctgctgcggcagaacaagtgacaagcaaagttgattaccatcgcccccaataggtaaagcaaacaaagcaaagctgcaaccagcattccagaccagcaatgcatgcaacccacccagaagcgtccggccacattggcaactgacaacaaattataatcataatcgtgtaaatttattttaaacgtattcagctcggagctgtattcacctcggagcataatttagtgttaattaatgtagttaagcctaaaatataaggcttataggttataagttttacacagaccatctaaaattcaaaatgagattaattatatttataataaaatatgaaataaatttcaaattggattttcaatacggaaaaaatatcattgaaacgagtccatgctcacgaggcatcgaagcttacaaggtgtcggttgttaagaaaagaccatctaaaacacatgacgagataaattaattaacaggcctataaaggagtagagtggtggcggttggtacgacatataaaaattgttaataaaacaccaaattgaatcctaataatgattaaaagaagggatatcaggcagaccgtgaagtaaacaagtaaggcggttgccgggacttctagaaagtaaaaaaaacccattgataatcatatttgatttttaaaatctcaatgacaataaaaaggagaagcagcgggcggggtgcataagagtatagttgcagagctgtcgacggttgacgggacttctagaaaataaaaaatgaattccaacgatagttatattcgatttttagaatcacaatgacaataaagagtaggtggcggacggactgtacaggagcatagtggcatcgtttgatgggacttctaaaaattataaaaaataaaactacaagttcaattttttaaggttcagaacttctaaaaagtaaaaaaaaaacaattattatcatgttcgattttaaaatctcaatgacaataaagaaggaaggcaacgggcaagccgtagaggagtacaatagcaaagccgctgacggtttggcgggactactagaaagtaaaaaatgaacccaaacgataattatgttcaatttttaaaatctcaatgacaataaagagaagagacagtggacatgtcacacaggagtataatggtaacgtttgacggaacatctagaaattataaaaatgaaacccaatgtgacaataaactctaaaaactataaaatccaatttttaaaggttccaagaagaatgaatagaaatattggtagatcgagcaagcaaataaagaagtagatgacataaggggtagcaactggtgtgacttttaaaaactatataattagaaacacgaggatgataaggtttgatctttcaaaatcttaagacaatgagatagctatttaataaattttaagtaaaatcatactaaaaaaatatatgattttgtttgggtactagccgcgcaattgcgcgggccacccagctagttgatgttaatgaatctagacatatatatttatctagattcattaccactaatataaatgtggaaaatgttagacttacattgtgaaatggaggaagtataagatattttgagtttattctgagttaaacttctttaagtacataaggtttataaaaaaaaatcgaaatctacaacataaaattagtttcatcaccaccattgaattttttacagcctatttgttttttttaagaaatgtcgttgctacattcattctataaattaagttgatcaactttaaaaagtgcgacttaaaacaaaccaaaaggccaggtcttatatagtatataaagaggggatcacggagtagcatgatagcagcatgctctacgttcttgctctccaagtataacgcttgcttttagagttcccaatccgattatattgttgcatatatgtgatgcatatgcacctgcacgtagatatcatagctagccggccgcttcacttgatttcattgtttttgcgagatgacggggcacagtaagcttcgagctcccgagcaccacgaccatgagctcacactgacggccgggaaggagtcattccggtgcgatggctgcaaggagcacgggtaccacatgagatacgtgtgcaagctgggagggtgtcgcgcggggttccatctccacgaggcgtgcgcgcagcacaggttcggggattcttaccaggatcccttcaagcgttacagcctcgtgttccataaatctcttcccaggtacagtgcaggacgacgttcgctgcgatggatgcggaggcaacgtaagtcacctctttctagattatatctcgtgcgatatcccctcgttaattgcatgtcactcaaataattatgaaaaaataatctgaaaagatatattaacatgtggtacatcactccacaaatatgcaagttcaaattcaatttctatatctcgcaacgaaaaaaacaaatttaactgtgaatatacgttaactagttatagtttaatttggttttccgttgcgagatgtagaagttgaatttaaacttgcatgtttgtggagtgatagaccacgtgttaatacatattctcagattttttttttcacatttttcataaacatttgagtgacatgcacaaaacgagaggatatccccttaagaaattaaaatagtttcccattatatctctccttctcttgatcatgtttcttgtcatcgatcgatgttttcttatttttcatctactaccttaattagcttcgtccaaataaaaacttttgaaacacggatgttgtcgatcgtgtcttagttggttttaggtgtttcttttttctcaatacctacatgcaattctcgaaatatacgatacttggcatgtttttttttttgagaggggcatgttgttttatatatgtatgattcggaagatcttccgtccccaaatataaaagattttggctacatcgcagaaaactctaagctagtatacgtacgtgtaatcagttgtgcacgcttgcaggtgaatggttatgcgtacgtgcgggacatcggaaggttgcgcaccctgctcaaacgcggcagggtcctgcacccctgctgcgcggcgctgccgaaggtgatcgaagccgagggcagcgtgacgaagctgcggctcacgcggaagctcaggtcgccgtgctgcaagtgcaggcacgtcaagctcggcgacaggaggcacacctgggggtacgtctccgacggcggcggcggcgccggtgtcgtccagatccatgtcgcctgcgccaacgacctcttccgcgaggagtacgagggcgcgcgcctgcagcagcagcagcgcacaagggtggaaaggctcaaggcgcgtctggtgaatatgctgagaggagcggcgaccggcggcggcggcggcgtcatgatcctccctcagctgccgaccggcgtgccggaggagtcgtcgccgtcgccgtggacgatggacagcccggtcgtgaaagcgttgctgtggaccatctgcaccgttggtgctgtcatcaccggtaaccccgtcggtatttctaatttctttttaaccttgtaggaacaaggacgcatgtgttgtacaagaattcgatcaccactgatctagcaattggttaagtcgttaagatcaaaatacggcgacctcaaaacatgtacgtacttatgtgttctggtttgtaaaaagagaaaattgttgactatacatttgcccaatttcaatttcagtttcatatatgtgtattttttgtacagaaactttgttagccatatatgcccaatttcagttccacattaccatatatatatccagcatgtgagtttttttttttagaaaaaggtccaaggacccggcttctattgaaaaccatcacgggccacgagtctgctggggatgccagcttgacagaggttcagcacaaaagcagaaaaaaaaaaaacattaatgggccacaccccggcttgatagggattgcaagtatcaatgaaccaaacagaaacaactccaggctaactccaaccaaaaactctcatgaaactagctctaaacatcacctaacgaggacagctaaatagaaaatcaggttcagaaggacacagtgttaaccaatcccagttcttgagcgtaggcctgatctcgtctccctaaggtgggtcatcagcatctccagactttgtttctgatcagggtgaagcagaggtttcaactgcagcataagggaaatgatttgaaaaggaatgtttagaggatagtaaacgattttttctctaaaaatcattgcatttcttgtcaaccaaagtgacccggcagttgcagcaattaaacacatcttaacagatttgctcttagcaattgagttcatctctaccagtaaaaaaatgtcatcaaaactcctggcagtctgcccccaactcatggcatctctccaggcacaccaaacaaaaaaaaaaacaatggggcaatcaaagataatatggttaattgattcaatttccccacacagttgacaaaacaggtgaggttttccagtaaaggagatgctttttttctcctatgaggtagttctatgaaactaactggtttcatgcatggtaggagatagatccatctcacagcatgccacatagaattactagggtttactaaacatttgaaatcatgaatgggttaagaaatttacgaaaaaaaacacgttatttcttaaggtttttttcggttaatctcaaggtgatcgatcttcgagggtgattcattccacaccttgattccgagggagatttgttctacatccactaaggtgcatggaattaatcccatcaatccccttcaatccatcctcctgtattaatcgaataaggcattaatgggagggaaagtattttaacagccacatgtaacgcccctcataatttaaagtacatgcaaacttagccaaattatgtgcatctacatttagatcccaactttcatgacaaaattctgctttaacaaattgacgtcttcttatattggtgtcattaaggactgccaagtatctgcattttgatcttgtagcaatactcgaaataactttcatgacaatctgaatctatacagaccttcaggacgttgcagtccatggcgatggcaggtccttcattgcaagcaagagcttctaatgtagttggatcggatgtaggtcactctccggctcacatgtcagtgagcgatatgcagtaacctaaaggatctcaattgagttggattagatatcccggtatcccctcccaaaccatagcgctagctgctataaatataccggatgtgtcatgacaaaataagcttcaacaggtccttagttgcctgatcgagtaacaggggcattcgctttgccagatgcgtgctctaagccgcctctgcacatgggccgtctcttccaccgtatatgttgggccttgcctagcagctacatttggggctatgtttgggccggatgcatgtttttgggcctcatcttcgccttcttggcatgttgtcattttgtgtcggtttgggaatttgactagtaggttatttagaatctttattattattattattattattattattattattattattattattattattattattattattattattttgagatgaggttattcagaaacttgatactaccattcacgagcctgtgaaatttgttctcaaactcaaactctcgaagcaagatagttagtgcaaaaagaaaatgaacctgattgcattggttcactaaaccttctacctgtgcatttccgacaatgagcaaagagaaaatatccatgtaatacatgatactactcattgtgacatctggcatttacctacaatatctcaggaatattcctctgttttttttccaagccagaaacgagcagtccacaattattgttcaatatctggcggctggagtttgactaacgagattgtgtcgagtagggtagaattcgcaaaacgtggcgatgatgctgatgtgtttgtgcagctggattggcttttcgctagagacgctggtgattttttttttcttttcacgtggtactgattctttgatggtacagtgcatttggaacacttgtttgttcactgctcaaagggaagacatacaaatagtagaaaacgatgctgaattgctgatgtgtttgtcatagactggaaataacccaaaaaaaacgagataaatatctgttatagcatctactcgagctgttaaattgtatcaagcatgtgctggagctgtaaaattgtataagaaacatatcccgttttcaacaaccagaaaaggagtaatactatggtttcactgttaacataattcggctagttaaaagtctacactgtcaacataattcaattactatggtttccaagtaatactggcccagcatcatgttggtaagttcacaacgctatagcgcctaactccaattcaaccactatacaacacaaccttttgtgtgcagtttctaatctttacttcattagggtctctagcaatctaacatagcatatgtgtaaatgtaaaaggatctatgacatctatgatactgattccatgttaccgtcaatcgtgaggccatcagttccagacacaaagagccatctacaaatgttagacaagctctctcctccatgaaacctcagagatgcgcaggcaccacacaacccgatctttcagataccggaaatgccccatcccacagaaagctataggtggagtgccaccacaaaagtgcaggaattacctggggcagccatgtcatttccccgccaagaaactatctccactagaaaggctatgaataccgccaagcaatgcaagatatcctttcaagctcaccactcatctgccgctgccgctgctgaagaaaaacgcacatccttccttcctagcaccaactcgccacccaattaggccattaccttccaaaattctcccatccaatggcgctacgcctctccgtctcctcctcgcacgggccggcttcctcgccggccatctccacatgccgccccgccgcctgcgggcgcttccccgccttgctcggcggcggtgtggcttctcagaggaggagcctgacggtggtgtctggccctgagacaagggcggtgatccccgtgaggtcgagcggctcggacaccgccactgttggggccgaggcggaggcggtggccgtgaccgggcaggtgacggaggtgaacaaggataccttctggccaattgtcaagtcggcagggcccaaggtcgtcgtcctcgacatgtacacccaatggtacttcacaaaagccacaaaactccactgatctcttcgcgtcaatctccattgatgaactgttgcctcgcatgaattcttcagtcttatcacgagctggatttattttgaaatgagcggcgtgaataagaaagggaacagatctcatcccactgctcagtgtaataactgtaaaactgactggttgatttgcaggtgcggcccttgcaaggtgatggcaccgaaattccaggagatgtccgagaaggaccaggacgttgtgttcctcaaactcgactgcaatcaagacaacaaggtcagttagaactgattttctttctcttgtctacgctccacccaccattattcgattggaatgtatctgctgttttcctgaataaatcgtgctaagcctccttggtgcgtgcgattcgcagtctcttgcaaaggagctgggcataaaggttgtgccaacattcaagattctcaaggacgggaaggtcgtcaaggaggtcacaggtgccaaactagatgaattaatccaagcgatcgagacggtgaagtcaagctgaggaatgccctgaaaatttgcatcagttagcttgttgtcactagtgtacgttatgggtgaaccaccagttattgaagtgggtattcgacatggagacaaacagttaatctagttcttctgcctatgatgatttatcaagcatccagaacaatatacggccatttatatggaatgcaccatgtaaataactatttccaacgtcatgatgatctgttttctaatcttactgatttgcaagtgaacattgtattcatggttagcaaaatttcaaaatatatcaacaaatttccagctgaaccatcatagtttaaacattcggatgccggtttttttttatgacacatcttaaattcttgataacacagatacctacctaagatgacgagcttaaattgcaagtgtcatgaaactatactcaattcttctagagataaacaagcatatttttttaaaaaaaaacatggctcaatgaacacataaaaggatcaaagtaatttatcatggcaaatttcagacatgacatgaaccatgaagaattgaagttaccttaacgacaaactgatccatagatcatccgcccctgataattagcttgtttaaaaccagcttagcttgcagcatctcagaaaagttaacaatcttgcagcaacgagaattgtctatcaattccttgtagtcagactactatgctcccgctgtcaagagtgaaatcaggctgatcaataatacccagaataattgcaccaattagcatcctttcgtgaaagtggataatgaacatggagaaaaaactattgttctagttcttctgcacatgatttaccaaacattcagaacaaaatacaatcatgcatgatggtgatgcaaataatcgttccatacttcatgtcttcgtgaggagactgttactttctgaaattattgatttggaagcgatcgacatgctcttgcctgagcattttctgcatactagattacagaaaattttctttctaaactcttgcagttacaagcattaagatatggattgcaaattgccttatttgcttaccccacaccatttattaaaatatcttgccaaacaattatctaagatatagaggttaaaatacaagtgttggtattatgctgtaccgcatcaattcattgagatgccaaacttactaaagcaataaagttatctgaatacttccacaaaataatttgcattgggatctttcagatataacatgaactgtaaagaagtgaaagtaccttaatggcatcagtagctcctgcatttctggcagttcaataagatctgtttggcatcatctgaaaatttacatttgaaacaaagagagatatgtgttcgggttttcagctcctcaaaggaaacctgccacgctccctctgtcgatcctccacccaactagagcctggctgtttgaagggcagtcttgttctcataactgatctaattctttctgcctcctcccattgttctttctcagcatatatatttgacaacattatatagttcccagtgttgtgaggttccaactcaaaaagtttgtttgcaacaatttcagcaatctcaacattgccatgcgtcttgcaggcactaagcaatgcaccaagagcccctgggtgggggcccattggcatcgtttgcaccatttcaaaagcctcctcaagcctccccgctcggccaagcatgtcaactacacaagcatagtgatcagctcgacgctccatcccatagtacttcaccattgcctcccagtaatccaaacctttatcgacaagtcctgcatggctgcatgcggtaagcacaccgacgaaagtgattggatcaggccaaactgactgagcttgcatcctttcaaacacttgaagcgctaattttgcatgaccatgagctgccagcccactaataagtgcagtataagggtatgcatctggctgtgcaatctccctaaaagcactgagagcctcgtcaacattcccacacttagcatgcatatctacaagtgctgtaagaactttatcgttcctttcaatcctcttcttgtcaacataacttccaacccacccagccaactccgtgctgccaatctgcgaggcagcagatataacgccgaccatagttgctgcatcaggctcaatcccagcagcctccatttctctaaacagcgcaagtgattcctttggcaccccactctgcgcatacccattgatcatcgctgtccatgccacaagattctttgccggcattctatcgaacacctctcgtgcactccgcattgaaccacacttgcagtacccaacaatcagcaccgaccacgaggtggagtccctggtaggcatttgatcgaacacgcggcgagcagaagagacgtcccctgcattgacgtagacgaccaccatggcgttccacgatacctgggttctggatggcatggcaacaaagagggactcggcgtcgggcacggaggcgaggcgggcgtgcgcgcagaggagcgagttgaacgagacggcgtcgggggccgcgatgtcggcgagcgcggtgtgtgcggcggggagatcgtcgcacttggcgtagagatcaacgagcgcgttggcgacggggaggcggcaggggaggagcgcgaggcggagggcgagcgcgtgcagggaggcgccgagcgggagcaaccggagcgacgcggcggcgttgagcgcgaaggggagggagaagtggtcgggggagacggggaggcgcggcatgaggaggagcaggcggagcgcggcgcgcgggtgcggcttggagaggcggcgaatggcgcggttgaggagggaccggatgacggggggcggcgtgccggcgtgcgcgcggacgagatgcgcgtggaccgcggcggccgccggcggcgggtggtcggaggcgagggcacgcgagaggcggtcgaggcgcgggtcgccgccgtgctgggacgccatgggaggtggcccagctgtggtcggtggaggcgattgagtcaggagcaagaaataagggaggcaaagtagacttccactgtgccggagacgtgtagttggggttgcggtttttttttgtatcttgggccttttgaaccagactgggcttttcctgagtttgacggcccaattaatttacctgtccctccttgtttttaattagggccgttttggtttgataccaaaacatgcctttccactttgttggcaaactgaataatatgtgtgttagtttggactaacaccaaatatttggtagtgcctaccttatttggtcatattctagaagtttctcctctatactataagagtttggttttatattggtagcaatccaaatattagctaaataactttaccctacaatattttgatagtgccggagtttacctagaatttggcactaccaatgaattcaggcgttaatatgcagtttactggtgtgatgagatcatgagaagagtgacacacacaggcacacgggtgacaaatgcctaatggttcatgtctccctatatttcacatttttactgcaaaaaagttcttttggacacacctctgtgtgcaaattgtacggcactctggctctttccctgaatggaattggaatcaatatcagaaagttgtatctgatgtcaaatagatcgtataccattaaggcattttaccatacgaacatctgctccaaaaataaatacgtaaagttcaagctatgatcagtgtcatccaaccagctagccatccggcactacaattgacctggcgattggttgtctaacgacggatagaaatgcatgaatgcgaagacacgcaaacagcacgttccaagtttttgccaagtagggatcatacgcattcacatttgcatagcaaatgtttagtgatgtgacctcttaacttaccaaagcaatttaccaataaaaacccccacttgctgactggaccaagattcatatatcatgccaagcctaaccatgatgatccacaagagatgatcagatcagatcagatagaacatcagaccccattcttcactccggttaatctacaaaaacatgattgactgacgccaccccatcagcatgtgacatgtcacccgtccaacaatgacacagtttcaacaggtggacacccaaacacctcatcacccattgcatattatcccattgcatcgcatggcttcctcctcgtgcctatccagatcacctaatactctatccaaagttccaaacgcaccaaaagtgaacccaagaagcagcaacggacagtgaaaaaagaggagggcaacaagtcgacgacgatggcaagcagcaactgagcaaaatgcagctgatgacactagttacccaggtggctgtggcctgtgtggctcctaccatggtcaatcgatcgatcacttgccccgcgccggcatcccactcccacccaggcgcgggtggtcgtcacctactccaccaacccggcagctgcaggaaggcgctgcagttgatacgcttgtctctttcccatcattagctttcccccatagcacatgccgctgctcctccaatccacccatttctccctctcccgtaatgcaaaatacgcaatcgctcgcctgatcctctccccctctctgtcgctcgctgttcctgtgtaacttcaccagttcactcccaagcgctatgcgaaacatgctgtcttgccccttgcccccgactagttcgttcgttaccaactgtggcattggtgtcacaaagaacactatgcaacgcaggcaggattgtgacgtgccacatgtagtttagcggttgcattgacttaagtagcatattcatgatagcaaattttagattgggttaggctaaatttataatttaaaaatattgcatatatccggtcggatgtagaggccgataaaaaatacccttctctaagaaaagatcgtgatgtgccctatgggatccacgtgtcagtgacgagtcatcctgggcgttgccgagctgttcgtaatgccgattggtggttccaccacgtcagccagccgctgtcagcttgcggtgtgtgtggatgtgcagcagcgaattattgcccaggccgggacttcgatcgatcgatcgatcgcaacatgcaatgcgtacgctacgccgtaccagatccaacttatcaattcggagctcgggaagaatgctgcgcccatgtggcacatagcggtgcacggtttcgccgctttgattgataccccaaagttaccaaacggggtttacacctcgagaagaattccgtgtgcgcgagaagaaaaccgtgtacgcgagcagagagcatttacatggcgctcaccgtgcgtgcagtatgccagtattcacatttcacagacaagaacgggtcacacaccacccagcagtcaaacacatgcctcgctggctccgtggcgcggtgaatggtccaatcttatccaatcgccgcccccccgcccccgcgcgcacaaagcgagctcacttttggcgagacatgtcagagaagagccaatggcgagagggagggagagaggtactgcaagctagggaaggcatatggtcaatttggtcatggatgggcacagatcacaatgctcgcccattctctcgcgagactggcgctagctgatcgagaaggcgaatgccgccgaatctgacgcatcaggaggagactagtagcagtaccgcaggatgcgcgatcccattggatgccaacatggacggcttcgcctcagatacgcgccaccggagcatctagcagcagcaacaggacactgaaagccaccggaggagacgcatcatcagcagcgccgagagagacagacagcgacgcttgctgtgctacccaaaaccgcatcatccaacggaacggaacacgcgtgttttgccgatcgccacgctggattggatccgggaacgatccaagttcatcgcccacggcaagaaacagattcaacacgttgtaatccccgaaccatcataaccacgaaaaattatcgccgtggcggcgaccggaggccggcagcctcctctaccggccaccgtcggccggctttgatcgcactggacaacaagaacggcaagaagaacagagtgatgaggaatgaaaggttactaactagtagtagaaaacgaaaggaatgttcattctatctatctgcacagatgccggcccgccggcgacggaccggccgaccactcccatgcctcaaaactgcgcattcttttggtttccgcctcgccgatttcaaccatcgagtccgtccccttcattgcgacgccgcgccgccgccggcgaccgatccgtcctcacacacctgccccgcgtgagcgcccaattcagagatgaactaggtgggtggagatttcacttcgtgattggttcgaggaagaaggattagattacctgcgtgaggaggaggagggggtcgggggtgcagggcggcggggcctcgaagacggcgagggggaagtgcttgaacacgacgccgacgtcgaagtagatgacgccggaggaagggacgtcgacgcggatgccgcggacggggaaccagaggaagaggtcctgcgcggagacgcccgacagcgacgcgatccggccgtagctgatgaccccggccaccgtcgcgttgtaccgcagcccgacctcgaactgcgccgtgcacgactccccgagcgccgcctcgaacctcccgctcccttcgtcgtgcctgaaatccgcgatccccgccggcaggagcccccgcggcagcccgtgcgcccgcagcacctcgtgcgccgcctccgccgccgtcgccgccgccaccccgccccaccccgccgccgccaccaccatcaacaacatcaccacccaccacgacgacgacgacgccattatcaacgaggagataactgccgacgcgaggaggagaagatatggagatgaagatggaatggaattggagggggaggggatggacagaagcggcaataattgagggggagaaagaaaagaaaagaaatggaatggaatggaatggccggggtggtggagtggatggggacttggggtggtgggaccgacctgcccgtgaccgagaaagcggggtttaattttagttaattagttccgcgtaaagcgctcctctattctacggtgtgtttagttatgctgcaatgatgcccaacccttagctgggtgtgcgttttccgttttggctttggtcgcgggtgtaacgtgatttgttgttttgttcctttaccttagtgtgcgattttggttgtgttctaaaggttgttcattaaccctaattttagtttaagggttggtttggtttgtggcctaaataggccttaccaaattttggcactactaattttggtaaggcaaagttgtgtttggattgaagccaaaatagcctaagttcactattaaaatggcctattttgttaggcatgctaaaatttggcttcaaaccaaatagacactaaacactattgaaattaccaaatattggtaagcctaatttagacttcaaaccaagctagccctacatcttaaagttgttccgattcttttttaaaaaaaaacgcagttcatacaaagtttgagctccgtcggcaaaaaccaaaatttaaatttttcaaaaataattttgaagttgattttaagatattttgaacgtttttttttcagcattggttttaaatcactaagaacacatatataaaaatttacctgtaaaataatttttatttcttaataagcccttacggtgtgtttggataatgggaaatggagggtgggattgggattaggaaatgaatgaagggttaggattaaatggaaaagggagaatgaatggttagaatctaaagatggtgggaaatcatttccgtttcccatttgccaaacactttcttactgtttattagagaatgtgggcaatcagtggtaccttagtaacatttgtactgacattggaacagcgtgttgtgtatggtaggagcatatgaccgggccataagggagccgtttgaacgtaaaagcatggaacaaatggatgaaacttaagtaagacttgcgtaaaaataaaaaaaaaaacttaagtaagacgacgatgaggatgagaatgtcgggcgccctcaaaatgctaatgccaatgtggcggagcttgagccagtttggctttgcacgaattatatgtaatttgacctttctaaaaaaatgtaatttgttgcctgtttccttctttcttaatgacacaaattgagtttttttaacacaccctaattttacttgtagactagagactattgtgaatttgtaattatgttcgtagtttggacgatggttcgttactctctagtagaaatgatttgatccattagttattagagataaagataaactagtaatttactgatagattgattaggggtaactttattatttatcattttttgactaatcgatatgtggccatccacgttggcatcactcatattcaatcgaaatatgccaaaaaagaaaaaaaaaagagatttagccactactaaatttcaattatatttctccgtacttttttttatatataataatgtccctccatatttctaccaccgttatttgaggtggggtgatgaaaatgtacatttcactgagagaatgaacgaaaggaatgtaacacgaggaagacaatggtgaggatgagaaccattgcatggtaggctatcctacgatcacacctactacttgcaaacttaagtacaactagagggcaagatggtggagtggacgggaacgagatgatggtgctaatttgcccgtgaccggtgacccccaaaacagtttaatttaggcggtaatttcacgcatagcgttctttccttcccacatggtagaatgtgttttagttttgttgaaacttgagagtgatgcaaaacctgagcggttttaccggttcggttttggtcacatgtatgcctactatttgggcttgttttcctagtactccaagtatatatttttagttgtaaactgaaggaagacgacgacattgacggcgagaatgccagtccgaccgtggagcagcagtgtcttctgctgtcatgtggggcccttgttgcagccacagtgtagagaaagccttgtttctttctcctctgaagtctgaacttaacgtgggctgcctttcctcactgacgcaaccatcgtggcacgaacacgctgtacatacatacgcggtgaaacgcccctaatgctttgcagaattgcaaaagcacaaacgaacaagaaacaaaaatgtcctgtgttctcttctcttggtccaatgccccatagagtgaatgcattagctgtgcatctgggtttttggatgcttccggttggtacaaggcatgtgcgccctcgtatatcattctgacatctcggtgtaccgcgatgaccgggagataaattttgcatccagctcaagctagccaacgaggtacagtattaattaggagacgaaacaaaagcaccgaaacagtatactccttgtttcccggttcagaaaactactgaacaaagttaatgctttggtcttttaccaattaccagtgttcccatttccgattgagcgacgaatcccgatcttgacggtatgacagtttttttttcaaatttcagttaaatctatcgtctcaattttgaattcttaaaaaccatttgaaattttacttataatccgcttccgtcctccgtgaaaacaaaaaaaaaactacagttctcaaccagtttttattgaaaacttaaaccctggtctatattaatgatagaatatcatgtagtaaattatgttttgagattcatgcaaagccctcaaaactctaaccttttctttttttcctttttcctccccatcaccacatgaagtgctcaacacttccgcttcttgttgccaccaacgccctggccttgtcagctgatcgaaatacgctaatggcaccagagaggctccctcgaccagccgcctcccctccctactacccttccccctctatttctcctcaaggtggcggcggcgaggtgcccccgccccaccgtctcccccatctccagcgactcactattgtcggatccaccaccatctcctaactgtacacttgctttgcctccaccaccaacaccagtccaccgtcttcctccatccccgtgactccgatgtcgccgtgccgtccactagttccaccatgcatcgtcgggccaccgcttgtcggcaagacgccggtcgtcatggctggtgaagaaggggtaattggagcttgaggagaaagaggtgaggtcgccggagcaggaaccgcaaagcaaatctaatggtagaaatttacaatattttagcctcaattttctaccaacagtagtttagcatttccgtgtaaaaaaaaatggttgacatgtccgtatagctggctagctattactttctccatttcacaatgtaagtcattctaacatttctcatattcatattgaatatctagattcattaatatcaatatgaatgtggaaaatgctagaataacttacattgcgaaacggagggagtagctagcagctgtagttagcaatctcgtgaactagtgttggccctgcgaggtgtgagttcaggctgcacctgatgggcacaacctgtcggggaagctagcgagccatcattgggagcagcatgatagcagtggggatcaacccattgatccgagcaaaaacacgcacacagggcaggcagagcaggcaccacacgcgcatacgggattcacacgcctccagtacgcatagtgcgaacatattctcctttctgctcgccatgaagaggaaaatctctgcagaaatgcagcctctcgaccgtggcgagctgaggctgagctgagatgagctttcggtcgccatcgacgcatcatgggtggcatcgttgtcgtgcatttggatgctgccgaaagaatcagagaaaacctcgagaagaaagaaagggagagatgcagatactctgtctgtgctgtccaggtttgccttcccttttcttcctttcatcagtcaccaacctgcatgcatggatgatgatttggagagaaaaggggaaatggatgaatgatttgattgcacaagagcgagctaaagctctcatcatgtaccacaacctggatgcacctgtaacaagctcgtagccgtcacctacatcgggaaatattcagcctgttttttttttggcttaattatctgctgttccagcctgtatgattttcagaactactcggctgtttcagcgtatgagcagctatgattggctggctgagacagtaccactgatcactcatcattcgtgcttgcttagatcttaatggcgagtgattagcaccgagttagttaagggtttggtgaaagctactactagtgctgccggattaagatttaacggcgatggcaaggacggggacgtaccgggccgggtgtgtgcgcgggcaatgatcgtgtcgcgccgaggcggagcccagatggcgcgaatgattcgggcggcgaaaaacaaaccactgcacatgacctactacagtaccactccgtcctaaaaaaaaatactgctagctacgaatctgaacacacatatatatcaagttcgtatgtaggatgggtctttttctagacagagagagtatacttcatccgttaaaaaaaacaaacctaaaactagatactatcatatattctagtgcaacaaattatagacatacttctactagtatatatcacgttcagttttagattttttttaaaaaacatatgtagagtagtcgaatgcaagattgcaatgcagggatcaggtcaccaggacaacggatgggccatgcacccatcgccgtcgccggccgcgcggcgcggtggcgcgctccgctccacgctctcttcttccctgatgcccgacaagacccgttctttgctaatggtggtatagaatacttctgtgatgcgcttacaaaagtagatttcgccaaagttaaccttgtacatcagtattattagatataacttttctaactatttgttattttctctttttgaatttatttatgtatttatttatgggactagctatatttatgatatcatattaaaaaaagttaaaatcttgttacaatgtaaatagcatacatttacacttcaaaacttatactaagtaagttatttatattgtaaataacatacatttacaatgtaaataacttatggatgttaacatatatataaatacgaacaatattagaaagtcttataatatgaaatgagggaagtacaacatttatactgtaagttatataagagaataatgataaaagtaaataattaccaacttggaagataagattgagagagaaacactagcaatcacatatttaaaaaatgattgagtcaagtcagaaatgtggcactatatttacaccaaattcgttaatttattggctaataagcttactaactaaaccgaattaacatgccataattacggtcacttggagcctggaggccaagtcatcaaacggcaccggctggacccacgtttggttacgtctcaccaaccggttcccgattctgtgcaacagagaccgaaaggaaagggaaaggattgggatatttgggattaggacaaacagatggtacactttgtcactctatgattattatcggtcacgtacgtactagtaagtgcaggcccctccacctgagccggagttgatagcattagtttagattgttagctagcggctacagaaagaaggattagttggtctaataaaaggtttagttttatggggatcttagaaaggctttaacttttggacgtgttttagttaatcatgagcttgattgggtgccggctgctggatgcatgggcacgttaagtacgaacacgcggcatgatggatgcgttgtcttagctttcgggacgtcccggccggaaatgcctcttatgattattaaagaattaggtcatggggttaataatacatggaaatacagggtctaatgggcgacctttgatcgaggcccagtactggttatgggcccaataaactgtgcaaaggcttcatgggctacaaaggagatcatccacaaaatttgtgggtccaagatagtcacggcccattatttgcaacatactccctccgtcccaatatataagagcatccccagcagctcatctaaatttcatcctccatactcccatttggatagccatccaaaaaaattctcactctatataacttttcacttcaacagatcatccatattacatcctaaatataccaacatcctatattttattaatatttttcaactaccacacatttttactcatatccctctcacctttcaccacttaaaaaaaatctcgggaagtgggtagttgaggatggagtgaggagagagaacctccatatttagcataggaagggctaggtttggagaatctccaaaaatggagtatgtgatggtgactttgctggagcactatttttctcctccatactccaaatatcggatggatgactagataaaggagctgctggggatgctctaagaacctagaaccggataaaacattttatagtactatgaatctggacatcataggctacctgtccagattcgtagtactaggaaatatcccatccgattttaggttcttatatattgggacggaggaagtactcatcagcttccatgtttaatttccacgataatttttttcactaaaaaccaaactttcttcattcattcacgggagaatgtggactggactgtcagtaccgcgcgcacacaatcaacatgaccaaaaagcatcagatgccgctagggatggcaatcgggtgcgacgggtacgggtagtgcctatccatacccgtgcccatgagattatttttttccgtgggtatatctattactacatgacgggtaagaatggttgcccatgcccatcgcccacgggcgccttgtgcccgcaggcgtgcccgtttacccgccactacaaaagtagtggaataaaaagtctacaagcttctaagttcgatatcgaatttaaaacatcaaatattctctgtctcggtgtggtgtctctcctctgacggcgatagagtaagagggagagataataagggaaataaaaggaaaaccgtagaaaacaaagaacgtggcttatgtattctagtggattttgcttctagcctacatgtaagttagatttcgtgggtaaacgggcaaagcgggcatgggtagtgattacccatacccatgcccatttacccatcaggcatagcttttaacccaataaaatatctatgggtataaaatggagaacaaatttaatcctaatagggtttttaaccacgggtaaatagaaaaacgggcacaattgccatccctagatgccgccatggactgtctccatccaaacctacgtgtatcttcaggatgagacacgccgacgcgtcatgccgcctcaaaggccgcggaaacccaaccgcccgtccgccagcccagccgctgtgacgtgctcactgtttcggcggacggacgcatatgtgtccgtttcgcaataaacacacgggagcaatcgcatcacgccgacccaaaaaaaaccgtcccgtccgctccgcggcgcttgacaacgcgtggtgcacccaatagctctagcgtgacaagactcctacgccgtcacgcacccacgcacgcacgcacgcacgcatatatgtgcagtgtagcgtgatgtaccacttctaccaactggtggtagtagcattgcctactttcacatacgcgcggcgccgctggtgctggctggctggcgcgcgcaccggcgggcggagagcgaggtttttcgccggtgttttggttggcctccgccgttccgcgcggtggtggtggtggtggttgctgtggtagcgagggtacgctttggagacggagatggagatcggcgccgttgagaacgggggtgtcgtcggtggtgaagttgtggcaggcaagagggggaagacgccgcaaggttggaagtgcatgccattcatcataggtgaggctcccgttccagtgatttctttctacgttttgcgatccgtatagtatgttaacggccctttgaatcgtaggattaagaaaacataagaataggaaaaacgcaggattttaaaaaggtatataagtgtaaaacagaggattacaaaacgtaagaaaaacacatgaattaccgtttgattgaaccgcaggaattggatgagagagataaactcaaagaaaaattaccaagaggttaaagctcatgctaaattttctctaaaatctctataagattgtgcattccataggaatttcaaagaattggataggatttaatcttttgtttcaaatggcttcatagaaaattttcctatagaattgaaatcctctaaaatttctatgtttttcttccaaatcaaaggggccctaaaggagcgaaggcaggcctagagtagttagggcttgagccttagacttgtcttcagaattatggttaaattatcttaaaccaccatgtaactttaagaaaaaaaaagcaactcactagtttaagttcactctttaatgatttctagctccgtcgctgacgttactagacctaatacctctgccgtcactgatgttacttaggctgcgttcgtttccagggacctaataccaactccccctctcatatttcgtgtacacgcttttcaaacagtgcgtttttacaaaagtttctatacaaaagttacttaaaaatcatattgatctattattttgaaaaaaaataactagtacttaattaatcacgcactaatggaccactccgttttacgtgtgaagggaatgagttccttagccaagaaacgaacgcagccttagacctctcaaatgctgcacggctacaccgtaggcttgaaaataacaagatagacgcaacgctcaaatacacgtatgtatacacacgcacacctacctacacatattgaatggcaaggtttattttggctacaatttaaacatgcccgaagtcccctttttatagatagtttcatgtgaaagatcaattcatttcctttgataatatagaaaataaattgcatcctgagaagggccatatatatagatcatagatgtatatgtccatggtattcgtattcgattagcacgtacggaagactcttttaatcactcgtattcgtgaatcatctcattaatacttctacatgactaccgtaaatcatatactaatatccattcaatataagagtattttcagactctgagcctagaccaagtatatgttgatttggtctggcttggcttggcttctttgtctaaatttagacatgacaacatgggtgctctaacccggtgatccctgcacaggatacaccctgcctcaaatcaaagcaaaaagggattcacgaatgaattatgttgtacttcaagcggatcaaatcaaaatgctcattataatgtactgaatggatgcccttttctgattgtatctatgtagcaactgagacatttgaaaaggttgcgacaattggagtggtagcaaatttgacggtctatcttgtgaagcgcttcaacattgggcaaattgaggcagctaatattaccaacatattcttcggtacgcttaactttgcgccattgctaggcgccttcatctccgacgtctacttgggaaggttcaaaacactagcctatggatgcttcgccagcctcctggtatgtccatatgatgaccaaaccatctctcttagtagtttcatttcacctgcttggcagcagaaagaaatgcaaggtcacttgtcattgtcaaataaggcttcacccaacgaataaaaagatcagcaatagcttaatgcttttttttcattagaaacgaagaatgtacaataagccccaactgatgcaagaaactgatatatagtgcacatccaacatttttgttgatttaagctcttcccaggagtgtagttcatcaacatgaactcattttaatttatttatttgctaaaataacaggggatgctgggaatgactttgtatgcatcacttccagctctcaagccaccgatctgccatgaaaaaacccgactaggcggaggctgcaacagtccatcaacactccagctaagtgtgctatacctttctctaggctttctaattatcggtggaggagcgatccggccttgtagcttgccctttggagtagaccagtttgataagaccgacgaagaaggtcgaaagggactaaacagctattataattggtactatggaacaagtactgctgcccttgtgttatctatgattgtcatcatctacatccagaacaatgtcagctggccaataggatttggcatacccacattactcatgtttctcgccattatcatgttatttctgggtaccaacctgtacgtccatgtacaaccagagggaagcatatttgctggaattgcccaggttttagtggcttcatttaaaaagagaaatctcaagcttccttgtcctcatgatataaaccaacaaggattgatgctctacaaccctccttccaagggcaaccgcgtattcagattgccacttacttcccagttcaggtaaacatctgttaccactaaagatgaacagaattggaactaatgtagctagagatgtaatcaacttagagtggaggaaaaactaaaacaatgactagtcatagtgaaagtattagaacatccaacaaactgagaagtgataaatgcattgtcatatgtatatgtgcacacacttttacgcgtatagtgtgcttcaggagtttttgcaagaacattacaatgaatcggatatgggttggttttcttgaaatttatatctgcatcaatcccgaggcacatttgaaattatgatgttgcatgtatatatgtacatgtggaaaaaaacgaaatttgaaaaacataagttcttgacattgttctattttattgccaaaacattgtaagttttcaaagcaaagcaacaccaaataattaatcaggttgttgaatttagtgatttttattcattacctcttaccaagttgtaagactcagataccttttatacagttgaatattaaactcatatagatcatgcatatcataacttgcacgagtattttgtatgcttatcaacacgagcacacataaatatttactgatagatgctatattgctatctatgtgctgggcaagaaaatgcagaaattcatatttgttggtaaatatacaccctttttcctctagtaaatgcatagaatgcaccacatgcttaaatggagttaagaagaaacatgctggtcatatcaaacaaaatactgaccctttcaaagaattatatgctagatgccatcatagtttgatgcatgttactcatcctcaggtttctgaacaagggtgcaattgtaatgggtgatgatataaatgttgatggttctgcaagaaactcttgggagctttgcaacgtccaacaaatagaggaggtcaaatgcttaataagaattgtgccggtttgtatttctggagtcttatgctttgtcgcattggctcagcaattcacctatataatcttgcaaacatttacaatggactgtcactttgggacgcactttgaaatcccagcaggctctgttgtatccatatcccttattgccctaactctattcatccccatttatgaccggattttagtaccaatagctagaggattcactggagtggaaagtggtattacacttctacagagacagggtataggattggccatttctcccatttcaatggtggtagcaggacttgtcgaacgtaagaggaggaactcagccttgtcgaatggaggaatatcgcctatgtcagtcttgtggcttgcaccccaacttgttttaatgggtattgctgaggccttcaatgcagttggacaaatagaattctacaataagcagtttccagagaacatgcaaaccctagcaggatctctgttcttctgtactatagctggagcaaactacctgagtactgctctggcaaacatcatgagaaaggtcacgaccagagatggtcactcaagctggttaacagacaacattaatcttggcaaactcgactattacttctattttattgcccttatgggagtcctgaaccttatttattttcttatatgctcacacttctaccaatataaggtaatgtcactccattctgaagaatccatcaaaatacctaccaaggaagaagaagccacagagatcgacattgacacagatgcacctagcaaatgaatagtgcaactgcgagtctaattgatctggcacaaggaatatacttttggacatggtgacatattcaaattccaatttcgaattcactttagaagaggctctaatgtttgtaacatcaaacagacctctgtgtcatcttatggatgtgacaaaaacaagtgtaccatagcaagggggtgacatgttatctagcaaacatgaataaagagtttaaatggcctgtcctgttgtattcgaagtaatggagtgtgagtgatagcttatgaaacttaaacaagtccataatggttatgcgacaagtaagcacaggtcatacaccatctttttctattagagcctttaatgtgcaatatttgaaattcttatagatgcttttacgaacatgatttgcagtaactagccatttatcaggtaataagaaaaaagtgagctctattaatagttgtgtcatctttgaactattgctgtcggtaatctcacattctcacacagtgtgggtgatccttcgtatacttaatgtctaatataagtaacttttttttattaaaaaaagtcatgccaggtggagagatcttatttgattgcttaaaatgttatatgataaaaatcacagaaatgtttatatagaataaagaatttatggtaccaaaaaaatcttcattccagaaatgtaatgaacatgtcaatcgttaaactcaccgtggaaagtcgtggaacaacaactggagcaccacggaccttgtcaagagcaaaacttatccgcaatggtcgtcctagcattacctgtagaataaaaagaaagaccatgtttattttcctgtttatttttcactgaaacagttaatattacaatctgttagacatttctcttcatcaaacagtacctttccatccatagcatccttggcgcacttagcttcatactcgtttgagaagtgcacaaacccaaaacctcttgaccttccagagtttttgtcatacattattctcactgcatcatcaaatagtcttcatataattctgttcactaataccagcgtaatgaatatgtaaggaagggattaagcattgcaatttgtggggtaaatagaataaacaatagcaaaacacatgttgccacacacatcttataccaggcaaacaccaatatgcctccaccagataattccatggcatatgcatattgagatgtcatctttcagaataaaactatatgataggtgataaataatcacgccacatatgaacctgcttcaaacagaagcaatagccattgacactggggcatacgcatgaaaagacatgaatggcagcatctatacaaatatgtgggataatttagacttacagagcagacaaatgttcattgattgaagagaagtgttagtacttggtagatatatatgtcatgaaacaaatatagctttcctctatgattatctatcgagtgtcaacatttgtgaactatatctgttggtgggagcatgaaacgttaacacctttaaggcagaaaagtgggacaacgctactagatccttgaacaaacatccaagataaattttaaagtggctgattaatagggactgccaggctgccaaatgaaatggaagtgcaaagcaacacttgcacatatgtagaggtgcacacccagcagccccaatatactgctcatttttttttaaaaaaaaaaactgccacagctggtatttacaggctctatcaccaattctttttactatcaatagtatgttgttgtcctagcatgtaggaaagtcaacatgcacaatccagatgagggcataaggtcagatggaggatcaccgtaaaaactccaaggcaacttttaaaaaggaaaaaaaaagacaaatgaaaaaaaggaagtaatgaaaaatgagtatgcactaaacaagctgccttagaccttagtgtgtcagtaccattagaatccatattcacgtgttagagattcctggagcaatagtgagttgagatgtgatatcgttggtcatgttccatagaccaaggcatatttttcttttaaagaaaaaggtccaaggcaatcatctatttcatcaacttgcatttgaaaatcatgcttgatgctttactttttccacaggagacttggcaacctgaaagtgaatactcaacttatgcctgagatagattccaatagcttgagacagacagacagtgaatactaattgtttgatgtatcttctctcttccctaggtaagagttgttctactatcttctgctgtacggcactatctcaatggaactaagccctaaagttttccttgtaattcgctttgcataacaggatctgacagattcagcagctctatatttgccagatgatgcataagcattagaaagtaacacaacatgcccataatcaaatgattccgtggtgagcaccttctttgcagcaactttagtaaatttcatgtcaccatgcaaatgccctcctcccatcaaagccttccaagcatttgctcctaatttattgtgagtcaagctagccactcctgctgcttcctccaagcggccagctcttgccaacatatcaactatgcatccgacatgctctgggcatggaattattcccttgtcattaaccattcttctaaagacgagcatcccatcatccaccagtccagagtggctacatgctagcaatgtgttcaaataagtcacactgtcttgatcctcgctagatttctccatttcattgaaaagtgatactgctttctctccttggccatttacaccataggataaaatcatagtattccatgagacagcattccgagaaatcatctcatcaaacactttatgcgctaaagtcgcatatccacacttaccataaactgcaatgagggtattaagaacaggtttgtacagacacaaacccgatttgtaacaatatgcatgaagttgaatacatagttcaaacttagcaacctcatagcaagcaagcaataaggtgaccagtgtcacagaatcaatcataaaggaaccttcatgcctcatcttcgcaaagagatacatcccttctagggcatatccattttctatatacgctgacaccattgccgtccatgaaaccaagcttttctccattgtaccatcaaacaacagtcttgcagaacttaaatcctcacatttagaatacattgtgattaacgagttaactgcaggaagctcaccactgaacccacagattacaatctcgttatgaaccaactttcctatccttccatcacccagatgtgcacaagcttgcgccactgtaaccaatgctaccctatcaggcactatgccactcaacctcatctgaacaaacatatgtataacttcaatagcctgggcttcctcaagaaggaaacccatcatcatcgtccaagaaacaacatcattaacagcgatctttttgaaaatctctcttccaatcgcaagactaccaaagctcaagtacatacccaagattgagtttgtcactgagacatctgaatcaagcccaatcttgactgaataagcatgtgcactctcacacaatccaaggtcaccacaaccagcagaagcctgagcaatgctaatcatagtcacaacattatgaactggtccaaatgaaaacagcaacctcttgaaaaccagcaatgcttcctcaaacagatcgttgtgcactagaccagaaatcaatgcattccaagtaactataccaggatccctcatttcaccaaacaatgcccaggccttcgtaggacgtccacatttcgcataggaatcaagcaatgcggtccgaacaaaaggattggattccaacaggctcttcatagcccacccatggatgcactcagcaagcaccaagttgcccatcccagcagctgctattaaagcaccaaccaatgtgaacgagttggggctcacccccaccctcatcataccaacaaacagcctgacagcctcgccaaacaacccgctcttcgcatgccggtagattgcagccgagcatgcgaccaaatccctaacaggcatttcatcgaacatttggcgaggtcgcgcgcgagcggaacacccacttcctcctccgagccgtttcatcgaacacctaccgcgcacaccatctgaaccctcccccagtcccccaccgacaaccactcaataggttattctctagaccctgaaacgaaactgtttcaagtgacaaaaggtcgcgattcggggattaccttcggtgacggtgccgaaggaggagaaggcgtccgtcagcgaccgctcgtccgcggaccacgacaaccctacgcccgcgcgcgcaatcgcgcgagagagaaagcgtagcaaagcaacaaggtgagaaccatggaacagagtggggattggattgcggggaaggaaacggaggcgggagagcagaggctttaccggcgacgaagagcttcgagttggagggcggcgtcggtggcggtggaggatgcggaggaggagggggcgactcgtcgggtggtggatcggcggtggcggcggcggagagagcgcggccgaggtggcggtggtggtggtggctgagaggagcgaagcggaggcgggagagcagcgcacgagccgccatggcggcggcggagactgcagctgcgacggctgggttaatcgcgagcacggcggcgccgcgatactcaaagtgaaccacgtcagggtcgggagaggaaagaggcctcaaggctgcgtgggctatagcctgagccccgaggactcaagtttcgaagcccaccaagaatcctagcagaccttggctgctatccggaaaaagtatactttgactccctcaactatgacacgagtatgattcatgacctccaaccataaaaccaggtatatcgactccttcaactatcaaatccaatgcaaactatatccttgagtggttttggaagcggttttggctgacgtggcgcctatatggcggtgttgacccggttttcgtctcatgtgtcgcttatgtggcattagagtaaaaaatatatgtgggaccgacatatcattcatacaaaaaaaaagtgggacacatgtcctcttcctccttcccttcttcctctcctctcttctctctccttcctcttcctcccccctcttcctcctcttcctcttcctgcggcggcgagcaagggggtacccgttctgcaacgagacgctggcagcggtgggcgggagcaggagtggcagtggcgggcgggagggcgagcgaggactagagcggcgacgggcggcgacgaccgtcggcggtggacatgagggtgccggagtgatggcggtggaggccgttgttgcctccctcaccgcgggtgaccccgccgacctccgtcccttgctcgccaccgccacaccaacattcccctccctccgcatctcttacgcgcccaacttgccacttttcctctctatttttcttggctccggccttgccgtcccttcttgctcgtcctcaagccgtcattcggcgattccaccggcagcagagacgactcagcgttgacgacgtcgacccccgccgtggccacttcatcgtctacggaggtgacaatggggagcgtcatcccagtgtagggtgacgtaacgataaggagagcgagaagggggaagatgggaatgagagatatgatgacatgtggggtacatatgtcactgtgtcccataatatttatttgtgaatgacatataggtcccacatatttttttgcttttagttttttattctaatacaacataagcgacacgtcgacacacgtgggacaaagaccgggtcaacaccgccacgtaggcaccacttgaaccaaaaccgcttccaaaaccaccaaaagatatagtttgtatcggttttgatagttagagtccatatacccagttttgtggttgaaggtcatgaatcatactcgggccatacttgagggagtcaaagtatactttttccctgctatcctcattatgcctatccggcccgtagatcatagcccaaaagaagcccaacagggcagcagcaagcagacacagactcaccctataaagacacacacatatcctactctagatgtacattcggaagattggaccaaattggagtggcatataatatagttatatgctatagcgcatgattcggatatgatatttctaaaactgtgaatgatgcaatttttaggtggattgtttgacaaagttctatttggacaatatgatttgatattctaatctatttattttatattataagtcgttttgatttttttagttaaaagtaaatttatagaaaaatatagtagtatttccaacacaaaataagcatattactccctcccccgcattcaattagacacggtcaaatttagcacggtttccaaaattaatttttaactctaaatttatcatatattacaatgtttgtagcaacaaaatcataatcatataaaatatattcaatgttaaattcaataaaattaattgttttagatattgctaaatttttctatgatactgatctaacttaaaaaatagtttgaccaagaaaaattcaaaacaacttataatataaaataaaactgagggagtacaaattagtacggaaaacaatcacggacacagggacgcttgacggcttgagtaaagcaatcttgctaattaattcatcgtatgcggaaatacactggctgatatccaaggcaacgaaagaacaaggatcacatactgcaacaaaagaactggagtagtagaaggctagaagctagccctaccaggtgacacgcaactttcagtttatactgtacgtacggtgctttgccaccggcagtacagtagcctccaggtagcagagatgcgttgcttctctgtaacgagcattagctgttatgtcactcttcctaagcttgctttcatccatctcaagaaaacggcgttcctgcacctaatgcactaattaccctatactcagtagcagaccagagtgagaggccgagagcaatgccaggtgcaaaaaccatcttaaatcacacgcaaaaatcttgacttgacaggcagaatcattcatcatttcgtcaaaggaaaactcagctaccaccactgcactgtaaccaccgagacattcagaattaagcaacgaattcgatctgaaagtgcatgtctaggacaattaatcattagctcaaaggaattgatcagctggtgtgtttcaggcaaacaagtaaacaacagaattcagtagtacataaatatatatcagcgcgtctccatgtatagagaatcgattatataggtttgaataaacattatgcgaccgaagaacaggaagaaaaagagaaaaaagaaagtgtgacaagctcaaaacaaattaaaaggcgtttaacgatgacgacacattgaatcatttctagaagcaacagcgcatctgacttggcttagctagcagctaacatgtttctgaagcccttttttagttccacacatcattggatggttggccactccttcctaatctcaaagtagtaactcatctccaagtagcatttgccatcatcatcaacaaactgatttaacagaaaaaattacagccatggttagtaaggtaattacctcgattaacacatcagagctgaacttgatgagtttgaatacctttagtttagcagaataggaacctcttgcgaacatgccagctggggtggtctcctcttcaccctcatatgtgtagggctctagctggggactgaatgtccccagcatcaccttctggttctcaactgcaagtcagaatgcacatatatgacacatcatatgacattattggagttcattgttccatagataaaagaataccttaaatgcataattaaatttctcttaattaacatatttctttactgaagaatgtaggaaaatcctcgaataaaatgacctaatgatctaagatcagtatctaaaatggcatgtcgtcgttatatttatgaagagattgcagcacatacatgaagatcatatgggaaatttaatggaacgatcaatttgtgccgttgtttctagaaattcaagcgccattttatctgatctacaaaataaaatacgcaggttcaagtcgtgcgttgtgtgtcacctcttactccagtcttccagacagtgttggtgtacttgaggcctgacacgatgttgttggagacgatgaagctgaagcggaagctgtaagtgctcccgtccttgagcgcgaaggcgtagcccttctcgtcggggacgaacgggatcggcagtacaaggtccggcctatccggcgacaggatggtcaggttcagcaccttcacctccggctcagcagtctctgcatatccatgcgcacgcccaaaatgtcgttacagatcgcacatcaagaatgtgtcaacgaattcaggcgagaagcatatataatgatgaattggaaacaagcgtagatagatacctccaagctgttcagtatcaacctgcccgaggagttgctccttccacctcctcaggctctcatcatcctgcattcgcagaaaagttaaaactatattcagactcaattagcatcagatcaacaacaatggaggaatgcagtggattatattacgtaccttgtcgagctcgagctgctccttgagggggacctgggggccgagcacgacggcgcgcttgttgccctcctcgtcctcctcctcctcctcgacgtcgttcacgtcggggttcctgcccgacgcggtctgctcatgctccttctccttgtccttactgtccatgggcgcgcgcgcgcggccggccggttggtggtggctcgcggacggacgacggcggacggagctagcgaggtagcagcctacagattaaccgatcgatcgcgcgctgcggtgggtggcgctccgtatgtatgggtgagggggagggagcggctgggcgcgaggggtggagggccgcgggatcgatcgagcgcgcggtggtggtggtaagtacgtggtgtgcgtcgcggggggcgaggaaagggtcgtggcgtgcaggagaaacgcgcggccgcggcgggacgggagagggtgccaagtgtgcgcgcggccggcgcctccgcggcgcgcgcgcgcgggatgtccgctcgatcgatcgctcgctctctcgtcgatcttagcagcttgctcgatcgttggctcctggctgctattgtggttggcgggccttttgcgttcgagttcttcctccctctctctctctctctctctctctctctctctctctctctctctctctctctctctctctctcgtattttcccatgttacatgctctctcttgcgctccatatcctcgctcctcttcatgcaacgaacgacttcattaacgaactttaaatgatattttatcttaaattatacttatctaatatgtaatccgaatacagcgccctatttgttacaattaaatctctactagtacaaaatatcatgtaattatattctaataaaaaatgtttagatggttaaaatattgtgttttataccggacagtgaaatatttcaacagatattttattgtgacgttgcaattactaaaacgattttgctatacatcttacaagtgattttttcactagagagaaatcacccgacaaaatggatagacagtttcctttgatcatgtgacgtttgattatttttttttcgccactagtcagacgcccgatacctagctgcgtccaatgttttagaaaggttttcttcatggaaactgtagtcatcagatttattgtaggaaagcaattgattttttggaaggcatattatctccagggattcaaatcgattttacattagggggaggtgttaacagactggactctggagtttggacggtattaaggcctactcaggctctcggtccatattacaactgggcccaccaagttcgtgtacaatattgtactaggtgggctgagcaaagtcgagtcagctaccagattgggccgggccgagtagcacgaaaaccatcgcgtgcacgaccactccaaagttgctggaagtccgggacggcgatggtcgccacgcctgtgcggtggccgcgggtgctgactccggcgcacctcgccggcgccatccgccggcagaagagccccctcgacgccgtccatctctacgccgacgcgccgcggcgctacccgcgctcctcctaccgccacaacgacgccgtccactcctcgctcctcgccgcggcctccgcatcctcctccgatctcctcccctccctcctccgccgcatcctcccgtcctccccctccgccgactccctcctcgccgcctccatcccgcacctccctcccgctgccgcagtctccgtcttccgctcctccctcccatcctccctcgccccgtcttggtcacgatccttctccgccctcctccgccgcctcctctccgatggcttgcttcccgaagcggcccgtctctttgcggacttcgcggggaggccggaagtctctctagcgtcagaagacctcacctcgttgatcactggattgtgccgtgcgcggagacctgaactcgctctgcaggtgcttgatgaaatgtctaaccagtgcctcgcaccagagaaggacgcttatcgcgcgatcgtgcctgcgctctgcgatgctggcatgctcgatgaggccacacacgttctctactccatgctgtggcgcgtgtcgcagaagggatgcgacgaagatgttgtggtgtaccgggcattgctggtggcgctctgtgcggctggccgaggtgagcaggcagagattgtgttggataaggtgattaggaaagggttgaggtcctcaggtagccggcgatctctccgtgttcctatgcttgctgggcttagtattgaggatgcccaggaaatcattgatcaggcattggttgttcgaggtgggcgtactgttgcaagctttgaagttatggttattgacctctatgatgagggaagattgaatgaggcagacaatttgtttaaggagatgggcaagaaggggttcaagccaacaatatacatgtatgaggcgaagatcacttctttatgcagggaaggcaggttggatgaggctgtgaaggtgttggaggaggaattacccaagaatgatctcattccgaccgtcacaacatataacttgctaatgaggggactttgcaactcgatgcaatcaatgagggcactcagataccttggaaggatggataaacagcttggttgtgttactcggaaagagacattttcaatcttgatcagcggcttgtgttcagaaagccggttcatcgacgcagcacagattatggagaggatggttaagggtcatcatagacctgaggcaggcgaatttaacaatgtcattgaaggtttatgttctgctggtagaacatatgatgcattgctatggcttgaggagatgatcgaccatggagaaacacctgatgttcatgtttggtcttctttggtttcagcagctttaggattaggagaaggccttacaactgctgctacgcattaagtgggattgggccaagtacattctttaagcacaaaaacatcactggtttgagcgtacagaattagcctcttttgtatgtaagtgaagtaacatttttatcatcctgttatttatgcagttccaaaaggaatatctgtaagctaattatttctgcatgtagtaacaatatatcttaaatctactttagtcttaataatggttgcgatgaggaaaaacagtaagctgtttttatttactatacttaatactacatgttatgagttttgagtccactgcttagacgttaaacagagcattaacttgtcaatgtgatgtataaaaccatattgaaggttgattatattgttgccacaagatacgagttaaattaacaataaaattagcatgtggtattttgtacattacaaaattgccaggattacatcaaggcagaggtacaaaattgccaggtggctacatatctgatggatcaaccaagcagagtttacaaaattgccggatcttctccagactactaaaactgctggatcaatccaatctaacctacaatattatcgggtcatcgaagcagagctacaaaattgctggatcttctccaagcagagctgccggtctgacagaactgctaggtcttctccgagctgaactgccgggtttccaaaacaacaaggtcttttccttgcatcaaacctatagatagatagccccatgtccctcgcttgttggccaggaaaattgctcgggaacttggcggcggcggtggcaacatcagttgaatccggcggccatccagcgtccaaaattgccgggtttcaccgtattgcgacggctactctagaccttactgcagatcactcagtccaatagcacgtcgaagttgcatccaaagtcgaagccatcggccagatcactgagataatgcagctcctcgaggccggaagaatgctgggaggcgtcggagcactggaggagatcgtcaatggagaactccgtctcgtcgcagccggccacgttcgtgacgatgctctcgtcactgcccgtggcgatgaactggacgggcgcgtccatgaagttgtcgctggtgctggtggtttggtaatcgaacacggttgtgtcgatgtagttgccgtcgatgtcgcactcgatgtcgatgtaggggtgaccagctgatggcacgatggcgttgcacggctcgccgtcgttgccccatgtgccggccggattgtgccagcagccgttggccgccggcgccggcgccggctgcatttggttgccgtagacgccaatgcccatgtaggggtcaccaaatgatggcacgatggctttgcacggctcgccgccgtcgtagccccacgtgcccggatcgtgccacccgccgttggccgccggtgccggctgcatctggttgccgtagacgtcgttgccggcgatgtccatgtaggggtcaccagctgatggcacgatggcgtcgcagggctcgccgttgccgtcgacgacattgttgtaccagcattggaggttgccgtacacgggctggacgaaggtggcgttgcatggctggaagcctccccacgcgagccggctgtggttgttgctgccattgcccggcatctgcatctgcagctggtagccgctcatgtccacggcgccatggccgcccatgtactgggcgttgttgtaccctggctgcatcagcgtcacgccggcgttgtacggatggaaggggtcacatgtcgccggtgcatgcacctcctggtgctggtagccgtgtacgccgacggagttggttccggcgacgtcggcgtcgcgccgccggccgccgccgtccgcgtcgtcgtcggcgccgggcagcaacccgagcgcctcccgcctcttggccgtagccagcagcgtggcgtcgatggacgcgagcagctgctgcagctcgtcctgggacatcccgtccagcacggcgtccggcgggtcgagctcgccggggcggcccttctgccgcagcctggcgagcttggccctctccttgtcgagctcctcctggaggtaagccacgtgcgtgtgcctcgcccgcttctccgccggcagcgcgcggtacctctcgatggcgtcgccgccctccggcgacacccacacggtcggcgcgccgccgtcgggcccggcgcacacgacggcgacggggatgtcgcacagcgtggcgagctccccggccttcttgatcagccccgccttccgcttcttgtaggtcgtagcgcgcgtctgcgggttcgcgatgagggctatggatgtcttccggcgagacatcgctggagacgggagtcgatcgatctcgatggcgaggagacgacgggtggattttatgtggtagtacgtgcgcattatcccagtccgattcggacttcgtatcggcgaaaatctgagtccgcattggattttgttgcagatcacgtatatggatcagacggcgccctgtactcggctccaggctcacccttgcctgtgcgactatggctcagttctaaccccaaacttcaacttcctcatttttttttgttagtttcaagcttataattattaatgcttgtgctaatgaggtttaaatctgtcttcaaagggactgcctatacatttgtcgacaaaattttcaccaaaaaattgacagatgtaattataatataatcgtagtgtaattacactataacttatatgtaactacactgtaacttacatgtaactacagtgtaacttatatgtaagtgtcacataattttgaatcgttagatctattacacgatttgttttggtgaggaagaaaacaaatcatagcacacacatatatgaaagaatttgttcccacgacctccattttaccgaaataacatgttacggagagatttttgaaagttacatacaagttacactataggtacagtgtaattacatacaagttacagtgtaattacactacaattgtactgtaattacatacaagttacagtgtaattacactacaattatactgtaattacatttgtcaaatttttggagaaaaatttgtcgacaaatgtataacaaaatcggtcttgaaaacggacgatcgaaagcacctctctccggatagtccggtgagcccacaccaccgttaaggcgttaggtatcgtgaggcccttcctttaactttgcaacgcgtatcctattcgatctgttctgatgcctcctaattttgctatcttgacaagatttcgattaagatttataacgagctacgatcagtggaggtgcataatggaaagcgtatttattattattattatcatcatcacattcatttttttttgaacggacatcatcacattcaatcgagtccaaacagtaatcagtttccattacttccatatcagcacacaatgtacatacatctctttctaacacccaaacccttgggagaaatttattgaggctagttgtttttcaagcgatgcagttcacgccaaggcaccctcctagcaaattcctcagcaacttcttctgcagcacaaacaaaagattataattagattaggaaaaaaatcgcagtcaagttcaactagatctccctgaaatttacagtccaactttaatctcgattaataagctccaagtgttctacaaatgcactacttaagctttttgaacaaaaagggtagtgtgtgagtgttgctattatcctaagaaaagctaattgcaaaggctcagcttatctcaaaaaaggtttgtgtcaatcacatgatagtactagaaggtaactaaagtaaaagccacttggtcatcacacacaagggcccagcaaagatgcacagattttggaacaaaacacaattacagtgtactactacttgccttcttcaccctgcagattagctttggtgagatcttgtacaggtcctcatccactgccgtctttggcttccacttctgctgctcattcagatactgctgcttccttcctccctttctcacacgcacagcattcgcattcgcattcgcgttttctttctcccctttcactcgaacaacgcactgcattttggtcacgaaatcatcagtctaaccgtttgttcttttgcagcaacgctatgacttaaaactgaactaaactgatatgataatagttaggtgaagaagactgaagaaaagttcaagttttttttttgtcagaccttcttgtagttgtaggggttggcagggaactggggcaccttgaagaggtcctcatctttctctgcttgtgctgtgaagaagaaagtccctgactcgaagtattgggtgacgggcatatcatcccatatattccagtcgccgaacgccgggatttggcgccacttgcagtcatcgagcgcctgtcagagaatggaacaatctttactgttaacttatctctgtaagcaactcatcctacatatatgtttgtgaaaaacagaaaagatatgcaggaagcagggacgttgataaagaggcatctgagaactgaatctttgagtcaacctctcattggataaggaaaactttgaggtgatcaggagattcagaaaatcagaacagtatatgccaatgcagcagaacatcacccgttcttttctccctagaaaaggctctactattaagagcagtacaaacaccacatctctacatggcaaaaaaaaggatccaaggctagatagtagaacacaagctagttttgccacaagaagccaagaactgagatagagattagtgaagaagagaaaggcaacgaaatgcaaagcatttctccatggctcacctccataacgcagtgacagaaaagaatcagatcgcgaagaggaggaggagacgaagaagacgatcgatgactcccaacgatttcaggagacaggtgagcagcagcaacggctcagtggtcaaagctgtagtggagcttgctagctaggcattggtcagtagcaacacggccgcatgcagatgagcaagggagctggtggctgtgtgcatgtatacatagccacgcgaaaaagctcgaggaggagagggggtaaagagaatgtgggggcacacacgtaccgaaactttgcagaaagcccacaagaaagcaagcgcccaaagcagccaagcagggcagtgtgtttagctgttactgaaccgaggcaatgagtgctgcactgccagtctgctactgctgcttgcttcacgctcgtacgctctcatctcacgcaccaccctattacctattactcccacataataggtgacgtttttgactttttatttgcaatgtttgaccattcattttatttgaaaaattagtgcaaatataaaaaaagataagtcatatgtaaagtacttttgataataaagcaaatgacaaacaaaataaataataatttcaaaattttttaaataagatgaatgatcaaacattgataaacaaaaactcgaaaagacaattaatatgggacggaggtattaccccttggcccttgctttacgagtttagtgtctttagtgcagtcataatactgttcatcctgtcccatcttgctcgctcactcttgtcaaggcccatgcttacttcgtttcaaaataaattaacttttacacataaatctaaatagaaggctatacttatatttgtgtaaaacttttttctaaataaagagtattttcagcttatcagcccgatatcattacagattattcatgccatgcatataaaacacggtttcttctgaaaactttctatgcaagcattatttataccaattattataggccatttgttatatttataagatatatggtttgtttggacgatggaaaataaaaatgatttcccgccattaaaagataactttaagttctagccatccaattttaccacatcatttcatccaagccctcatttctctctttttttttttgagtaaatttcacaaaactacaggtattttgaccaaattatcacaaaactacagatttaaggagttatatcacaaaactacatatttaacaccaaatttatcacaaaactacatattttaggttaaatatcacaaaaatgcatatttaatattgaacttatcacaaaactacaacttttggagtttaaatccttagcacccttgttatggtggagctataaacattattactttgtgattaaattggttctaaacctgtagttttgtgataatttagttactaaacatgtagttttgtgatacttcatcttaaatgtgtagttttgtgataaatttagtgttaaatgtgtagttttgtgataatttagtcatactatctatagttttctgaaatttactctctttttttcatgtcccgttatcccaacagacccataatatttaattctttcctacagataagcaagtagattatccactagtttctcatcccatctgcattattttacctaaaaagagcagcactctgtgtaaacacctctctatctgttaccacctgtcaacctctgagagggagagtggcagtaaaggtggtggcttttgggagcaagtcctggggctgtatgatgatggcaaacaatgagtgtgcgtgtccgatgcttttgtcacgcactgaccgggtgatagtcgatggagggccggggcggtggtcgtcccggccggccgcccggtcggcagcgcctgcccgcggccgggctgcggctggactcgaggacacgcatgtttagcgagaaagcagcgaaaggtggccgcttttctttccaaccatggccaaatcacaatgattccttggttggccggccccccctctgcacgctttgcccgcgccatgcgcctttaatttcccacccccctgcctttttcaccacttcgccattacggtgaccaggtccaggctttgattacagccgtgacgaaacctgcgtaatcttgtgtacttttgggtgtgttctttctccctttcctaatttctatagtactagcttgctttttgtgcgtacgcttttcaaactattaaatattattataattgctttgaaatcatagtaatctattttaatttttttaattagtacttaattaattatatactgatctgtttcttttttacaagtgtgaaggattagtttataatccactatacgaacacagtattaccgtggcatttggcgcttcctaactccaaagcttgtaaacggtgattttcctaaaaagaaagttatataaaatattctttaaatactttttagaatatcttttacgtttataagagttaattattaatttgtttatactctcagataactatagaaaaatcatcaatttcagctatctcaagcagtgcctaactgcctacttacctgtggctctgggctgtcatttcgataggaaaggagaaagttctgtacttagtagtactagtagatggaagaactagtacattacttattacggaaaacaagttacgaattgctgctgattagctcgtgtgtgtatagtcgtcgtacgttgagtatgagtcaggtgcgtgaggtcttgtactcttgtgtatgatgtgtgtcatgacccttttctgaaagtcattcggtgtgccactactagtcagttcgccagagcatgtatggtggtactatggtatgatgctgaagttacatgatggtggtactcggtagtacttgggtataataatacattcttggtaaagagaggagttcatgattatgtatgtatgatcaccccattggcaccatgtattaccacgcaatcagttaaagcaactttaatttagccaagttggtattactacctgcaaatgctttggatttttcatgtattgaggtttcaaattaggctatatactgcaccacaaactacaaagtttacaaaaggaattacttctggccggtctcagcaaagcaaatggaagcttaagtttactgctaatctaatctaaagttgttcttcagaaaacaaaaatctaatgtaaagttgtctacctaaagttacatagagcaatgatccgggccatgtacatgtggatacatctatatgggcctttttgttgggccagctaagaacctttcggaatctgctttgacaaagacaggtgcttaggaacctggcgaaaattttatacttcacggcccacatatatagctacccaacatcttcttccccttctttttccactttatctttctccaaattttaacatgtcttctcctccttttgattaaaagtttacagcctctctgtttaggcttttgatgtaccctctcctaatctttttttttaccttctttttgatgggtaggcctcctaatcttaggtacagtgacagtgcagagtgtcacaagtgacatctagatctgcttttcttgccagctatagctgctgcaggcagctgtagctaacagtaattaagcttctgatggttctcatctaccctactttgtgtaggtaatagacatggtcaatttgactttcttgttgtccattccatggcagagcataacatggggcaccgggaccactgctgtgatgcaaccccctgctttcgtttttggttttctcggttctgaagtttgaacaaaagctgtagcagtgtaaccgattattaatctgcagaggctgcaatgcagttctaagtcaccaggttatcaaacagtaacagtaatagaactgcatctgcatagttagagacacaaatcctagcagtatagtacaatactgtagtggagtagtagttacagtgagcatcagagcatcagttgcaacttgcaagccaaacattcatcagttagatcagtctgccttagtaatcatgagtttgacaggcatttcatcatgccaagatatgattataataattctgtaatgcaaagtgtcacagccaaaataggacttttgtgcatattctcccactcaaacaaaagaagacataatatagtttggtgatcagaaagaacataaaaaaaatcagaattggtcacgtctaaggtggtgtttacatccagggacttaacttaagtccctgtctttagacactaatttagagtattaaatatagactacttacaaaactaattacataaataaaagctaattcacgagacaaattttttaagcctaattaatctataattagagaatgtttaatgtagcatcacataggctaatcatggattaattaggctcattagattcgtctcgcaaattagtccaagattatggataggttttattaatagtctatatttaatatttataattaattttcaaacatacaatgtgatagggacttaaaagttttagtcccatctaaacagggcctaagattataaccactagcactcaggccaggccaacaaactgtcacagcctcacaggaatgcagataggttactttttacttcacttggcccggtccatgtcccattcccggacggaaaactcttttaatcactactagtaagtggatatccacccgttgattattatatcacctgaatagttacaaaaatattttaaaaaataataaaatagatcaatatgtaatatatcactccacaaacatgtaagttaaaatttaactttctataaattgtaatgaaaataacaaataaaactcaaatcagtatagatatatttgcagttaaatttgttatttttgttaagactcttataaaatttgaatttgaacttacatgtttatagagtgatatattacatatcaatttatcttgttaatttttttaaaaattgtttcataatcatttagttgacataaaataaaaagatagacgttcactcacgtgattagaatccatctccgaccgaccgcacatacaaagaaactcctacttggcgcagaacggcggccaactccagtccaattctaacccgaggccccgccgctgcatgccaccatcggctttcccgccggtacggccttgcgcccagcagcatgcacatggacacatgcaattgcaaacgcagcgcgcatgtgcaacaacgcgagcagcaatatatgagtatctcatcaaatcgtacgcgcgcctgcatgcatatggccggagccgtgtcttcacggccggcgacaagccggcgagcacatggacgcacgtcgtcacgggtcgccacggcgcgcgtgagatcccccatgtacgtacactctctatatatacaaggacatcgattgacagtacacatcgtagcctgcatcaacgcagagatcgatcgatcacaagaacagtaataagctagctaccgcaccaacagttaataagacatggccggcgggaagaaggcggcggtggcggtgctgctcgtggtgatggtggttgtgtcgttgtcggcggtggcgccggcggccgccgcaggtgcgccgttcatggtgtgtggcgtggacgcggaccggatggcggcggattgcgggtcgtactgcagggccgggagcagggagcgggcgccgcggcgggagtgctgcgacgcggtgaggggcgccgacttcaagtgcctgtgcaagtaccgcgacgagctgcgggtcatgggcaacatcgacgccgcccgcgccatgcagatcccgtccaagtgccgcatcaagggcgcgcccaagtcgtgctagagatctagctagctagcttcagttacgagccaatagctagctagctaagctcccgacttaattaattagtttcaaataatcaatggtccagtaagatttgtactcaatatttgcttcttggtttgtcacagtatttcatttggtattgtcaaactatatactccctccgtccctaaatatttaacaccgttaacttttttaaacatgtttgatcgttcgtcttatttaaactacaacatatatatatatatacctagaatcaaaatctaacaaaaacaagttcaaattcagttcaaacttgctttaaactagttagtaaagtagttaatgttaatacctaagtaattgaaaaagtttcatactcatttgaattgggtatatactcaatttcaacaatgatgcccgggcaccatggagcaccaaacaaatttactatatatatatatatatatatatatatatatatatcatggaactttttggtttgcagtatatatggggactgctatatcacgagatcgtgtttgaacaagataataacaactacatagactattagtgatatctattaagtatcgatacttgtgaggtattaaggaccttaataggtatcgaatgatatccatcggtactagatctagtaccccattggtacttgttgatacccgttaataccactcgatactcgtcgatatcaggatgatagcaattggtaccagacctgaggaagagagagaagaaggaagccacgacattgtcggtagggctaggtcaagagcctaggacaactcaaggatgacgaatagcctgggaggaggagcaactaggaggcgaagaggatgtcggtaatgacgaggagctcgctattgcacataaggagcggatctaccttgacaatgcgctttgcaaactacttgcaaccaacgaggagcttccccatgatctccaaccaactgcatatttacaaaccatatatatcagtattatgcctgtttcaatttgtacatgtcaaattaaacctatatatttgtagaatttgtagagtgatgtgtcattgatatgcattgaaaaccttttataaactattaagaccacacaaacgataactcatctccttaagagacaatgataacttatcaccgtcagcacccacaggagtgatagatccgcccagtccaaggatgacgggagtggcggtctcggactgggcagatccgccgccagtgcccataggagtggaagatctacccagtccgaagacggtgggtgtgatagcggtggcctcggatggcgggagcaacctcgaactaagtggatccgccatgggatagcggtggcccattggagcggttgatccgcccaatgggagcggttgatccgcccaatccgaccggcagctggaacgacgatggcggtgccggctgtgacaacgacgacggccacggtgacgacttcaggtgcaacggtaatgatggtggctttggctgtggcgatgatggtggtggctccgatgacgttggtagcttcaggagctatggtttcgactgaattagttttttggaattttattttttttcactgaaattgttttcacagacagacaacatatgtgcccacgtacgaaaaccccatatttgcacgctgttgcgcgcgctgcatatatgaaaatgtgttgattttggaatacacctaaatgcagctggctgcgcatcacccacatatgaaaatggattttggtcatctgcgaaaatcgtttttaagtagtaccctacctttttagcgatttctgctccgtcctgctgctaccgcgtacatatacagtaccgcctgaatctggtggccgccgcacgttccattcgcgccgaccatgaattaacttgttctaacaccgcgccgtccttgctctgatcgaagctctgaacaccacccagccagccggtcggtcgacgaacctgggtaaataacagccacttgatccacacaagatggcactccacacagatacgtccaactaaaattccagcctcctccgtcttgcccattggctgattggcttcgcgctgcagtcctcacatagggcatgtttgtgcagcttctaagcagcttttcatccagattctgagaagctgtagttataaaatttaaaaaatgaactaaaagccaaaagcggagaaactcagcttttctagattatgataagctggctactaatcagctgcttctcagaatattaagctctctaaatatgccgatagagtactgtaccgtaatacagacatgcatttcaccgtacgtgcctgcagtagcagacatgcacatgtacagatgtactagcgcagttgcgctacctgcatgcgtatatacgaccgtgtgcatgcatatgcatggcccgggaatccacggcgtctcgtgaacgtgccgacgcgatttgatctgagctttgcccatgagtccgtgacatagctagctaatggagacaaagctagcgcgcgagcacatgcacgtcacgggccgcgctaacttacccccacgctatataagccgaccgtatatagccatcttagctacgtaccacacaacgtacacacgacgaacccccacgacgcacttagctaagctagcgtatagtctctgatcgatccgatctccgacgacgacgacgacgatggccggtaaagtaagcgcggtggtgctggtggcgttggtggtggtggcggcggcggcgggcggcgcggccgggctgtcgatgtgcggcgtcgaccggtcggccgtggcgctgtgccggtcgtactgcacggtggggagcgcggagaaggcgccgacgaaggagtgctgcaaggcggtggcgaacgccgacttccagtgcctctgcgaccgcagggacatgctccgcaacctggagaacatcgacgccgaccgcgccacgcagatcccgtccaagtgcggcgtccccggggcctcctccagctgcaagtaatttacattaggtgatcgagatgatcactctagctagccagctgcaaaatcacactctagctagctagatgatcgatgatcgatgatcactagtgtgtttctagtggttaaataagtattgttggttggttaattaggggggggctaagtatgtgatcgatcgattgctagtagtggccgtgttatgtcaggccatcgtcgcgtcagctggatcttattttgttctgttgttttgagtagttcacgttctgaatgtcgccaggctagctgacatgtgctcgtgttgctcttgcatatatgcatggcgcagtctgcctgtctctatgtatcaatcttgtgattctcttgtacgtcattgctgtgtgtctaccttaatcgtgttctcataataaattttgctgcttgttttgatctaataattttgctatcttgtatatctgaaattggcccaggaagcattactgattaaacaatggcgagattaattggatgtttcagttggctaaaatcaaaattttcccatttttgcatgaatttatcaaaattcttgtttccatatataatttcttcgtgacatgcaacgtaagaaaatcataaggtatttagtagcagcaacataagaagaagaaatcaattccttggaatttccccaaatgtgttgtctaaaataaatttgcatggaattttcttttgataatctctaccaaattgcatgaaattcttgagatttctgatctctgaaatttcagaatgccccaaaatttggaacatcagttatgggcgaaaattcattatgtgtccatgaaattgtgaccaatcccttctatacctccaagttttgtccacttccttatatgcattttttttttttgtgcatcacttccttatatgcatttgaatgttggttttgatcccttttggacccattttgttagtagaccatttaattcctataaaactgttcattttgtccttatgtataaagaaatatgaaattttgtatagtttattgttgttggaagtatataaggttgttatagaagactattatattcatgacttcattgcacgaggtatattcatggtaatgtttatttttacatattgatagaaaaggtttaatatttattttatttctttattaaaagagtatgcgcagtatatttgtgtgatgctagttttgttgaatattatatgaaaggaatgctatccaaaactatgtttaccattttagaaaatgctctctctctctctctctctctctatatatatatatatatatatatatatatatatatatatatatatatatatatatatatatatatatatatatatatatatatatataatattatataaaacttcgatgtataatactttctcatacaacaaacttatgaatattacaaccacacaacaaattactatattcccaataatagatacaaatttctacatactccttgcacgtccaaggttaaaagcgatattttttacactattaaacagacaactaatggtgaattgatgggaaggctgtggaagggatcaaaaccaaaatataggagtatacaaaggagtgaagaaaattcaagggtatagaaaagattggctaagatttaagaggaattgaaggaattatctctttttctatttgttggaagcatgtaaaacacctactacttctgtgcaatcctattaattgggccagcacatggacacggggggaaggaaagatgtccccaatctcccaacatggacctattgactgttgaaaaataactcactcgtgtcctccagattaaggggatctctagaacgatgtgctatcactcgtaaccttgtaacaaattggttaggcccactatgcatgttgttcattgatagggcccatagtcaatggacaatgctacaagcctacaatggctcgattcgaagagcgtatggcacaggatttaccaggaatacatacttgcgaggtaatttataaaatgtatctctacaagtccaaagtctatgagtatgtccttcgatgtcgttgagacgttgattgtaaactcaagttgagacgttgttacatagaagtaacggactcaacatcaagcaattcataatgaactaaggccctatttgtttcagcttatgattattataatctagattattaagccagattactataagctggattataataagctagcatagaataagctgtgagttgtttgtttgtctggattattgaaggcatggattattgggtttgaaaagctaaagtctataatgccctcaactatatgttcggttgatggcataggtgggtaatttttctcaagtatgtaggggtagtgggtctttagccactcaataatctgaaaaaagctcctctagagcagcttatcagattataataatctgctataataatctacttgtttgtttcagtttactcctaataagctagattataataatcctaagctgaatcaaacagggcctaaatatcatgaaatcccttggagtacccatatgatgaaatctcctttgatgtcgactgggcactctctctcttttggagctcctctccttctctgtggcgagctatatgcctatataggtagagtggagaagatggtcggtcaatagcgaaaggctcgggctaccaagacgatatcgcctaattctagactctccttggctagatctggcaaggtggctagtagacagcgggtggggcggaggagacctaagctagtgcacaaaagtggcgacagggtgcgctggtggtcttgttggtggtaggactagaaatcagcccgcggaagggtgttggtttggtgtggtggagggcgcatgctgtgaacatttggatggtggagcctaagatagtgagtgacataccacaatgatacgattgtacagggttccaagcgaaagcctaggctgatgatttgttgggctaatagcgggtacacctttgggcatggtaatccccttgtggcactgttgaggtacctccttcctccctatcttgacaagaatttttaagtgaaaaccatgtctaggttccttggatgggtgacggcagcatccttggcatcgcaaccttcgtggtgactttttttttggagactccgctatgtggctatgtggtactgttgtaggcctaacgacaatcggccatgcatagcgatgacaggtttggtgcctgactcccctcttagtagcatgtgtttgtgtggttggcacatggttcctaggtgtaccaactgcccacgtgtgctctggtacatgaacaatctcaatagccttctgttgattacagtatttcttgaaactttttccctcgatcttaataacatttggattgagcactgataatctattagactttgttcgacaggatcctcaaatttgacaaggacctccgtggtaaccttgagttagatccagtgaagcaaccaacatttctgcgactcaactctaaatctcaattagtgccgaatccgtgaaagtagccataggaatcgttgacatgtcaagagggaagcacgtctatagaggccctagaatatgatagtcgcggcaatgccacaagtccccaacgattgcatcttttattggtgcatggttctccatgcaatctggaattttgcttccttcattcagtgtttttagaaggatggttctccaagtttattggtgtaatccttttgctaggcgatgtatcagggaatatatttcccgcttatatactttttcctcaagctttaaatacattttatgagtcctagaaaaaaaatatttggatgcctttttcttacgggttgattccgtcatcccgtaaggttacaccacgctattctagttacagaaagaatacttcgagggtctacctatagtgttcctttcttcctaaaaaaagcctcctatatatttggcgaatatttttaatactgaactgtaattaacgcgtagtgttaattagtgtaactttcggtactagatcatattcttaggtgctagaagggacacgtacctgcagggccgtgaagaaccccagttgggggaaccacagccaatcatctctgactcatcccagcaaccgtgaatcagctcagggaaaaactgcggaaaaacgtaatcacatatcaatgtcctatgctagtagcctgtggttgtgcaacatttcagcactctacgacatgcagaatcagacaaaaagggaaagaaggcaagtccctacaggcttcaacgcgtgaactcgaccataaaattcagtaacttctcacaggcagtaagaatttttacgcaccgaatgcttcattgcgtgcaaacatgccctgacctggaaaatcagaagcttgcagtccgcttgaaaaaacaatattgttgttagtttgaccaagtttagatccagttgctgtctcgtgactcggtgaccatcaccagcatctcctagtggtgactgcttcggaactgaaagcaacaagagctaaacattgcccatatccaccacgaccaacatctttagaaaaagaaatagactgatgcaccgcagatcagagcttccatcaattgctttctgcaagatatccaaactgttcatagtacggctctgatagtctgattctctgaatgttgtcccaagatccaggtgcagcccatgccgtcgtgtaacaggcggtaagtgccagtgatgaacaaacaagaggtaaccggccgcagaaagccagaaatgcaagaaccaagcatctccgtctcattgctttctcgcccatcctctgccaccccaatagtgcactgcatacaacttttatataaccagatgacacgccgtgcctgaatgcttctgcatcttcttttactgaataagttccaccgctgcttagattcgctgactgtatccgctgctcggatgttccatgattgctacaaataattgtcccctctttctacatgccctagttctgtagaacaaaaagaacaaagagggtgaattaaatggccaaaaaagcatgatatttgactattcatgttcaaaatgaagcaaataattacagaaaatacgatgcagaagagcacatgtataacggacaaggtggtgcaattgaaataatgcaagtttcagacacctctgctgtgattttatcctgtgtgcgcgtgcataccagggagatgagccatctggtggtctccgcagtccccactgctccccttctcgctatacaacactgtctgcatggtatggcacagggatatgcatatgcctggcatgagcagagccacaggggtgggcaggcacacacacaagagccattgcaccagcctccgatttatatagtctccagcatttgctccccttgtgttgcttctctaatccaggcacaccaccatcctcccattctctatccatttgtttgaagaagggttatggccaatgcttgccccacatctaccacaagctccttgcccctcttcttcctcttctgtttcctgctcttcagtcatgctcgttgcaatcaagggcaccatggcagcatctcaggtacccctttgcatcagattgatatcttgtcttttcttctgttctcctgcatctattaactgtgatttaggttgacatgataaaacctatgtatttaaatgtttcaatttcatatgatgtcaaggtacagactatggagaacaatatcctcaccaaacattacctgaagaacatatacatttgcaggagaacatcaaggtacatatgccatcttgctattacaaagtatgtaattaattgagttttgtgtttttctgttcctcaagtatgttttcttaaaactttagttttatgttttattatgttcattatatatgtcaaggaaaaaagctttcccccaactgtcagcttccttggcgcataccatatagttctggatggacttttcagtaggaagaaatggttgcatctatcaactgtgcactgcttggcatcttttgctaggatgagaaaatgattggtagcaacttgcctcccatcttttctcctaaagtagtatgaaaagacttaagaacaagaccaaacaaacatgaatgccaaagttaaatcagaaagtatgtaaatatctggaagatactatggttaagatgatcttcaaatgtatgccattaggttctaaacaaggagaggctgcccaaatatgcaaggagaatgttgattggttcgactgctccaatatgcacatacaacgagtgcagagggtgtcgattcaagtgtactgccgagcaggtcccagtggatgcaaatgaccccatgaatagtgcttaccactacaaatgtgtttgccacaggtgatcattaataattaagaggagcttctgttatgagtagtagtttgcatccattttattctctttttcccccttctacccttctaggctcaaaaggttcattttttccccttttgttttaacaagtggccagctagtagaggattagagggcattttgtattttaagatgttcaggttgtggactggtaattttggaagtaaatgttaaaaaatttgaaaaacagcttatttatactattgtgcagacaaaatgttccttgcttacgtattgcaccactgtttttagtctatgaacaaacctcgatagagttgtctgccagaatagccttggagctctcagctggatcatctggaactagtggtctgcaactgtgctagcctttcaaggcatataaatgtggtaaatgttctattgcatttgaaatttctcagtaccttcttcattctgggctgcttcagctctcatgggcttttgtcattcgtctttccatagtaacaaccatctgtacaatgagcagtaaattcatctagacaaatcacagaagaagttaaccaagagtaagggtaagcaataaagaagactttcgtgcagaccacactccttcattgaagtagacattgcattctaaattcaatcgagcagatatgtatgaggaaattgccaagactcagacaatcacatgcacactgaccttaaagttaccaagtaaacttatcaatagtattccagtaaaaagaatcaatagtagttcaaaaatatcaattgaaaccgtttcagtccaaacagggcatttattttgcaagcagagagcttgcagaggtgccttgtatttattcaacaaaatatttttagaggaattgtcttggtaagaaacacttattagctaacttcttttactggaggtgtaaggacaagagtaactcatgcttattagaggatactgacaaacgtagtcacattcagacagtactttccttttgcaagaagtgttctcttcagttttttttacccaagtcacataaattactacagtcttttataagccactgctcacccaatatactccgtagaagttttgcttgtgcatgagtgtgtgacatgactgtcaagctgcggctgcaactagagtgagacgagcaggtagcagaactatggtgatttgactgattggccacctaggatggctacgccaggtcttgtataatctatatatatggtttaccgaacaccgagatatgcacagataattatggtgttttatggtgtctgcttgaacattattcaattagtgaacaaaggaactggtgagcatgtgtccaaagaaatatatagtaatgtctcagttgactgaaaaacttcataacttcctagttcttatgcacacaaaaatcaaaagcccttctgggtgggagtgggacacatatactaattcttttattcagttggtaataggatacttgaagtcttgagctaagaaatagactgagcaactatttcaaacatggccagctcctatagtgtgacaggtgatgtgtacaagcccccagaactcaactttataaatggtcagccttgcagcaatggagacaaactctgcaagcaagtaaatcacactatttctgaccgattacatgtgaagataataacttcaacacaataacacatattcctattgtagcttcaaaaattcaagtggcttaaggaccagcattgctaatctcataatgagaaaaaaaggaaaatactagtagagtggtattctgagagtgacacaagagggaagatgcatatggtacaaggaacgaaagctgccacttagtggcctgtggctctaccgctccagtgctaccctttggaggtaccgtggtagaatgaggtcaccatttttcttaagaataggtcgtagttgctttctgtgaggtggtcctgcgtgcaaggaagaaggcattcacatggaagcaagcaggaggatccatctcgagctgttttgttttgcatgacagaagatggcagaatggtcccagtacgttggcacacgggtcatgcaccaaggttgacgtgaccacaacaccaagcatcatagccttgcaggctgtagcacctccgtatctccatggtgttcataattgttagtgccactaaaatataccctaaattagaatatgcttctagatcaggagcatacaggacaggctaattattttgacatcacgagtagatattctgggaaaagggatgtcatggaatagaagagatgtgtcatgcggaagcaaatcataggattggcgcaagctcaatggcataagaggttttctcatgtctaaatgtcagttactactatattttgcatgcggctaaattccattttcatcaacaataattagatggaatgtagaaaggaaaggaaagtaacttacagtattatatgcatattattcgacaccttcagccttaattccaacaaagtaaaaagatcaacgcagcagaggttcagactttagaggcttcttagtcaggattgaaattgtggttcagcctgaaatcatttcaaaaaatttcatgatcagaaagctgcagaaccacgctttttcaatatacccactgagacagatttcatagtaaacattagcaggatcatagcttcttagctcaaccatatgtttctagtacatatggaatctgaaaaataaaatgctatttaccatgtgaaagtaaaaaagaaacagatacgatggatcactccatggatgccaaagaactatatatgtttgggaactttgaatgagcctgcaactgaatcaagcaaaatgaaaaaaacaaagagcaccactatctgagtaactaagcgcctgcttgggctggaaaaacttatactatagtttgcttccatcagggtgcttaactacctggtacgattttcaaccttgtcgcaatctccaagttccttggcgaaaaaagccaaagttccaaacctccaaaacaacacttcatgttcctgaaccaaggaagccgggtaataatcaggagaactaactggaatacgaacacaaaaaagggcaacacagtacgtacttggataccttttcagtttgacttatcaagaaactcacaatggcaaacactcatcgttcagcttcagggggaaaaaaagcttaacaaactgggatataatgatgtttcaaaagctccctccagaattatagcgtcccatgtcaagaatgtcaaatcaatgaacagacacgataacaaaggatttggcacatttggtacacaacaaaggatcaaatagatgctgctatgttagataaattccacagcgtcaagtaaatttcctccttgtggggatgtgaactacctccattcacaaactcatgaatttgtccatccacctcaatcacactccgtccaatgttctttttcataccctcagcactcatcaacttcctaatcctgaaaacatcatcccacattccttcatcagcatagatattggacagaagaacatagactccagagtcatctgctccgagactggccagacgctcaactgatagctcagccagctccacacacctatggcttcggcaggaagcaagaagagatccccataattcaggagtcggttccatcggcattgtctctattgtgtttctagcctgatccactcgtccagcacggccaaggagatcaatcaatgcaccataatgttccaccttaggttctagtcctaaatccttctccattctgtaaaatatccccaaaccctctgagactaacccagcatgcgtgcaagaagtcaacacagcaagtatgctaagatcatccattggtgccctttcagtttccatttggttaaaaagcttgatggcatcaagtccataaccatgagttccaagtccaacaatcatcacattccaagtgaccacactcttcttgggcatgctttcaaagatcaatttggcaagatccaaacgaccgcatttcacgtacatatctatcaaagctgtttgcaccacaacatcgaacaacaccttcttcttctccaagtatgagtgcagccacctgccttgctccagagctcccagctgtgcacaagctgcaacagccccaactgcagctactctatcaggcttgataccacatcttagcatcctctggaaaaactccaaagcttcatttggctccccgaatctgacatagccatcgatgacaatactccatgagatcacattcctctcaggcatctcctcgaacagaaccctcgcttcatccattctcccatgcctggcataaccatcaatcatggagttccagcacaccaaatccctgtcaggcatttgatcaaacaactcacgtgcacgatctacaccacctgccatctctccgtacccatcgatcatggtggcccaggagaacgcatccctctgccgcatttcgtcgaacaaatcctgcgccagatccacctccccacacccaacgtaccccgccaccatagagttccaggagacgaggtcccgcacgccgtgatcgaacaccttcctcccggaacggcagtccccgatcctgcagtagaagctaatcagcgcgttcctcgtgaacaggtcggcgtccaaccccgtcctcaccgcctcgccgtgcaccaccaaccccaccctacacccgggcgcgcagccgcacgccttgagcacggccgggaacgtgtaggcgtcgggcgccacggcggctcgccgcatgcgcgagaagtagaggagggatctccgcgggctcgcggcggcgtggaggcggacgagggtgttccaggggaacgcgtggcgggaggcttcctccgcgaggtgggcgaagacggagtcggcgtggtcggcggcggagggggaggcggaggcggaggcgagggcgaggaggaggaggttggagaggcgggccggggaggcggcgaggtggccggaggtgaggaggagggcgtggcactggagcgcgtgggaggcggagctgcaggcgcggaggcgggagaggagcgtggcgagggcgtgaggaggacgacgacgagacatggcaaagtttgatttgggacgacgaggaagcagttacaaaacgactcgtttgtacatgaactctagcctcggcccctgggtcattttccagatgggccgtacctaaaatgatcagttgggccgaaaagaagggcaattatggttcattttgaatttcttgattcaaaaatggtagtggtggacatgctgcactctcatgtgtaaatgttactgctagctacttaaagtttactacatccgtcctagaatataacaacttttagctataaatctgaacacacagttgttcagattcatagctaaaaatatttacattttgggacggatggagtacttaagggcagtagccagtagattagaggatcaggttccattcagagtgtatgaatcgctgttggttcttatagaaaacaaaactgatttatgtcaaattctagtgagaatactgtgaatttcatggttccatctagagaattagccctgattataatgtgagactttgcattgactaataaaatacctgcttgttataacggatttctaattatatgtcttaagttgttagcttaaaaatactcagaaaaaaaacatatagaattacaagcaaatatccaaccaaaaagtttaagccacatgcacaaaaagaccatttatccatccttaaaaaatcatatcaactctagatgatgttagattcatcatcatcactagattattttacatagtagatatacggaagatggattgtttggtgtgaaattcttgcggaatttgtacgaaactcataaacccgcacgtttacatgggtaatatagatttagggacaattcagattaataccatttcaaatcataccaagttgtcaacgatgtacatacattaatttttttccaaactttgataaatactacataaaaaattctgtcgaaattttaataatatcatcgaggtttattttggatacaaaccctcaatgaagtcaggaatttatcgttggtttgtatatctttaagcgcgatgtccacagtgcaaacttggatgttagagtactttacggtgttcacgttgaaagacgagagaaagacgcttcgatttagagttgacggggcgcgggaacataggggccggatgaatccacagccaccccccagttatagtataggcaatgagcgcgggaggcgaccgacgcatgcagcttccctcgtcggggaagacgacgtacgaccccgacgtactacgcgcccacgcacgcacgacgggacggccggcctcctcacctcgctcgctcgcgccgcgccgctcgccggcaaatccaccacgccatggcgttccctgcaccctcctcctcctcccctcgccgccgcggccgcggcctcgcctacctcctcgtctccgtcctcctgctcgcgtcccgcgtgccgggcgccgccggcgcggactcggagttcgaggacggcgtctcgcccaagttccccggctgcgacaaccccttccagaaggtaagtaaatcgccgcgtcgatctcgtcggagaggaaggagatgacgatcgatcgtacgtgacggtggcatgcgcgtgtgtgcaggtgaaggtgacgtactgggtggacggcgacgagaggagcagcctgaccgggatcacggcgaggttcggcgaggtgctgccggccaccggctccgacggcgacaagcggaaggccgtggtccccgccccgaagaccggctgcgccaagtcatccgcgccgcttgctagctccattgccgtggcggagcgcggggagtgcacgttcctggagaaggccaagacggcggagtccggcggcgccgccgcgctgctcctcatcaacgacgaggacggtcagtacgtgtagtttttaaccgaacgactgcatttccatcgtgcattgtgcataccatgaaagtaattaacattgagaaattttatggtacttaaaaaaaatcctgagatacctaaaaatttggtacttagagatatcagtgtctcaggatatcaaattttacactaaaaaatatggtatcctccaatatttttttaaatggtaaaattatccaattaacattagggttcttcgtgtagatttgcagaagatggtgtgcacccagaacgacacggtccctaacattggcatcccggtcgtgatggtatcccagtctgccggtcgcaagatcctctccggcatggacggtggggcaaagggtgagaggctgaaaaaaagaattagtctgtcgagaagctgaattcatttcttgctgctgtttttgtgaaccatatgcttctgattttgcttaatttgcagttgacattctgatgtatgcgccggagaagccgagtttcgatggcgctatacctttcctctggctgatggccgtcggcagcgtggcctgtgcgtccgtttggtccttcgtcgtcgtcggcgacgaggtatatcaatcaatccacaaaaaatacgtttcagaagtttaattttataaattacgagtattatacgttttttgcagaagaaaaagagtgagacaaaatgcatcgatcatgtcacatcacatgcatttttcactgaaacgaatggcgcgaatttaaaatatgactttgatatggcggcgatattatttggtccaggataagaatgctcctacactgggtggagaagaagctgctgactctgaaatcgtggagctgcagaccaaaaccgcgctcgtgttcatcgtcaccgcgtcgcttgtcctgctgttcctgttcttcttcaaatccacctggtctgcatggctgctggttgtgctgttctgcctcagtggtctccaggtgcatggcaattgcctactcaatctgacatagtttggttcagttaatcagtaaactaactaatactgtatagctttgtttcatatcttctcttgacggatcctttgtttttcagggattgcactatgttgcctcgactctaattgtaaggtgtgatcactgaaaccatgcaaccttttgtatcatcgcaccattgattctgaatttctgatagtgctattacttgcttgctggtctaactgctgcaaagttgattgacagaacttgtgatcggtgccgcgaagcaaaagtagctcttcctgtattagggaacgtgacagtggttacacttgtcatcctaccactagctttgatcttcgttgtcgtttgggctgtacaccagaattcaccgtttgcttgggttggtcaggatcttatggtatggtttgttgtgtgcaccaggtacagtgcaatgatgatttccttgtcatgtttgctcatggattgttccttttcattcagggcatctgcatgatgattcttgtattgcaagtggtccatctgccaaatatcaaagtgagatcatcaagaacatatgatgccttggtttagtaaatatggcaattgtaatcatcttttgtacactgatgtacttgagattattttcaggttgcaacagcgcttcttgtgagcgctttcatgtatgacattttttgggtgttcatatcacctttcatattcaagaaaagtgtcatgatcacagtaagtttgtttctgacaaagtgcaaataatgcaaatattagtgcaaaaatatcctaatccaattggtatgggcatacaggttgctcgtggtagcgatgagggacctagccttcccatggttctgaagatgccaaaggagtttgatacatggaatggctatgacatgatcggatttggggacattcttttcccaggactacttgttgctttcagtttcaggtcaaaaccaagattttgttctctgaatccgtcaatgcattcagttaatatcagagtctactggatacttctagtgatcaactgttcattctcctgaaaatttaccgttatttttcaagataatatttacctactgttcttgagttgcaggtatgacagagcaaatggaaaggacttgactgacggctatttcctctgcctaatgatcggttacgccttcggtacgtaatattatccgcatttctgaatcacagaagaacaaaatcattgacatcaattatcaacactgtcatctcaatgcaggtttgtcatgcacatatgttggcctgtacctaatgaagagtggacagccagctctcctctacctagtcccatcaacactaggtatcacatcgattcctctgctgagattttagtacagaaatcttgagctccaacacctgtttcttctctgaaattatgcaggaactattgtcacgctaggtgcgaaaagaggagagctaagtcagctctggaatgctaaagtatagcttgtgaaatattgatacttgcttgcagtcttgcagcattgtactagttagagaagcgatcattgatctgtatatgagaatatctgatggttgttggtaaatatatcatgccaaccatctgcacgaactttggttagatttcttttttcagtgtacacttaccatgaatggtggttattagtgcgaagcagtatgctctggctgtaaatgtcatggctgtgatgtaaatgtgaacagaattatattctctgtgtcttgatgtgttcttagctgggtgtaatataaaaaatccactttgtttcagaaacttcagatgttgctcaagtatctgtactccggtgttcctttcttctcgactgtaattttaagtgtcgtcaaattgaactttacaaaagggcaagagatctgcgcagatcccaatgctcagtaggttatctgcattgcagtcatcgtacgatagcacatgaactcgaccgtaaacgctaagatagtgcatgggtgtcattacgtttgattcttagcagtttgcaagaccaagctctctacgctcccctttcgtttttcgcgcgcacattttttaaactgttgcatagtgtgtttttttaaaaaagtttctatatgaaagttgtttttaaaaaaatcatatttatccattttcttaaaaaaattagctaatacttaattaatcatgtgctaatggactgctccgttttccgtgccggagggaagtgtttcccaaccaagagtagcgaacacatacaacatagtaaatcaatcgcgatgtttaaccaacttccaaaaaagaaaaaatagagggagtacaaacgatgaacgggccaagaatattggatctatatatgctccctctactttttaaatagatgacgctattaacttttacacacatatttgaccattcgttttatttaaaaattatgtaaatacgtaagatatatatcatacttaaattacttttaatgataaaaaaaatcataataaaataagtattaattattgaaatttttttgtcaaacacgtgttaaaaaacagatatagtatgtacacctcagtctttaagaaaaagataaatgcatattctgaatagatattcaggtttcattgctagaattgagtatttcgagtaaagtccattaccggtccctaaacttgtaccgttgtgtcatcccgatccctaaactcacaaatcaaccgtttaggtcctcaaacttgtttgactgtgtcatcccggtcactcgtttaggcccttcaacttgttcagttgtgtcaccccggtccctaaacttggatttgaatatcatttgggtcaaataggacggtaaagactttatatttaaaaataattcataactttttcatgtgaactctaatgaagacaaactttatatcaaacttgtagccctcgacgcaatctacaactttgtagttgattttttttattttaagtcattttggtcccgaaatgtaattttaaattaaaatttcaaaatatataaacatgcaacaatattttgtgaccctaaacagttttatttcaaaaacttttcaactacaaagttgtatgtcgcgtcgagggctataattttgatataaagtttgtcttcattagagttcacatgaaaaagctatgaattattttttgatataaagtctttagaccgtcttgtttatgcaccgaggtaacacaactggaaaagttggaggacctaaacgagtgatctgcaagtttagggaccgagatgacatagtcgaacaagtttgaggatctgaacgatcgatttgcgagtttagggaccgggatgacacaacggtgcaagtttagagaccggtgatggtctttactcgagtattttttatggagggagtacatgtatggacagacactgtatgaatgatgtatgtattgtatgttcgtactgtacaacgcaccggatgtccagagtcgtccgatccccatccaagcgcgtggaacagcaccaacgtgaatgcgagcgtgagtggatcagtggaaatgtatgttcgcatctgcgcgtcgagtccaattttgtgagcgaaaacaacccttaagattcagaaaatagcccattttgggccctctagcagttcttccttccgttccttccctctatctatcctccgcctcgtcctcgccacgcgcgaaggcggcgtcgatcggttcccccatttttctcatcgatccctcgtggcctcctccccgccgccgcgccacctcgtctcgaaggtattctttgtcccaaaaccgcctccttcgccgacgagccggtgtagggtggagatccaacttgtatttcatttctttttgttgggatgaactcctaggccatagcatccttggattgtctagggagttctgctccggtcttgtttgtttatgttttgtggggaggaatttttgtgtcgaattcttctttgctactacgcgattaatccgtcctttcttggtttgcagatttctttgatgcgtggtggcagtggcgtttggatcttggtgccgccatgagtccgccggggaggaaggccccggccggtgcgggcgggatccgtcggtggctctccaccgtcgtcgtgtcggtggtggctcttgtgctaaccctagtagtgatatcgctatcggtgggctcgtctctgaccggggcatcgctacacgagtacctctttgtcagacctagtgattcatccaagcttactgatgggaacatgaatggtactgccgttggtgttccattacaagaggaagtgttgcagggtggcaaggaagtacccgtggagcacggtgttcagagtggcggcgtgaattcgagcgagacgggtgaaatcgataccaaagtacaagatccagttgttaccgatgataccgcgtcagtgcctgatgagagaaatctccctgtctcatcggattcatccgacaatcttcagaagactaatgaaggtgcggtgttagtacactttcctgtttgttttctcggcagcactgactaacatgaatgagatattgttttcttgctattttagtgtaatggcttgtttgattattcatgataattgaatgactgggataaaaaatggtatggtgtaattgtacaggtagctgtgatctataccatggacattgggtttttgattcttctggaccactatacacaaacaactcttgcccgatcatcacgcagatgcagaattgtcaaggaaatggtcgacctgataaggattatgaaaattatagatggaaaccagaacagtgcatcctaccacgctttgatggaccaaagttcctggagttgatgagaggcaagacaattgcatttgttggtgattcagttgccagaaatcagatggaatccctcctctgcattctgtggcaggtgctgatactattcatgattttcttttggccatatgattagttaagctgatgacaagttgcccattactatatatgacaattttttgttgacctggatattgattattaacttaaaatactaggcatttttgttattcatgtgagttaggtttgttacaaacttgtggatgacaccatgaatttttttatatagttttgtgatgttcataacaacattatttcgatttatttaaaataaatggagaaagggtcaaagtcatttgttctacatgatttgtttttaaattggtgaaatctacttattttgtagtacatctgtcagccaagttttttgctcgagatactgcaactgtattggctggtgtgggttcagttgctggattattgatgttgtctgatatcaactagagaaaccaatgctgtcctgttgcaatctgacactgtaccaatcctatggtttctagaagaaaactgttttagagtttagatttcaatcggctctttgttttctcaatgtggacaaatttaggatattgcaagattagcctattgaaaatgcctaccaaagcatcagaacagcagctaataagcagaagaatgcaaatcaatgtcctgtagtacatgatagtcttttatagataagaaactgtatgagttagaattgctttgtgaactaatagcataccttgtggtctcacgtaggaaattttatgaagattgaagcagataccatgtttattacttttccttatcatgcagcagagtcttgtttttcaaacatctgattgagaaatcttttgtcgttatatagtggaacacatctggttgggctttcctccttacagtagcagaaatgtctcacaaagatcaacctatacctcttttcctatgttaaatgattttgtaggctatgtcattaagagacatgatctgttcttttaccttctttttggcaggtagaggccccagtaaaccgtggtagccgcaggatgagcaagtggatttttaggtcaacctcaacaattatcgtccgcatctggtcgtcttggttagtgcacaggtcaactgaagctgtggggtttgctcctaagggtatcgataaggttttcctggatatcccggatgagacctttatggaatttatcccacgttttgatgtgcttgtcctctcctctgggcactggtttgccaaacggtctgcttatatcctgaatggcaatgttgttggagggcagctctggtggcctcgtaaagctggaaatatgcagatcaacaatgttgatgcttttggtatatctgttgagacatgcctaactgctctagctaccaatccaaatttcacaggtatagctatcgtgcgcacatattcaccagatcattatgaaggtggggcttggaataccggtggatcatgcactggaaagactaagcccttggatgtggtggtgaggaatggattcacggacaccatgtatggaaagcaggtttcagggttcacaaaagcagtgcagaattctgggaaacatggttccaggttgaaattgatggacatcactgagccctttgccctgaggcctgatgggcatcctggtccatatagaagtactgacccaaacaagaagacgcaaagaggtccagatggaaggcctccacctcaggattgcctacattggtgcatgccaggacctgtagatacatggaatgagatgttgctagagaccatacgaagagagttcgagggagtgagaagctgaagaaaaacactcattggctgcttgatttctatcatgtgatacgacctgcaaaaactaattaagcttctagcattggtgtatacctcattacatatcgtgttgttgttctcccacagataggaaggaaatatagcttttggttggacaaaaaaacaaattgtaggcatgttgtcaacagtcgggatagaagtacagaggggtagacagttagagagagaggttatgatggatgatactgtgcaattgatctgtatctagttttttgtctgacacattcttggagatatgatccgttgacgaattttgtggaactacatatgatctcatatctcgagcacctgtcaatctatgaggcagatgctgattttggtttataacagatgaaagagaacttgttcacacggttcgcttcctgccactacagtttacacctctcttaagttttatgaacttgttcatagggactgtttgatacaattcctattccaaggataaagtggagctaaggagccgcgagaatgctgctttactctcgtaatgtaacttgtggagtatattatccattggagcggaggtggggagcggcgtgaatgctgcttttaccgtaaattttaaatatatattatctagggtttcgaaaatatttggtacaactcaaacttcacgggataagaaacatatattctctccgtttcatattataacttgttttcttagttaaagtttttagtttggcctagtttatagaaaaaaaaaacttctacatcataatgttaaatatattctgatacaatatttattttgtattaaaacgttactatatttagctacaaacattatcaaatttaagaaagtttgacttaaaaaaagatcaaactgacttatgatatgaaacaaaggggaaactaaatggccccctagggaccgggctctgttcgcaagagctgttcccaacctaaacagtatgcacggaaaatggaaccgatcctctagcacgtgattaattaaatatttgcttgggaactggctcttgcggacatagcccaaatcgagtagtgtgttagttctaggcccaacgtttctacggctaaaagcctgccagaatatggcccaaatttaacaaagttctaggacgagatgggctcagttcagaaggaagtcagaaacacacctccccttccacttccacttccacttccaccgacgagagcgacgcggcggcgcggcgccggctgcccacaccacacactcctccctgctcctcttcctcctccccgcatccgccatggcccatggccaatcccttgcccagttgcccccgtgcctcgccgtcccgctcgcccgcgtccgggaagccatcgtcggagggggggtaactcaatgcgacataggtagatctgcaggcgccgtgctgggactacgaggagacggccgcggcggcggccacctttgccccgcctcgacggggaacctgctctacgtcttctccaggtcccctatgcgaactttccactactatttcgactcttcgtgtattcgttaatccttaccaagttaccgtaacctaaaattatggtaaagcatcatcatattgttttttttttgtacatacatttttcgctgtagccgttttggcagaatagattggacttgatggcattacggggtagcgaaactcttgaagcatgttcattaagcaaaacatggatgcatattgttacttgttaggtgttcactgtttgtattataatgtacatcgatatatattgttacttgttagatgttcactgtttgtattataatgtacatcgatatatcttgatgtgcatatatgtcaatgattccatgtattctatttcatggaaattgaagctaggaagtcgcatttttccactacgctttaagctggccaataaaattttacctacatttcatctttgctataggcattacagagctctgtatatttactgttttagcagaatatatgtgtttgtgtagaccactgtccttttagttagaaggacatggagaattggaggtcttacatgtttttgttgcttggatcagattggctcatcctgctgcaacagttgcattcaccatgaagccacaatacctcctacgccgtgaatcctcctactatgcctagcctatagcagaatgtgagccattcttgcttgcctcccttttcttctattctacaatggtacttgtgagtatatatatttattcatgtggtcatgtctcagggggataaattaaagattagttgttagtgacacaatcataatatcttcccaaggtccataaaatatgcaatccttttggtttctatttacagtggatgaagttgggtgcctcttcagttctttactttttttgactgaatttttgttgtcgattagcaaaggataagctttcagtatttgaattgtaatagcagtataggatttgagaccgctggctcatgatgtaaactctgtactgcaacgttctgcaggcaggattagcttttcttgatggaagtattttaaactctgaaagcttgaatacttgcgtggtaatcacagaactacttggctactacactggctgttctccctcaagacataaaaggttagggttcgtgcattgtaatcctatgtttttagttacagaaactttcctttttaattgccataattttacttacaagaagctggtgcacataggattttgtatgaactgtgcagaaaactgaaaggcactcttcgaaaagtgaaactgtcctcgaaaaacaagtctgatggaaataacctatcctataaatctgattacctggaatagttagcatcaaacgctatgccttattactcaagagaggttaaagcaaataatagggtaatgcactaatgtactagtctttcagagagtaattaacctagagaaaagatgacaggttgagttgttcaagaactgtaaagtagagaatattaatgtagttcctcatgagttatctttttgaaagggaagcaatctggttgctctctcactgctctgagaataaagtttcaattagcttgtttgttcattaggaaaagaaaaggaatgaaaagagtaggctccaaccaaattatattcccatcaagacttagaagagcttaaactattctcttgtgacccttcccgagtcagtaacgtcaattgatccaggaggaagataatatagttatatctaagtagttatctaagcttttgatctaatctattaggttaatcatatatgcttggaatatgccacattgcctttggctgtatattatctgcttctcaagatttgtcctaaagattactggtccagacattggtatataaaaagtatgaaacaactctcatatatttgatccttgtttggacttaggggtgtttgggtgagagggactccctctcaccaaaaaataagtctctagggagtgtttgggtgagaaggactaaactttagtttgtgcaatggtaccaatcactggtgctccttgctcttcttttgagtgaccatgtgaactgtgtgttaattatctaggttctactaatttcttttaatgttggaccacttcttgtgaatgtactatgtcagtacctcggcctttccattctgacaatgaattgaaacgtgcgacgagaaaagtcaatagaagcaaataaacacacgtgcttcaaaaatactagcagaatgcgaaaactactactccctccgtcccaaaataagtgcagttttacactattcacgttcaacgtttgaccgttcgtcttatttgaaatttttttatgattagtatttttattgctattagatgataaaacatgaataatattttatgtgtgactaaatatttttaattttttcataaatttttcaaataagacggacggtcaaacgttggacatggatattcacggctgcacttattttgggacggaggtagtactactagtagtatattacagcattatggagtagtatgttattggtgcaaacccatggatttatatcacagactaattcaaacaattgtatcaaatcaagtactgtgctgcatgtaaattgtataagccggagagatcaaaggataaattaaagaaagaaaacgaaaaaaaaataaaacttcaacgcggattcacatccaagtctgaaaaaaaatgcttaatcctaatccaacaaatccactagctgaaaaacaaatatccatttgattattcccccaataagctctctttcttcttgctttctcatctctgagcactgagatttcgcatgtattttccctatctttaatcccagcttgctctcccaatgctgtcacatctagctagccacatcaacccttttatcgttgtacacgtgcctttatatttgtgttgcacttaattaaatctccctagttttgtggtagagaagagagagatatctccgtgggtatactgtatacaactcaggcaagctgtgcccagcatgagtgcttgtaatcgcagtatatcagaatcagaccaggtggtccgtggccggctcatagtctcataccaaatctctctcaattttctcatttttttaaaaaaaggaaaaacacatctctctcgatctgaatgcatgtggcttgaaacgacagtacgacaccacatttacctggccagaatttgcaaagtttggagcaaaatcacaagcaaagctggaagatgcatctagtaggagtagtagggagggagtagagatagcaacggtacatgagtccacgtgtgtactgggcgacacgcccagtacaaggtccctttcgctagccgtggcggcgtttggtggtttcaccaagaagctcaagccctcctcgttgccacgtggatatctggtccaggacgcggcgggcccaccgcagcctcgagtgacaggtctccttgcaagtgggccccacgctattatttattatccgtaataatctgatggtcctggaccactgacaaattctttttctcctctgatcgcccttttccttatccgctttaaaattaaaaaacttcaaatggtatagtggattattcttgtttgtttgaaatggaattttcggttaaatttcaagcaactcgttactcaggatttaaagagtatttcgtggctaggtgatcaagggggagcaagtatgcgtatcatatgatcgacaatccacgatgctgaatcttgaagagagaaaaaaaataacgtacgcagatcacagcaacgagagaggatgattaggctgattgtattattattgttaaacatatcgtcgccgacaagcgccattagtaaagcataaacatccgtggcaccattcaatccacgctaattcaaccacacccacccgccgcgtacatcgtttcttgctttgttttcctgcaagatcttcatattataatcttttccctagctaaagatcaagttcaagtatgctacacaataatatatcatcaccttttgcaagaacaatttgctccttaataattaatctcgaccaaaaatatctgtacaaaacaaattcgagagcaactcaaagttgaaaggaactctcgctctaattaatctctacatctacaaacaccgttaattaatgccttgattatgatgtttcatcgccgagtctacttgatcctcgccgccggagcggccggcggcggcgtgaagaacccgacggcgcggcacttgacgtccatcccggcggcggcggcgggcatcggcattgctccggcggccgacggcgaggtggccgtcgacctcttgtaggggccgagccacttggcgagcatgtaccgggtcttgcgccacggcgggacgtgcaggccgtgcgaacggagcgaccgccgcgccgcgtcggccgcgacgcgcacggcgcgcccgacggcctcctcccgcgccaccaccaccgacgccggcacggcggccacgacgacggcgtactccgccgtcgcgcgcgcgacctccagccccgcccggaagtccgcgtccacaatgtacctgctcttctgccccctcgccgccggcgcgaccacgtcgacgtactcgtacgtcccggccgtgatgccaccggaagcctcccaccgcgacttgcacacgccggcgtcgtacccggcggcccgcagccgccgcgccacggcgcgccggaacgccgccccgtacctcctcagcgccggctccgcctccatcgcggccgccacggcagcagccagcctgacccggaacgggtcctcctccaccggcgggtcgagcagctccctcacggactccgccgccgccgccgcgcgttccggaccgtcgccatcatcggagtcatacccttcgccgcccttgctcgccggcccggcgccgtcctctcccgccgcggcgccctccgtctcaagaaacgcctgcacgagcccggacaggcacgcggaggcctcgtgctcgctgccgctgctcgccgacgacccggcgtccccgcggagccgcgcgcggacggcgtcgtcgaggcggatgtagacggccattttcgccggcggcgtgcgtggatttgaggtgtctgagctcgcggtgaggggaggaggcgcacacccgggtgactcgtttttatagggtggttggctatgaggcgaactcgagagagaggaagggtttattcctttggatcattagtgattagtgggggcgcttaagttaggagcaacgaatttgaggaagttaaccatggaatatgctttcctgatgagagatggtaggcaaaagcagtgcgccaaaaaaaattacatatcaaagctaatttggtgctgccatgtactccctccagttccatattaattgaacttttaaattccatattaattgatcttttaaattctatattaattgatcttttaaacaagtttgaggttaaacttttataactttaaccataagtaactttaaaaatatttagttccaaaaaattagaacaacatatatagatttgtctttcaaaacataaacatatatttatttattatatatattataatagaaaaataatgtcaaggatatattttataaatcatgtcattgtctaaatcgttaattaaaatgaaacgggagagagtaaacagatagagcgtgttggttgatggctcgatggctgacatgtataaatgtttatctctgttttctttctaggtccatccatactgacagggttaatgttgttacagtgcattttctgctgccagaggtgacaggtgtacagtaattagcagctgttagcacgtgcttaagttgtttccgaatcaatggacgagttatttgcatcttttaaaaattatcttccatcttcaaccatgtagaatactactcacacgagagagctggcgttcgcactgtatatatgctgttttctactacagcatttgaccacgaaacgtccagggaatggagggaaatagcgtggaaaagcaagcttataatccacacgcactatacgaatatacgattatgcaaccaaatcactttatttatttttaaccttaagcccccgtttcaaacgtgacgcttttttcacctgtataaaaacagtaaaaagctttctcgaaaaaccgggtcgccgcggtgtgttggcatattgcactattgcgtgtgtgtgttgctgccgcctgcgtgcgtgccgtgcgtggcgaggatatgccgtggcatcccgaggctttgtcctatccgcactgtcacgcgggccccccaacctggctcgggcgacgtcgattgggccaagtcagcagcaggtgggggcgcccccgtgtttggcccttggcgcggccgcggggtcgccgtgggagggacaagagcacgagatggatggcgactatgctgcccattgctcgatcgatcgtctcggtctcgccactagactcgataatccatatccgtttctgtgatcgcctcttcctaatctctatctcgacgctctcttctcgccccgtctccgtctcgatctcgatcggggccctaccaggttcagctgtacgcaactgtttccaggagtatctacactgttgacggcatgacatttctttaatgaaacttttttacttgccccctggtcctgagctgacgctgaacttatcaccactcaccagaaagagaggaggcaagtatttactgtacgcttatcagctgagggaacagagttgcgctgtgcgttggaggtaaatggtggcatacgagttacagttacttttgccgtattgcggtggagacaactcaccgacgcagtggagtaaaatctcgagcggagatgggatcaaactccgaagagaaaaggtcgcggtggaaacatccagggtcaaacggccaccagccagggcgtacgtgtaaacggcgtggtcgcggtggtacacatgcataggcccccgcgcacacgggggggcgagcgagatcacgaggacaccggacacgtaccggatcggagagaggcggggccagcgttatcaaggttggttactcgttgccgtcgcgaccggcccaccacctcccaactcccatcccgcgcgggatcctaatattcctgtacagtttggtcgagccaacgctgcgctcgcgccccccgcatcgacccaccgtttcgcacgcagtctcgctctcgcgcgtgctcgcgctcgcgcaggcgcagcaaacgcaacgaccgtaggccgggtaggtaaaggcacgtactacgccgcgcgccaccggtttgcgtcgcggaacgcccgcccgcccgcctctggtttttgctagaaacggacacaccccttcgcggaagccaaaatacccaaacccaagtggacgacgcggcccagcggagctgcggagggagcatgcggccgtggagggggagggcatctcgcccattccgtgcagcacagaaactgcccctgtcccatcgttttctttggcacagttgggtgtggttgcgcgtgatcaatgtgcgtgtggttgtgtagactactccacttgcttcccatgtaaattcgggtaatgagacccagttagatgacactaaaacttttaaatccctatcacatcggatgtttggacattaattataaatattaaacgtagactattaataaaactcatccataatcttaaactaattcgcgagacgaatctattgagcctaactaatctatgattagcctatgtgatgctacagtaaatatttttaattatgaattaattagatttaaaaaatttgtctcgcgaattagctttcatttatgtaattggttttgtaaatagtatatatttaatactttaaattagtatctaattatagagttaatggaagagagagagcagctcgacgactaatttgcagtcgggtgatacgctgctcccaatgatgtgttagtgcatttttctcttgcatgcatccaagctgctactctcagccaattgtagaatctaagtgaacactagaaaaatcaaagctagctatgagaaatgtgtaggatgtactctctttgttacagaataaactaacatcgtacaagatatgtgtcatatcttaaaataacgaatctgtatatacctatatccatatttgatgtattagtatatatcacattctgcacgaaattggtttattttgtgatggagagagtatatacaatctattattatattcactagtttttagtataatatgatgtgatcacttttggagccaacaactactccaaagcggtggaaggggtttgcctgttctccaaagcgtccacgtacgtgtcgtctagatacaatgaacctgtgcgtttcaagatcacgaaggagcattgttcgtcgtggttctttagcatctggacagaagtttgggtcaaattcaaggctgatagttacacaggaaccgttggtagcatgctgggataattttatggcctggtcgcgtgaatggcgtaagtccattataagaaacatgcagtccaccacgatacaaagatatcagcaaaccaagtgggtgacgatacgcggtgcggtgaaggagaaccagagagaatgaacaacgatggcacgccaagtcgccagcgggcgcaacgtggcacgtaggtctcatcatcttcttcgcctctcgatcttcggcatttttcttgtaccaaatgtttggagctaatagtatacgcgcatgtgatttcctacacctaaatattgattttgctcagctcggtgctggactttgtggatcaggaataacccaacaaatatgcaagaacaatgcacatacataacgtccctttcgaccatcggtgcttgtgattttgtgaatcattaccgatcatattagagtcgccgaagaaatctcgagcttcctattaaggaatcaccaccaaatcccatgagatttaatttgacggtgtttattacagactacaccatcacgtgatcccgtctctgtactcccaaataaactatttccccacgtacaatcaggttctataagcaggtgttttcccaacacctctttctcgttttccgcgcacatattttttaaacagttaaacggtacgtttttttataaaaagtttctatacgaaatttacttaaaaaatcaaattaatatattttttaaaaaaataattaatacttaattaatcacgcgctaatgaaccgctacttttttttttttacttccggttgaacatgggacactgaacacaccctaagtagagtactccctccgtcccaaaagttcagattcatagctaaaaattaaacatagattaacactgttaagtgatagtactagtaagcaactgtgtgtcccctcccctggccccgcgcggtcgcgaaaagcccatttaaccccacgcagcgcggcgcacgtacgactcgtagttagggctgaaaacggtatggaaacttttcggattccggatctattttcgaaaacggaatctgtcggtgagaattttttcggaatttttcggaaataaattcggaaatattttctcggaaacggaatcgaaaatgataagggcagtttccgtcggaactcgcaatcggtcggaaacttttcggaatttttttcggaatttcaggaatttttttcagaatttccagaaattttgtaactgaaataccctgggttctttttttaagcacttaatagagaataccatggtgttttgttgttattttcttgaaaatatttgttatgcaaatctaaaattacataagaatatttttttccttcattgggatttaccaacatcattactcttttaaatatagataatttatttcatagattgtgttttgtgatgtactattaatacttaataattagacttatatgattgtgttttatgatgaatcgttgaccgttgagatttgagaattggattaatcagtttgagagttttttttattccgataaattttcgttaccatatttgcgccggttcgttttcgctctgttttcggtttcgataatattcgattccgttttcgtatccaggtttccgattccgattctgatttaaaaaaaatataaaaataaaaacggtaaaaatggttttcgtccatttccgtaccgttttcacccctactcgtacacctctactcgtagtacgacattttttaccagaccggccgcatgcgattcttcaccggtgacagcgcaatgatgcggtggcctttatccagcggcacgcaggagctgtctgtccacgctgttcatgcagcttgcagatagtagatcgaggccgtgtttagtttccctttatttccaactttctattacattatatcacatagaaaacacacataaacttttaaccttttttttaaaacttttaacttttttcaaacttctaactttttttcagaaactaatcacactctcagacacacgacgtcaaatcgtcccgggattaggattaccaccgttttttcttttgtctcgctgtcgagaatcgagatcatcgtggacgtgtccgtgctaatccacgtcgaaatcaatcgaatcatcgtggacgtgttgctaatccaagttaaaccagccgtcaaatgacggccccttcaacagaaactcagtgagatatttccagtgagattagaaatatgttgttggtttcagtctcttttacttcccccgttcttaaatataaaggattttagttggatataatatagctttatatccagattcgttgtactaaccaaaatctcttatatttagatatagagagagtaatatgtgttagtttgttagaggatacattcatgggtacatgagtatgatgactaatgtgacgtgtatactgatatgcgcgtgtgtctaccgtgtaaaaacatatcttgaaaaacaaaaaacaacaacgagtgaattacatgttaggtcaacttggttacatatattacacattgacatatttggttgtcagggctacggcatatcgcaaccaaccaaaacagttctgcaagcaacaaaggcagttgcagccacagcccttgcctgctgaataggccagttggacaaggccctcgtctggaagtgtttgctgatacatgggttactggcctaaagtgcaaaatctggtatctaaacctaatccaacgtaaaaatattgatgatccatggtgagactaggataaaaataactggtccaaaattcaacttactcataataatatcatgcatgatagatatctaagttgccattatgtcattttacgtatcataagatttgtatcctgttatatgccgatactaccaaatatttgatataaaggattactacgtttcgtatcgcagtaccatcaatcttatttatttacgacaatatactcagaaatgatgtgattatattatataattctatccagtttggaaagaacgacatatcagtctttttttcattttctacaggatatgagaaaaattccgtgttccaaggatatcaaaattaattaggtgcggacgtttgtgacgattttatatttcataaatgaagcacattattgcatctaggttttttctcttgaaccaatatacacgaaactgagtgacttcaacatcatgcgtggcgccatggatagtgaaggcagcaagatcaggagtgaagtttgatcctgtgtattattatcatatcatgcgcataacaaactagatgcaataaacatttttttctagccacaatataaacaacttattatgattgatgtccttgttaattccggcctaatgatcagcacatacctgtcattcctctaatcaggtctggcgaaaaataaagctaaatcaagttcaataatacaccctaaagtaaggactgggtgttaaagtggggacacaaacgatcaggaagatcacattgatacatctgctcctagacttgtttggtccttttctgattcgttcagatatgcactctacctatcaagtagatgaagaccacatacagtagtgatcaaccggtcgtagtgccacaagtgtaaagtgaacatcatctggataacgtggtgtgtgcatttctccgtttagtagtgtattgacttgatagaccatgaacctttcattatttttttgccgaagaaagttgagagagatatttgccactcccactatttttcatcattattcgttccagggtaatcctccaaagagagttgataatatatatagcaggtcaatatataggcatgctttttttaattatgttgccgtgcaattatgcgtttgtttagtgtgcattttgttgtcgggttagtgcgggttaaaactagtcagcctatcatttttactcctaaagatggtaactgatcgatcagctcgatcggacaataaacccactgccactaccactagtactaggttagcctagtcctagtagcatgtaggccttctaaagttggaagtttgggttaaaattgatacgatgtgactgaaaagttgcgtgtgtatgacaggttaatgtgatagaaaaagttgaaagtttggatctaaatacagccgtagcatcgcaaatcagacgagctagctagtactacaatttaatcatttccagcctcatcttttcacttatacttatcagaaaaaaatttaaaatttcaatcttaaatttgaagctgattttaaaatcttttcatcggagtttagtttttagcatttacttttaaatcgttaggaacacgtatataaaagttttattaacaaattacttttcgtttgcaaatatgatgtttgaacgatggggctgtttgtttatgcttattcgatccgcttactaacaatttaaatttgtaaataaaacatttatatacacgtccaatttaaaagtaaatgttataaagcaatctataaaaaaaccataaaatcaactccaaaattaaaatttaattttggcttctaggtataagcataaacgaaacaattggacttaaaaaaacattgtcaggcgagtttttctttagaaaaaagaaatgctgcatgacagcatcccattccgacgggatgacacctcatcttgtccaaatgtccaaatggggtatcaatcgatacctactggatatcatacgatatttgcgaggtatcatcccgttaaaatggggtatcagttgatacctactaggtatcatacgatatttgtgaggtatcatcccgtttgaacgagttatggttcaggagcatttttcgaaaaaaagaacatgggcaggagcaatcacccaacttcctggaagttgcagccttgcaggtgacgcggctagatgggcccggagggagcacgcggcgcagcctctcgtggacgaacggcccatcgcacgaccagagcccacagggatacccggcgcgcaggccggttaacagagatgcctcgaacgcaggtgcaggcctggacttgtgttgtagccctgcagcccgcaccggaggactagcgattagcgaagccgcggtcacgcacgccacgcgttcgatcgatcgatcatcgatcgcgaaaaccctgccactggagaaatcctattcattatcgcctagaaattcgattgttaagcttttatctgctaaatggagtatatgactactgcatgcgtcaccaagataagcataacgtacgtgtgccgcttcggtgctgctgcgttcgcgaaaaatcattgcgttcgtttcggtgctatgctgtgtacggccattacggtgtaccgtcgccgcacatatccacccacccagcacacagacagcagcgacacaagttacaacaatatccaggtgagctgggggccatgaacctacactccctagccactctcacgccagcgccgcgacaaccacccaagtttggctagcttcccaaccctgacgtcacgtaagcttttgccaattccgccaacgcccacgcccatgcgcgcacccgtctacgcggcaccgcgcacgcgccacccccctcgacgtgtcctcacaccacctcgtccctatccatgatcgcgtcccgcccgcgcgccgcgcgcgcgcgcgcgtccttccaaacaccaacccgcgagtccttgagtcctttccgttccgattcccccgtataaatccccgcgccaccgtaccacgggctcccgcatccatcgttctcgctcacttctcacaaacacaacaaaaaacatcgtcgcagacaaaaacatcgtgcacgttggttgcgtgtcaatggcggctcgttgtccggtcggtgtggcctctgtgctgctgctgatcgtcttggtcacggtggcgtccgcggcgtctggcgcgcgatccggcggcggcggcggcgggggcatacgggagttgcggggcggcggcgcggggaggagggtggggggaaggacggaggtgagggacgtggagggggacagggaggtgcaggagctggggcgcttctccgtcgaggagcacaaccgccggcgccgcagccgggactgcggcgacgtccggctggagttcggcagggtggtcgccgcgcagcgccaggtggtgtccgggctcaagtactacctccgcgtcgccgccgccgaggagggcgccgcgggtcagaacggcggcgagccccgcgtgttcgacgccgtcgtggtggtcaagccctggctcgagtcgcgcacgctgctcacgttcgccccggccgcggactcgccgaacgagtcgtagcacgcaggcagagagaggcaaggtcacacaggacacagctgagctggtgtaagaataaaaaatgtaccaagtttcaggtgcagttgtgcaccgaacggggtactcgtattcagtagagagtgaacaaagtaagtgtacgtgtgcgtgttgcggcaatagatgttcgaaggctttttgtgtagagagacgggagagagtggcaataaagtactatacttgttctacatcttcttcgtttaatttgcatatgcttatgcttatttttttcccactcgatcgccaatcaggctcaggagctcacgttgcttaaataatgctgagaggtgatcgcgtgtagtgactagcttgaacgaacgaaatcatcaattaataaaagccctagtgctaccgattttctagttttttttttctcctcggaatggctgtcacgaaattaaattaaaaaacgaccttgtttcttactaactgagaaccagaaccttgtcttttcgcgatgcaaaaaaaacctttgcacgttaatatattagaaaaaaataactagcgcaactgtgatacaccgaggcaatcactggtcaacagaagggcataccccattacataagaaactggtttaaaccaagcaaagcttctaagctaagactaagagattaagaagttgcgataaactaagctaagttgtgtttcgctaagcatagtcttgtctggtggtcccatgcacaaaccaggcacataagaccattcacagtgcatctacgtggctttcatccctactgcgccccacgaggattttcgtctctacgtttgcaaccctcgtacctaacatgcaaaattatagacaccacttgagctatttcttccagaaatacggctgacagtatctttcacggcaaatatcccgagggactatctatacatttgtcgataaattttaaaaatttatcaaatataaatacaatataattatactgtaattacactgtaagtatagaataattacactataacttatatgtaattatactgtaactatagtataactacactgtaactttagtataactacactgtaactataataattacattgttacttatatgtaattacattgtaactataatataacttgcatgtaagtgagatgtacctttataaaacttatgtttggcactgctcacgtaaaagagggattacgaactcgcaatgtctgtttgtacgatgcgtgtggaggccatcattcatgcatgcatgttcgggtatgccctgccgctttatctctgcccttcgtctgacatctacgcgtgcatgagccgcgccagtgccggtagccagcggccgtcgaaagaaacaaatcaaaacgtcgacgcaaaagcacgaatcttgaggttcatcaagcggttcgaaaatcgacaaattctaaggaagaaatttgtcaacagatttatagcaaaatcgataccgaaataccaccccaagctaataaatctcaacatgcggcagccagccaggttttggtgaaacagtactgtataaaagcatcgcgtttcctttctcgttccccctctctttttcttccgtttccagtgcgagtacacggcaatgatcacccctttgctacttttcatatccatgcaacatgcatacaaaaagatggaacaaactccatccttttttctagtccacaaacgctagcttcgcccgcccctcgtcacgcaacgccggacaaaggccgagcttgctgttgcgcggagcagctgcagggtccacgtgatgccgcgccgtggcgccgcatgcacacacgcgcgcgtcgctacgtggtcacgcgaacacctgcactgcagtacacaccaccctacctatatcatctctcgcctctgtacatctgtgcaaaactgcgaaatccaaacatataattagctagcaagcgaaagtacaaaactatggcctccaagctgtattacgccgtcgccccgctcgtgctggtgcttctcctcctcgcgccgctctcgtccgcgcgcctcgccgccgccgccgccgccgacgacgacgggcagtggccggcgggcggcggccgcgggaggaaggtcggcgggaggacggacgtggaggacgtggaggggaacagggaggtgcaggagctcgggctcttctgcgtcgtggaacacaaccggcgaggggggtcggccacccgcggccgcgggctggtcttctccagggtcgtggcggcgcagacgcaggtggtctccgggatcaagtactacctccgcatcgctgcccaggaggccgacgacgagctggtgttcgacgccgtcgtcgtcgtcaaggcctgggtgccgtcccgcgagatggtctccttcgtgccggcggcggagctgccaggatactgaatcggctggttatccatggacgcatgccttttgatggagatggaagatgggtgtgcgtcatcatctttgaggtgatctaatgtctaattagatatgatactgatgtaagatgcatacagcatgactgcatctaccatgtttggcgtaaattttgcttgctgcagagtccaacttgtgtaagatggtagcttatgcttctcagttttctctctttctgtagcatctgtaaatcctgttcctcaatgacacctatagctctgtacaaactaaaaaagagaaattcggaggaagatatgtccctccaaactttttaaagaaaaacttgtgaacattttttaagaaaaaaatgtaaatatgttaggaattaaacacaggaccttaaaattaaaaccacacatccattaccactatcaagtgcatccagttcagtacaaactgatcgtgtcgtcagctaaaccctagcgtgagctaaggtcgatgaagccactctaaccaaaaggctcctcctggaacggtaccagataaatgttgaaggatttttgtggaaaaaactttgggtgttctaaaagagctaattaagactcaaatttgacattagcaaatcaccgtagccgctctattatcgtctgaaaattcattgcttatgattttatcgaatcccactaatccgtaattcgcccatagctaaggttaataaccgcgacgatgaaacaattgccctcagttttgcagacttggcggtatatcatcattgacggatgcgtaccttgggaagagagtaatgaagcgggcaaagaatcgatcgctcgtttcctgcctgattttggcggtatatcatcattgacggtatatgctggcattttggaccaatcatcggaccagccacgtcatcaaccacaccaaactcaccaaactgcgcgtatggttctgtagccgccgccgttaacgatgtgattcgatggtatttacctggcttatggtctggtgtgtccgtttatccgagcaccagaaacagattaccttaagattagctacttgggcacttctggtagtgaagtcatcgcactggcaggtgctaaatgactgcatggtgccactctgtccggttcattttccccctgaaacacatttcaggagatcctggcggaatgggtggagctcaaacagcagtagccttgtgcactgttcaacgtttccatggaccgtgccaatatatcttacccgtgccttccaacttatccgtgaatgacgaacaccggacagggcgggtactgaagtttgaaactgtcgagaccaacaatttcagagaagagaacgacaacctgcaaaaacagttaagcctacaagagaaccaagtttaagggcggatgcagcagagccacgggacatcatcaaaagttcagtcacagcaattcctgcagtaaggtgcgcccaggcatagcgttccagcttgcgcatgaaatctgcatagatctccaaatgtaattagtacttgtaaggaagaaagcaacaaaccatccacgacctgaactgccaccaatcttcaggtccacttatcacgatgacagaccagaccaacaacctgatcgcgcatacatgttgcagaagaaaaaaaaaagtatatatctattttgcatgcctttttttgactgtcgatcaattcaagaaatgtccaacaatccactcctaatattgataagaaagaatcaaccctctgatttacttgtctaatgttcactatgaaaagaatactctgcaaaactcagaacggggtgacaagaactggaagaaatatgatcccctagggagtcttaacacttgacgcaacagttttctatagaaagtcctacaagtatagtttctccccccaagatttctactagtttctcccccaagatttggacgcggacaactctttctcagtttttgtgcgttaagaaggtgaaaaggcttatgttacctctctctctgcagggtgtaactcatgttagctgtgtggtagaagccacatgaaacagcaagagatctgcctagttaactcatcttaataaacttacctcgtaatatttacacaaccacacgacccgctgattcttatctctcaaaatggaaattgtgcatcatcttctagcaccttaaaatgttgaggatgcctaccagagcaatgcaggttccacatatgtaaatatgccctctccagattctttacctgccatttttgtttacggaagtgaaaaagctaaccctgcaacagatatggacatggagttcaagactgaaaagttacccatcgagctgtatcaaacaaaggacaggtcatcctaacagccttgagcttgttggtaagagcttcgagtttcaatggattttctgctagagagactgccctttcttcatattcttccaggctggattagcaaagctgattaaaagaagagttcaaccataagggaaaaaacacaattggctgagatggctaacctattgactaccatctcttccccaattccagtagctagacacagtgaacctgcaaccctagttgccattttctctagtggaagagtgatcattgggagaccagcccataatatatctgtaccagtggtgtggccattgcacaacgggctgctcattcaatataattgagaaaataagagtatggcaggtaaataagaaaactgtcaagggcaataatggatggaaagtaaggttacgtgtcaagaaatagatctgctagggcactgcgtctgatgtgctcattttttgcagcaacatctgtaaatatgatttgatctgctcttactccctttgagattgcatctgccaaagctacaacgttagaagtggggagagatatagagacagaataggaaaatacgacattacatgcgcgcaatctcatctctccagctgctggaaatctcaatagccacaatgcactatttggtacacgcttcagaatattgcacctgggttgacaaaaagcaaaggaaaaaagatcaatacttccaacaaagcatgcatggtaggtattgtttcaacgaacacgtatggtcacatattataaatttaccataacaaacgcatatatagaaagaatttaccaggtgttgaatatgtctgggtccatcttgtagagttgattgaagcatgcaaaaataaatttgtcctctggcagaccatagtcagctcgcttgtgtgggcatacaggaccaagaacatctcgatttttctattttacaaatcaatttaaagttgattattaaactcataaaagaacaaccttattcaatctttggcctgttaagaatgtaggaatttcacatgaattttgcaggaataaagaatttctcaataatagtattatacaaaaagttcaaaggactcagtcctgaaccttatgtttttttatctctggttattttataactaaactaatcagatgagcgattatgtccccatattaatgcacacccatccaaaaaaaagaacccatcaacatcagaataggttggcccaaagacctcacatgtcaatgagaaagtcataggatgataagactattaaactgaaagttgaaaaagactatcaaactgaaggttgaaaaacagaggtgagcctaatgttaaaaagctgaatatatcttttgcaaacatctctggtaccatgtttttaacatacctgcttatagtcattcacaaagtaacagtggggaagatggacaagcttttctgagtatatatgtgaaaatttcagtggagaaacaaactgaaacaacaacaaatggccaatcaatttataggcagagcaacaatttgttgaaacaataaatggctaaaaatttcaatatttcacctcatcagtaaccaaataatcaatgtaatctgcaccagtggttccaggaaatcccatgtaagaaacctggattggggctggttgtaaagcgaatatttcattccgtgcaccctgaaacaagaagcaattttacgataagaaaaaaattccaagaacattaaaagttaatctcccacttgagacaacacatgatttgaaaactatacggtggcattcaaatatatcgcacacatttagcatgcataaagaaaatattacagtgcaatagtggcacaccaaaataacagctacatttctgaacatattgccatgcccaatattttataatttaaacttccctaaaagtgataaagttccatagaaaaactaaaggtaggattaataaaccacactaggataaagcagttatctatcacctaaaaaaactcagccccaaggggaaagatctcccctgaggccacaaggtattgcaactaagaagaagcatctaaaaccagggccgagaaaggtcacgaaagccggtcctcccaaaaatggggagtagccccctatgggttgggtcttaacccgtgctttgaggccactgccccatacacgagggcccaccctctgtaggtcaattcttaatccatgtttttagggaaccatcgagtgacctttttggtgcaaggccaggatttggatcctgttggtagcttcccgctgtaatacattatggcttttacaatccccaaaataagcaggtgattttataacaacagagaggatattgctaaatctgctgctgtaaaatactgattaaaatagaatgaacaaaaaaaaaaaaagaagccaagtgggggtttgcaaaagtgccatgatgagcagaaaatgaatagaattgtgatgggaagccttagtaagtccataccttagtatagccattaagattaataagaatttgtatcttatcctcattgataactttagcaatcatatcagatgacattgatgacacatcaatgaagtgctcagcttcagatcgaatacgctgcctccattctgtaccatcatcttggctcagggcataacagaaaacctgcaaccatatttataaataaccattccctcaaaatacatactctcggtgtgtataggctaacctcgatagtgtcttgattgtgcattccaaatatagaacccatcagatgagacaggggatgattgccaaaatcactactcacatacctaagaccaagttgaaaaattgatttcatcaggaagcaacaatcaagcacaatatgtagcaaagtagatatcataccctattctaagtcttgaagttctgccatcattgctgattggaacaggataggagtgtgtgaatgtaggaagcccaaaacgtgatgcaaccaaagagtaatgagctgcatatgttcgactgaaaaggggaaaagttgtaacatatggtctatgtagcatgattatcatcaaaacataccttataaaggttacagtgatcagtataggttaccaagagaagcctcacctgatttccagtgcaagagttgaatcaattggatatgctatagcatggaatggttgtacacttgggagagaggacatctggaacaaaatgaaaataagagcaatacatatcaagaaaagtattccttaggtaattcaggtaaacagtaatggaaataaaagctcgtgcctttatttgctgcctgatgattccctccacctccacgaatttctctgctcgatcatcccaatcacatacacactgcaaataggtgaatgaaaaaaaatgttaatctccataaaaactcaggtttcatgtgaatgagcatccatgttttaaaaataactagagaaaatttgcaaaactacgcatattctggtgcgattataagaaaactgcatgttccagttacatttcaccaagttacatatattccccagcacaatgtttcaacgaggaacatatttacttttatagatggaattagaggatttcggggtgatggtgtgttctacacccagacgcacccacacaacactagaggatcttttgtggttgtatattcatacacattagttgttgcatgattttttttttcaaaaattggcatgctttgaatatatatatatttaggtagctttgatctgatgtgatcgtctgaagtggcatgccaagaatctagagcagaaagacatgctgtggacgatggcaggttttcaactgggagcggatgtggatagtatctttcaatccacagtcaaattatgtgtgggcaatggcactgacaccaggttctggacagcaaattggcttggaggtggcctatcctttcaacttatgtaggccgatcaaagctgacagtggcacaggccatggtgaaccaccgatgggtacgggatctgcagggatcactgtcaaatgaagccatggttcaatttttttagttatgggatgagattcaggtgctacagctccatcatgaagctgacaccatccgttggaagctaactccagatggtcagttctcggtatcctcggcgtataatctcttcttcatggcaagagacatctgcccctttggggagttaatctggcacacaagagtccccctctagaatacgttttttcatgtggctggctgtgaaggtccgttgtttgacagcggacaatttagagaagagagggtggcctcacaccgacaactgccccctgtccgttgtttgaagattgtttgcatctgcttgtaaactgtgattacaccaacagggtatggagattgatgcaagcctggatcaatgtcgacttccctatccctggaattgatgggctcggcttggcagactggtagatgcaggcaagcctctattttcggaccggctacagggcaacctttgacagcatcttcatgatgatatgctagctcttgtaaggaaagcaatgagtgggtgttctaacaaaggtcgagaagaccagagcagctggtggaagacgtcaaagaagaaatcatggtgtggaaggcagcaagagttttcgcggcatgtaacgattagcggaccagccttggtgctgttgttgttctttgcttgttggagctgaggctctgcctcaataccggttcgacagccttctgtcgttgtaacctcaagtttgtatacttaatgatatttggtcggccggttccttcagccgacctggcaaaaaaaaaatctcatgtgatcatgcatacaattgttagcttttttattttattttgaatcttatagtatattcatttttcaccattgtgcaggcactataatagtaattataacatgattttaaacattataatctgcttgctacacaaactgaagagttactttttttggcatgccatttacttcaatgttttaccgctacaggaatcatcaaagaatgcacataataaaggaaagaaggtaagagtctatacctgtagagtgtgcaggagattgcaagtagcttcaggaaaatcttgacgtaattgtagggcctgcttgtaactgataattgatgcctccagcaagcctctgaaaataatagaaacatgttaaacatgtagcatcagaactgatgccctagaatcacacttcaccagaaaataaatgtggtagaaaatgcaattacgtgtctttgtaagcagccgccaaatttgcatgagcttcagccatagttggtctaattgtaacagcatgaaaatagtcttgaatggcttcagtgatcctgcctgcttctttaaatgtgttgcctctattgacaagacagtcagcagccattggatcaatgcggagtacttcattgaaacatgtaatggcgtgattacagtttccctttttcagtaacgaggaagagaattgtcattgtgttgttaaatggtataaacggttcacaaaagtataacatcaatataaacaaaaaggtgtatgaaacacgtattcgccgaaatcaggagcgtttggcatcacaagtacctgctgtttgtaaatcattgccaagttgttgtaaggtgcagataatccagttgtaactgtcagtgttgccatgtacagtgaagctgctatgtccatcatgttcctgcaagtactccaaaatgaaactcttgcacaatccaaaagaaatgcacaccatcaaaaactcacctttccatatatacattcccaaggtttgtcaaagcctgagggtgagaaggctgaagagcaaggcatgtctgcaacaagaaaaggcatgactcacatcaacgtaactataacaaaaaaaaagtaaaactattgaagacaaaattcagcagtttaatcttctatggtaacctggtagcaactaatagcctcttcatttctcccagcatcttttagagcatttccctatcagtggaaacacatcatataaggtcttataccaaaaggaacaacgatttagtaggcatacaagaatgaaaaaccaaccagattattatatgcttcaacataagatgaattgcaatggatggcttgtctataacttagaatagcaagatccagttgcccttgttcatggtaggcattaccaagattccctgaaaatactaaaaattaatccacatttccacaacagagccatcattcggggtcagttagtggttgctaatatgctaatctgtcttgtacttatttttcaataaattatgaaaaggcagttgccaaaataaaaacaaacaaactagagtccaactgttgactctactacacgtgatttgatatttgaaacatgataagatatccatttgaaacttatattaaaagaagtggagttaaccaaaatcacttttttaatgaaaaaacaggtcatgatacacctaaatgcctcaatcataaccaaaaaaaaaataatcgttttacaagtgtaccattcattgcagcaaacagtacctagaaattactgataagtgcataaccctcaagaacaatacctcaaaaataagcaattattcaaaaaatactgtgtcaaaatgctaaacaacaataaattatggcaacatatcaaatgtcgtaggaagcagctttggagcatgattatgggttcaatcatatttgccatactccaaccacaacaaacatctacactcaccataagctactgcattttctggctttgccctagcagcattctggaagcatacaattgcatcctgacgcattccagtaaccttaaaagtgatatttgttgtcagaaggatatttccacaatgaaaccagaatttatgatgaaatgaaaaataccttgtaaagatttcccaagttcaggtgtgcatcgtaaaatgctggattgcatttgattgcttcctgatgtttcacaaaatcttaaaagaatcagaatattgctggacctgtcattatcctaaagtatgctataataaaagaatctgcatgctgtagaacccctgatataattgattcgtttcagaaattttttgatataatgaattctgatcatgacaaaacagcattgtcaaggctccaatgacaagctatgaatgcatcaaagcatctacaacattaataaatgtcaaagtcaatgcaaaccgcataccttgtagtagagagctgctttattgaaatctccccattgcatgagaagtccagcaatattattccatgcatttgcaaaagtaggctttatgtttagagcatccaagtagtgactgtatgcctgaataaaatgcaaatcacataaatattgcaaatgaaaataatttgaccattcatcagtcatcttattactatcatcaattcaatgcagcataacaggccagcatcagtaatttttactttgaactgaattggaggatcctccactataattagaccctattctgttagttcaacagaattgttctgaactaaaatcacaacatagtgctacaaaatatgtcatttaaccagccacttatcaagatgctaggagaaattaaagctgtcatttagcaagaaaaatcagggtaacatcaggcatctgtgggcaataaaaagtgtattaggaaacatgctagattggtacaaaatagatcatgatggatagcaaaaaaaaaaagttacaaagtaaatttgatgaagagcttgtaaaaatgaaagaataactaatgatactacggacataaacaatttgatctgcgatttttttattttgctacttacttctctgtacaatccttgtgccttcaaaacatcaccaaggttacaatatgcatcagcctatagtcacaacacaatcaattaaaagttccacactgctgcaattaattgagaacatgtgattcatcagaatgcagtaaataaaagcgttggttaccagatgaggatttagtgcaagggcttgatggcagcactcagctgcctgactgagatttccttttcgagtataagcattagctaagtttgtccacgcatcagcaaaggtaggccggagctacagaagtagaatttgttagctcgcaagataaaaaaaaaatcagatagttacaatgataaaatgcatgtaccagcatattatgtgtgtcaccttagataaaaaggttaattaactcagacagtaaatctacctgtactgcatgcacataaaactgaatggcattatcaacatcgcctttctcctgcagcagacaataaagttgaaaacacgccaacacttaataaccccaacgattatggcctacacttttccaaaatgaaatggtctcaccctccaggcattcgcaatgctgttgaagcactctgggcaattcggctggattgcaacagcctcctcgttcttcgcgatgcacatgtcaaactctcgtagctaaaccaaatccccaaatcagtataacacccacgccagcaccggataaccacggcacccaaaattccgaggagaacctggtaatagacggcgccgagcagcaggaggttctccaagagcctcgggttcgccctgtacacggcattgcagtgctccagcgccgctttgtaatcccctgctctgtaactctgccgcgcgatctcgaggcgcgcgccctcgtcaactgaaacccaccaaaaccgcgacgggttaacaaccccacgacgaaaatgaaaatctcggcgcaatcgaatcacggaacagcgagatgaatctcgatcaatcatcagagaggggaagagaaggccaggggttcctgatcgacacgaacgaaacgaaccttcgagggggtcgagccggagggattcgaccaccgtgcgcagctgctgctgctggcgcggggtgagagggcgatggtggcgcaccgcgccgtgctcctccacggcggcggcgccaccgcctccgcctccgcagcgcaccgagagcatcgccggaaagcttctccgacgatcggagaaccaaaagtaaaaaaaaataaaaacctaacccgcgcgacggcgccgcgcggcctcgagctttcgcgtacgagtcggggagggggttggactctctcgggcgatatcgccttttcgccttctttttttttttcctttttttttcggatgcgtcgtcgcgttcgtggggattgggaaagcgtgtgacgcggtcagcgtgcggcgccgctgggtttggaaatcgggtgggtgagcggagcacaccggaacaccagtgctgcgcgcgacgtgcgtggccacgataggaggggacccagaccgtcggattgggtttcggtggtcgcggcgttttttggacggtcgtgattgagccgtgtgtggctgggctgggcttggggatgattcttctggtcaagtcatcgctgttgagcccatcaatggcacaacaagcccatttttagccttctctccctacagcgaggtgagtacaactgacaagtctgaaacccaaagaccatcacaaagatcgacctcttgagtccttgcgtgagaaagtacttcgtgtctgaggaactgagaggcagttgattgcacatcgtgcatgaggatccgtgaagctgtctttgatttttgttcggtttctattgtaaagttgattgtttttttagtactttccaggtcttgtttttatgcaaagtacgagtcggttgtacctcttttattgccctgtccgttctcaaacactcctaagtttttgagtatcgtatgaaactgaatctcatcatcttgactcattaatacatgcaagattacgattcggtatgtaaaaaatggcagtaacgatgtgtcgatgtttactttcgaaatttcagccccctaaatcctaaactatgtctgttgggaaaaagaaaggagtcagtactgtgtgcacaacaagaccagactagtagagaagcagcccggaggagaagtcgctgccaatggtttcacttcaccgggtcggatcaccacgaaaacgcgagcacgtacacggtacgtccaccgcgaaaggacggcacacacacacactgctcccgtccacacggcccacaaccaccaccacacacgacgccgcgcgcgcatggggtcgacgtttcaaatcaaatcagcgtcgtcgtcgtcgtcatcatcatcatcgcctcacctcgcctcgcctccaccccgaccgatatgatatgatacatcgtactgtacgtacctccccttactacgtgtccccggacctcaccgtgcaacgtcgcacctccccaccacagaacacgtacaccacccgcgcaaccaccgtgtcgcgcacgggaatctcgccggctcgatcgatcgccacccacccgctccctccccgagtccgagtcccctcgcgtcgtcgtgtgttcgtgttgcacgagagggcgggctactacggggattgtgtgccggttgggtgcgagagcgcccgcaataatgcgttcgttgcgtgcgcgcgcgcgggggcgcccacacgacacgacgaccccaacaccggcgtacgtagtgcgtggcgtccctccggccccgtcgtccgtctcccctcctcctgcccgatggcgacgcggcgcgaccgaacgagggggggacgactcgtctcacgactgctcaccaacagcgcgcgccctccgcgcgatcgcatactgtttcgtccccccgtctcgcgcgattgcttgtgtcgggcgaaacgcatggcaattgggaaaaacggaggaggcgacgaccatgatgacggcgacgatgaatgaatgatttagcgtaattaggagagggatctacatcacgccaactacgatccagtttgcgacgctcgcgtgggtgctagtgggcagacagtctagccattggggtcgccccggttactgcagcgccctgaaaccgatctgaaaccaccctgaactgaatgaacaaacctcctcctcatgtgggagtgctacttactacactgtctactaatcttgtttttatttttttgttcaggtacggagcaacttaattgtgctggagacctgtgtacgtacatccagttgttggagtggccaccttgcatggtgccctaccggcttagtggtggcaacgaacgccactgttatggtggatgtgggcatagcctcatatgtaggtctcaaactcctcaagcctcgttcgttttcgtgcgagacccagttgttctatgctgctgcacttaaattgcagtaatctcatccactgagatggatcacatggctggggtacaagtacatttcagagtctttttggtgttcattgttgcagttcaagatcatttccatgtaaatgcatagcaacaaaggttcaggattgaatgtccctgcaaagttgcacaacattttgatggcttttgatgatgctcgcataactactgaccttcgagagtaaaagttgtcagcaagcagacgcaagcatggctttatgattgattgcttgtgtgaatggatgctgcaagaatgatagtagtaccaccaagaaatctgcagtaatagttcagaattcaatgttctaaagaaaaaggaggtcagaaatcaataaatatttggggacacttaaagatttccagtaattccaggcgtgatgtgtgcagctagatctaagctcagcttttgacttctttgttgtggctgtcattgcatcacatctcccctttgtgatgcacaacgtacttttctctgaatgcgataaacaccggtgtttgctccaaagatataataataataataggaaaaactacatctcactccagttcccatccctggaagctgaaagaaggacgaacgaacggcaataagataatggccacctccttaacagtacacgcagcaccaaatctgaccatatcatgcatctcaccatgtcaaaaaaattataaaaatcatctttgtgtttgctaattgcagaggcatgatcttgcttgcaagatgcagtgcctactcctcatgacaaccacgatcttgcctgagagttgcactgtctgtccctccatgtacaaaccacgatctcactgtactgttccagtttcaccctttgccccccttttttttccatgggaccttctcatttgttgcagagcagtctctttcttgtacctcatgacattgtcaattcccatacttattgtgctgaaaaaatcagcaggagatgctgtcaggtaatcttgaattttcatctgtggtagtacaagagtaattatggtctggaactgagtaatccaagtgcatggatttgggattgggaccagtgaacactgttctaagatgttgtgacccaattagtcatgatttggagctacctgagctataaagataaacaactgctactacagaattgtttggtccaattcaagaaaacgagtgatcagaacaactccctccgctgattccgttttttggagcgtgatcacagcctggatgatttggacctcgctgaagtagattgggagctcgaattcttaacaataaaagggttgttcagagagagcagagaaagtgacatgcagaaataatagtagtatttcttttctgaacgtagctatagatgaacaggagcagaatagcaacgcagtgaatgccgttgcactgcctgtctgatgtacgcctagctagcatctctgcataaaatcaatctgataatatattggagttggattggaaggcctcctcagccttgtcctactgctgtctctatctctgggtacttatcatacagctcaaaagcagccacaaatccagtcccccagctcacaacttgattgttccttctgtccatgtccttttacatgaactatcttctgggataaacagattctaaaattcaacttgttttctgacccctcaagtactaaaccagaatttgcatacagtgaacttcagcatgaacacatctcttccgagtgaaaaaaaaaatgaagttcagcatgagcacaatgcacaaccaagaagctgaccattcttcagaggggaaaaaaaggggataatttcagcttaaggagatcgatccatggacaggaagaaggatcttaaagatatatatcagctacaaatataatgagaatacaaataatgatattacacgtcgtccctctctgcttgagagggtaaaagggtctgaatgaagcatcatatactgcacccgacttatgtacgatcttgtagcatacatatatatactacacccgactaccgtacatggtgcgtttcatttttgttcaaagaatcattacaccaagatgggaaattagaagctaaaacactgctagggcccaacattgttagggttgaatctcagagtgctgccgcggcaagctgacttctctgtatgtacaatgggcgtcagagctttggatcgaacctttatttggtcatgtcaaagctccattttcatgtggactgtttgcaacgatcctgatccatagcagtttacacatcagaattcagttaaggtgacgttaactatggcatcaggtaataggatgaggaaacttgcctaccattgtagctattggaagaggtggcgatctcctgactttgccccatatccatctgaacaacactttggagatcatcttgccagaaagcaccaacctgtaaagcattcattcctcatattcagcatcgattcattcgaacattttgtgagatcgagacattggtgtgcatttttacctgagaagccgcatcgctaaccccattgaggaaaggatggtgcgagcccattggccggcaaaatgccgggtccaatgggtgcatagaaccctggttgtccatgccgttcgtcaggccacaaccgagagggttcccttgctgaggctggttaatgtagggcagcggcgcacctgaggtctctagtggaaaatgtgagctctgtaacgggctgcatgactggtgcatctgatcagggagaaaatcggaaacacgaggtaagttgggaactgtatgattggcacaataagagaggaaacaaatgtagtaatgagatcgcataagcttgccctcacatctttagcaaggaggttaggcaaattgttgaagtccagctggggattcacagtggccaacttcatggacaaaaactgcaaaatggatgtgaaaggcaaaggttcagatggcgcacgcccgcgcttgctgcgctctaaatcggcaaaagctgcagtttcacaatcattctgcatctgtgaatttgacactggacaaatacctcgacttgccgttgcaacgactgcacatagtttatgatttcatcgagcatgacagcctttccaaccacctgaaacaagtaagcatttcccagtttccaatctgagcacaccgagcaactcaagtaacaaacaggtgggcgatgatgcaaatgatgagtgcttttcttcagttaccttgttacaacccggcacgagatcctgcagcagcttcatcctctggcttatcttctctcttctcacctgaattgatcgaacaagaggagatacacacagcatgttaatgcacagggaagatgatgatcagaagagcaatggaagctagagctgcaagaattttgtgtgtgtaccctctcggcgaggctgtggctgtccgtcgcctcgccgcgccgggcgcggacatggatgtagtccttgggcggctcggggggcttcgacgagctgtccttcccttgcttcttgccgccgccattctcgctgttgctctgcgcggccttccccttgccggaattctcctcggcggccgcattgctctcctccgtcgatttgcaacgcttgccgctggaatcctcctgcagaacgctcgagagatgaaatctttcggtccaagaatggtgcggcgcggccatggcgagcggaattcggcgcgtaccttggcggcggaggtggacatggggctgtccttgcctttgcccttcccggaggccttccgcttccgtgcattgccgtcggaagcccccttgggcggaatctcggcgccgccgggcgccggatcagacaccgacgactcgtcccgggtgttcccgagctccatctccttcgatgcgccggccgcgccggcgtcagggaggccgaattgcgccgggccggcgccgccgtagcctcctcctccgccgccgccgcgggcgtcgaagccggagagcctcgcggcgcgctcggcgaagccagggtcggcgaggaactggtcgaggtggcccatgggcatcaggttctcgaggattggcaggcccccgcctccgcctccgccgccgcccacctgcggcggcgcggcgtagtggtggaactgccccatcatggacaggttgagcttggggggcgagctgagcggcgtcccgccaccgtagtgcggctgcggcgagatcccgtggagagcgcccgtcgagttggacgccggcgaggacaccatggagctgagcgccgggtcgaggtgccctcccgccgccgcgtccatggactggtcccagttgaggttgaggaagcacgacggcgccgtcgccggcggcaactggtcgggcggcccgcagttcatctcaaagatctgccgcaattctccacgaaacccaaccaaaccacccgaattcccgagctcccaagaacgccccaatccagcaaaagaaacgcgagaggcgagcagccaccaaatcccactacgacgggggtgagggaaggcgagcggagataaggtaaaggcaggagcttttcgtgtgcgtgacaaagcaaggaaaagtgggggaacagtaaaggagtggaaaagaagcacctaaaacaaagcaaaagctttgcaagccaaaaaaaaaaaaaacagagagagaggagagagctcgcaatcgcaagcagaagcagcagcaagtagagattgggagtgtgagcctacggggagtatgtatataggaccaggatggcatgggtcaaaatggatgggctcatgggcatcatcaccccagcctttcctgccatgaaagaaggaagaagctagagagagaggcactggagatggtagatggagtagtggtggtggtggtggtggtaggggtagtggtgctgagtttacttgcacaggcaagaggtgagtgaagagaggaagaggggaaaggggaatgaattgctgccttgctgctgactttattttgtgctgcaaaacaaaaacaaattaaaaaaatatatgttacttagtatttcctccatccaataatataatagtttttttaaagatataacgctgtccagattgataatactaaaatatatgacatccgactaaaatattttatgctttaggactgaaggagcactatactgggggtatatgcttttgcactaatctggagttctggatagagtaaattgtagctactcctagcatttaaattttatatcaaaatataagagtagctactctctacatctacctactcatctcgaatgactaaaaatcatattctattttatttctataccagcttctatatcttaaccaattacaatcattcatcatctaattttattatctccttaatcaccgtaaaatactttacaattatttatattttagaacggaaaaagtaaatctattctttttttacttagcgttatggacactgatagtctgacaaacatatctaatcattgcttttttctaattatatataaaccttatcaaaagtataacttatgaaagtactcttcataataaatatattaatgctattttcatatgaatcataatatttttaatctattaatgatataataatttgaggtttgaaggcatcgtcttttaagaatggagataataataatagttgtttttttgtgttttgttttctgatactggtagtatttttctaagtgataaggaggtgaatgactgaaggtgatggtcccgaagcaaaggggtgttgttcttttgctcatgaaattgagagatcaaccaatcattaaattggggtaggggaaggggacaaaggatgcttggtagtttgggttgtatcctactacctctagcccattgccaaaacatttaaacattttaaaacccttgttgatttttaatttgggggatacaacaacagcccattggatggaaacccgtgtgatttgtttttgtgctgcgagatttgttcgaggctgattggggttttcagccccttctgttcgatgatgtctgtgcctttagcctgacggtgaaatttgtattttttgtgttactatttggtatcccacataatttcttcagctagcttttctcatttgtgccccacttcgttttgtgttctttgaatgtattcttgcactctcttcagtgaacacaatatactattctctactatcttttaaataaagcttgagtcgattcaaaaattatgttttaatcgattcaatcaggaagtaaattctaccagttcagctagacttagccgacatagttgcataaacaagcatgcaaatggcatggaatgcggacagaaagggcaagagctttatgattggcccgcgagatttgttcaactcatctgctattgtaacatataaatacgtactatactgtagtatagtactgtatactactacactgatgagagcattgaaaccactcggcagccatagcagggcagcaggcttaccagttgctgctgctgctgctgcagctgccgtagaacacaatttattactagacctgaataatgcatttgagcaactagtacaaaacaaaattcatatactaaaactatcttgatgaaaatggagtaatagcttaattacactgttatgagtacgggggcagtaataaaatctgttcttcagaagtttcagacaggtggtactccgcagtacctactggactgagatttctttcacctgccaaacaacatctatctcgagaataacgctaatgctaatcaaagattaatcatcaagctcccctttttttcgtggaacgggaatacgggaacattagcccaaatttgtccggacagtttcaaagaggacaatttgtacaaacagtagagctgcctcttgcagtatacaagccaaacagtggcgatcaatgtgtaaaaatctctgccctattgcaaatgtgtcgtaccatttctgtttctgtttgcaagaggatgtgaaaacactttagaatcacagggttggcaaggtaagctgatcccctttgccttaaaatgataaaatctttatggacaagtcatccaagaaggaaaaggccaagtcattcatgcttgcttctggaacactcatagtagtttttctttctcctttagctttaataaattaaccctacttacatctttacatccaccaccctttcttgggttaaaagcgtgggcctttttactgctgcaatctgcaagtaggatggtttttgtaggagacaatatctcagtcattagtgctactcatctttccttgcaggcggtcctcaatgcaactaatgttttgcagaagcaaggtaaatagataatatcacaatgtaaatagtaccaaatttactactgtaattaccaacaaaatgctctccctgcaaataatctgaacccaaaaaggcatcaaatttctactacgaatagtccccatatgtagttgacttcctggtattcctgatttcttggcagctgtggaaggagccgaactctagtgtttttgactccgttctctctttagttcccgttgttattgattccatccactcagaaggccgtatatggtctgccgcggacatcgccgtttttggggatttgctgagagcttagtgtggcgccaccccccctccctcttgtttgttggagtagttttttttcttttcgtagtagtccatccttttttttttcttttcgcagttggttgttggagtggttttctccctcccggcataggcttgtctggccgagtgcattgtgtaacaaaatatctattcttctaatatattgacgtgcaattcttttgcgtgtttgaaaaaaattgcattagcaatttaggctctgatcggttaagtagaaaaatgaaaaaaaaacaatttgtttgattttgctgtcatcgtttgttcatgttttatcatccgagctaaaattcaactttagagttgattttaaggttttctttattaagagtttattttttcagtatcaacttttataaactcatacgtgcaagttttgagtttatgattgtttaggcccatttaatttataaggaaaatatgaggaattcggaggattttaatcctatggaagaaatttctatgaagacattaattagaaataaagcattgaattatacacccttcgtcccataatataaaaagttttagagttggacacggttattaagaaagtaggtagaagtgaatggtggagggttgtgattggatgagtagtggaggtaggtgggaaaagtgaatggtggagggttgcgattgcttgggaaaagaatgttggtgaagaagttattatatgttgggacaaatcctaaagattaaaagttgttaaattttgggatggagggagtattacttttctttaaaacactcttatagagatgttaattagataaaagtttttaagattatctctctcgttttatttatgtgtttgtattgtggcctaatcaaacggtaattcatatgttttcttttaagtctatctcttttatttgattcatgtgtttttcctgcgacttaatcatcaaacgacacttactgtgttttgcacttatattcctattaaaattttgtgccttttgtattattcaatcatgtgtttcaaaggagccctattagtttatcttttcacaagttatcagccacaacccaatcccaaaatattttagggctcttttggaacaaagggttttttaagaaattttggaggaattcaatcttataaaaaatttctacgtggttcattgatcaaaggaatattcgtaaaaaaatcctatgaaaatcttttggtttgactcaaaacataggcctatcttataatttatgtatttttactatgctccaaccaaacaagtattcatatggtttttctgtatttttttacagcctcatcttttcacttacgcttatgcttatcgaccaaaatttgaatttttaatcttaaattgaagctgattttaaggtttttttatcgaagtttattttttagcctttgcttttacatcgctaagaaaacgtatataaaagttttattcataaattatttttcgtttgcaaatatattgtttgacttatttcgcagataaaccaaacgatgcggctcttagtccataagatttcaagtgctacgacactctaactccttttcttttctttttctatttcagtgtttttaaaagttctgcgttttaaaggaggactaaaaagcaaaatttaagccggaccctcaatttgaggccaggataacaacgacgcgactggctttaatttgactcaccctgcagctcctagaattctgaaacgtgacacgcatcgtggcaatgcacacaattttctttcatggcagcgtggcaatctgtcaggaatgaactggagaaccctactccaaaacagttcttttttaaaaaaacaagaagttgaagaaattaactccaccgtctcaaccaatgatcaacgaaaccgtggacgcgctgcaaatatttttcccgggtgctgaaggaggacgcggcgtgcgtgcgtggattcgttggagggaaaggggtggggagcaagtgagcaacgctgtggccacacctaccgggagtgtaccagcgatgagcctgcaaaattaaaattttcgttttagttagtttagtagtaggacatgaacagtttcattgcacacggtttttattataattgtcaaactccccttctgcaccgtacaaatatttttgaaatttttgggggaaaggtgatggatggtcaatggccgacttgcatgagatctctcttgatgagccttggtggccagccttgtacgagtcacactaattataacatgttatcagccaccttacttcttgaatttttctcagccggccggccagctgttggaaattgtctctttaatttcttattaagagtttatgtgcacatgttataagtgaaccttttatatctagtttttttaaaaaaaaattctattgtcatttgtagtacttctacattctaacactactggagaactgatttttcgtcgtggtatctaaaatcacaaatatctcggctagattaagaaccggtactaagaatgttttagtaccggttctaaaagtccaagtccctagaaatatttttaataccggtggcggtactaacgatgactctagggttagttaaaaaataaaacatatatatcaaagttagatgtgtgtagtaagtgggatggtaacacacgtaagtgctgaggtgagagatattgagttttaatcctacatcccacatattattttgacttggtatgcatttttagtaccggatattttaacaggtaaccggtactaaagatcaagatctctagtctcgatttgcttgtcacagttattgatctctataaccggaatcaatggggtttccaaccggtgtaaaagatgagttctctactagtgtaacttttgatatctttatcttatccgatgataaaaaaaactaatcaccttagaaaacttattgtaattattcattggaagaacacagtgtaactagagtctagccaggcccctgccccctcttttggttgtaacgacagtttgttcactggtaattggctcaaaaggtttcatgcatatatcttgggaaagctttcatatgtacacggttaggttgtggcagtttgttatattattctggtctgatcatgaaagtttctttaacctgcaaattgagcttgactatgtgtaaaaatcctcaaatggggttgagaattttgcaactggtgcagaaagtgtaatgcatggaggtttgaagaagctctagttaattatcacacggttgattactgcaaagtgcaaacaccaccaaacagttgggcacctaaatgtttctttacagatggcccagcttattctaatcacaggcctcgggatcggtgctgacggtcacatgcttgttggtgaggaaaaacataaaaatatattagtgtactactgtagtatcacaaaagaaaaccatacatacagagagacaccaaacatctccctgtgcatggaaggactgcaaccagtgaacaggccagtctctcctggcccccttcttaagctccaaataattattcattaattaactaagctactactagtactagttaaacttttcacactttctctctcattcatggctcttcattaattaactaagctaatggcattaaaactttttacttgctgtactcttctctgtctgtgtcattcatggcctttttagtttaacctttgattggagtggagacgagaccacatacaaaaattcctttgtaccattgtttggtgtgtgtgctttgtaaaagccatgcgcacaaggttgaggaccataagatcacctctctgtaaagttctctctgttgatccaaagccggcacacaaagatttgcataagccaaaatgctgagtatcctgttttcaaaggaaatgctggttgcatcattgtttttaacaaaaaataatttcattcaccttacttttccatacttgttcatcacacaatctcatcaaacatataatgcatgttaaaagtcttttttagccattctgaacacgatctatttagaatggctagaaatctcatgtctctcgatctgaaggaattgcgtctaatctctgcctacctaaccacaacacgatagttaggatacgcgtacatatgcgcgcgcacgcgcgcaagccgtgccatgatcataagttgtttccacccaaggatgatctatagctgaagtaaggtaggagcacacgttttaagccacttacagcattggtttgggaccatctctactagcagtactcctcctcttccttctccacctagctagcagaggcagaagaggagggccagcctctttacattggctatagctgcaattgcatgtactgctgctgctactcatagcctgctcctttagttgcaagcaaagagctcaaggcagcagcaggaggtagttaccatctcctcggcaatcattggaacccgaaaaggccagcagaagaaaagaaaaaaaaaaggatgagatcgagcaactgcagctgactggtgaatgctcagcttgctcattagagtgagctacaagcaacaagcagcaagtcatcaaggggagagaaaacggcaagctgcgatcctgcaaagaagaatgaaaacgaccttgcttttttagcagatggttatcttggagttgatgccagctactgccagtacaatagtagtagtgtcactgttaatcttgtgtgattagtttaagggttagttatactatatgccttgttgagatctgacctgctgactcccctccatgcttctcattttctcagtggagtgattgctactactaatttattcagagatgtatagattttttgtgtaagctggagttaagatagcttttgatgccatctttctttcctgaaaacttggctttggtctccatccttggttggcccaatgctggtttccctcacattttgcctctccctgaattaactttgctgcattgcaacccagctgtgttcctgcgtgcgatggtgatgcatccagtgctgtttggtatgccaaccaaactcctgtgctcccaaaattgtttctcctgctttaacacattgccccaatgaatttaaggagagcaaaattataggcttgtgatctagccgcaaactttattacttgctatggctagtatataagattggtcgagctatcagttaatttggttgcatgcatatgtaaccggagttgcggcgcccattgtggtgtacctgatgctactgcaacaggccaagcagatatgtgtctgaaactctgaagtaaaggctcattcattctatagctttcttctagctgggacaggcaatagagttcataaattacacttgatcgtagcatacagtagctcttggacttggcagctatagaaccctagctggagcctgaaatttgcggagagattctctcatcccgtgtcaggcgccatttgataccgtcctgtcttttgctctgcaaaaagtcaagttagtacaatcttatcgggacaattgtgccatactttggtttaattgtaattgtaactttacctcttctttctttaggcttgtgattttgccctcatctttttaaccgaaacttcaatttatccttaattgctaagtcatcttcacagtattaattttaaagacaaaaataggaataaaaacacaattgatgtataaaagcacatgcaaatttgcaataatatgtaagactatacatgtctttccactataaaaaaaactctaaaattagcactgttaagatagcttcggtttaaaaagggaggacaaaatcacaaaccctgaaaaatggaagtgaaaatcacaattgcccccatatcttattactaatactacgtcgtactcccacatcactgtatttcgttctgtaggagtatttcctaaatgtacggtcagacacagctagtacagacgtacagtgtagtagtagcttgtaccagcagaggacgacatgttggcatgggcccacctgctagtgacaccaacagtgtgcacagtgaggctcaggatacagtagattctctcagtcacaggggggctgggtgagtggaaatgcatggcagtgcaattgcatatatttgcatgcatgcaattgaaggtacagctttttggggtccaaattcacccagcaatctgaaaagcagcttggaccatatcaatctgagccagccaaattgattgactccaccaaccactccccggtcttgtcactccagcttacgaaaaactttgtctcgaaaatgtgatgcaccagaaaccttagcgaagattttactgcctccgtcggtggctgttaccacacatgaaacatgtatggctattctatctaagatgttcttcaatacaaagtttacgaacttcacaaagccccgttgccacgcataaatttcacagaattttgcatgttgttaagtttaattcccttgagattctccaaaaaatatccttcattccaacaaggccagaaagaattctagaagtcgatcagagctctgctaaatgtgttaggaaacgataggcaaataaacgataaaaaacaatacatcaatcgtagaagacacgagatttaatgtgaaaaacccttccaaagcagaagagagaaaaccaggcgccagtcagcaaatatcttcactatatcggggtaaggttacagcgccgaacggtggtatacaagaagtatatatgaaagtgaaaccctaaaaggaagttagcctccggcgacggacctttgcttcgctccgtccaaagctggcctttatacgtgtgcaaatgaatttgaatcacaactcaacaaaatgctagggttcataatgcagggcattcaagcatgcaagtgtgtatacatttgcaacttggcagagcccaaacatgaaacattctcagaaatgcgtgcatgtccagttggaagagcagaaaaaataggaccaaaatgtgggggagatgatgcaatatccatgagaaaagaaaaaaaaaagccctagtgcatggagctatatcatcattgtgtgatcttggcaacgaatacgtacgatagctgcactccactagacaacttgcttatcctgcaaacaggtgaccatcctcgtgtagtagttatcacacttaagctctctatataatattcctcaaaaattggggggaaaaccaggggcggcaccgccatggatctcttctctacatgcactatgatatgcagaaacgtcacctgcttggtgtgagtacgttgcattgcattgtcgtcgtttgcattctccatctctcgctcgttttctggtccttcacaagtcaaaaatgtcgtcgtcattggcacattatcatttctgggtatccaaggaggttactgtactaaattggttcttcagtttggatacacagtcgatcgatcagctgatgatcgatcgatcgatcgagtttcatttcagggatgagacaatgcaattatcaggatactacatgggggtgaatttcaggggttctgaaattaagcacaactagctctcaagtttggatttgactttcactgtcaatcttaacttcttcggtgatcctacttgcagcagcactactgaacatgagccataatagcacaggtgacaattagtcattcttattataaaaaaaggagtccatagtggcttgtaatttccattggaaactattaatgatgtcatccatgacccatggagtaattatcttcagcaggtgatggcttcaacgatgttcttactatttcacttcagagctagagattagcagagcagcatgacagtgtgtaaagcctgatcttttgctaacccagtgcatggattaagaaattgatcatctccagttcagaagaaaaatatatatatttctctcgttgctgccttcctctctgtgcttgtgcagtgtctcatgtggggtccaaattaagaagatcatttgtccttcctggtggctatcaaactattgcgtgcatgcttcattggcaatttggcatattctacagttttgcttggaggcaatgttggagccttctatttaactatcatatctttttgaactgtagagatgcatttcatctactagtagtatatattaaggtccatatccatctccaaaagaaaaaaaaagaaacaagttcttcacaattttcacatgaatcctgatttggagagttaatgtaccaaatactgcttgcttgtagggcaccgaacttctgaatttgtctcgaactctgaataattaggacatagaggtcattgaccgtcggatgtctgtaattttcctgcggataattttggctgtcctaggttgctgaatgctgatgatgatgatatatggtatcctaggcaaacatttttatgttctatcatgatgatgaagcgactgccaaactgctgtttcgaaattctttagttagacaatctaggatgaacacgctccaatgttggatctagacatagtttttgtcgctcaggtaatgtgaaatgtggagatggaatttataggtttctggaattctgtccccaatgtatggggcattctgcatagtagttgcaggggctgcagg

SEQ ID NO: 5232 - DNA, 146667 bp, Oryza sativa
  unsure (1)..(146667): unsure at all n locations
ctccccctagccacctcagcatcgccccgccacgtcggcagggggacggcgccaaagaggctggcgccgtcctgttgaacgacggcgccagccactctggcgccccaaaaaggaccatttttgggataagtttttctaggggtctacttgcgaaataagttttttaaaaggaccaaaatgtgaaaaatccagcacctctctccatgcaattatgtaagagtagttagctgcacctttctgacagatccataccaagcggccagctaaccatcggttgggccccaagtgaaattatcacatagaatctgcaaggctagtgacttttacttgatgtaaaagaaaaaaaagtcttcctcggatgcgaggtgagcttcttgcttgcttctgcggacatatttatgtcgctcagggcagttttcttcagagagaatggcctgcattttattgcccatggttagttatgtcagtcacctgtccagtgccatgccactgcctgactggcataccagtagacagtagtaggagtagtagcctttgatcataccaccagtactagtagacagcagtactgtactcctactccctatgtgcctccctccgtcccagatattttgattttttctcgcactaccattcgtcttatttaaaaaaaataaagttattatttattttatttgtgacttactttatcatccagagtactttaagcacaatttttcgttttttatatttgcataaattttttaaataagacgagtggtcaaacgatacaaacagaaagtcgaattcccttatattatagtacggagggagtactggatgtggcacatcctattactacgaatatggacatacatctgtccagattcattgtactataatatataacatctatttctagatttactttttttttacggagggagtatgtgcttaagttaatgatctcttttgactactagctccaacctctcctattacaacttcccttgagagcaaggctaataatatagctgacttgttggctataaggttatttgcaacattctctcaacccactcatataatagttaactcgttataattaatacagggaccacttgtctctctcacatagtttcttggttcttgtgtccaagccggctgtaagtttacagcccgcttctcctctctctcctccacctcagtatttagtcggtttaaagcctcctattatatttgctctaagaaatagaatggcacattgcatgataatacatgcatgacgctgttgctgctagcactctaagggcaagtactataaacctctacgcacttgcccctaggtgccatgcttaagctcacacgataatgtggatgagagatatgaaagaagagagagaacgagccacctcttatgcaaagagcaacttctacacaaactccaagagagatgagaacaagagaccaatgaattgataggaaacaaataaagtaaaattaatattgtgtattggggcaagtgtactagaggtaatttgttgtatatattgcctcttaattaatgagttgatgatgtggactaaattaagggtgacctccactgtaaaacctgactgctggttatcgtttgctactgccaactccctctgtccatttttttaaaactagtaacatcccaaaaagaacttaagcagaaagacaaaagataaaaatacccctaattaatagaaaaattatattggtggatgcgtatatgagagatatggaggaatgaaatttctcaatttacggaagaaggtaggagtttgttatttgggaaaaaagtttaaactaagttggaacggagtagtactcttcagttcaggaaaaatacatttgctagtgttgacgtataattgtgccgccacaccttaagcacgctatgtgcaacacggagacacacacgcgcagacacgccgccgtagggagtaggtagatgccgccgaacgaacagccgggaaggacctcgttaaggtgaacgtgcattggtttgtcctaaactcggcaggctagctaggacgccctctaacgtcgtagagatgagagacaacgagcaattaggggatttgaggagaatagactttgggataggtagcaagaaagagggagatgtagaatatagagggtttggataaataaattgattttgacgattgattgattgttatttcaatcgaccttaacccccttatatttatataggaggggtggacttacttcccagggtctttttcacatccaattaggtgtagaaatcaatcaaaactctaaaatctcaggcattagcagaaacccgagaaccaacaaatcggactcgagtcggactctgccggtctgactagctacatgccgccgatcagatcgtccccctgtcatcggtctgaccagcccgatgactgcgatcagaccggccttcgcgtggcaagtctgggttgtttttgaatttggctgtagtttctttttcatactctaggagtcaaatttggatattaacaatacaatttatgttcagagtaaaaacatttgccactattactggccaatgattgtcatgctgtgaaagtgttgatttctatcattctatggcaaagctttactactaataataatcagtctgaatctgcattctctctacgtccacgaccatgagcgaatagtacatgtgcctgtacttacctgacagagtagtcttgagttcttggccaccacatcagcttctttggtccccagcaggcagggatacagtagtacggcaatgtgtggaaagtggtggtaaacagcataggattttactgcaagcaccggcaaagataaacaagaagcatctgatctatataatgggatttgcattgtcattattacactagaaaattacagtacttctttacaaatgaaggtcagaaaaagatggcgacatgaaaagctcgcttgctccaattgtacgtccttttgagatgctctttctgcaagctctcttccaagcttactaagatctttatcgtaggcaaagacttgcgatcgatgtggatctgtctgtctgtctccctttgggcacttgtgatcagcttttcaagttcagacactgcaaatactatgtagcacacagaacaatggtcatgcactcttttgtctctactactatcttttgatccttctaatcgatcttacgtgcactctcaacattgccttttatgccgttccgcatgagacgattgctacactgagagcttagctaagtttaaagtgtgttcactgcgcttttgtgccaaaaaagcagctggaaaagcagcaacaactttgtcgtatgaattggatggaagtgggaaatataataaactacagggccacaaggttattcctcaatttcatcgtataatcagataggggtatatatactgcatcgacattgctattccctccgttttacaatgtaaaactttctagcattgtccacatacatatagatattaatgaatcaaacacatacatatgtctagattcattaacatctaaatgaatatggggaatgctagaaaatcaaatcttacattgtgaaacagaggaagtacctaaatatcacatcagatatacctgaagaatgtaatcagatattactgaactacacttcttttcagccacaccatgcatgtaaacactagaaaaattatgcgactgtaaaatctgaataactaatgacggatcgacaagctttaaaatgaatcatgtcaacagaacttagtctgagaggctgcagtttgctagtagcatgaaatcaagaactaacttatctgacaagagggagtatcaaattaacaaatcagagaaggatgagcacatgcgtaacagcaacagtttcttaatttactcctacgtactaacagtacatggatagaaaacagttcataaacatctagcatcagttcctctgaaaaccagaaaaagaaggtctctatcacattgttgaactcataataaacgagtacaaaaccataaacctgacagggaaagatctaaacggattaaaagaaataatgaaaaaaacatccttacataaacaaacgagcagctgcaaaggcgacgtgatattggcacggctcaatcaaagagtggagcccctcgccttcggagcacaagctttctgattgaaccgcaccaatatcccgttcccacatagagagcagaacaatcccccaacgatcagcattcagatcagcaaaacaaggcaaatcatcagagataaaaacagcaatccaatcaatacactccctctcaagtactctcacctcactaggatcaaacaagagttcatgaggacatgggatcagagaaacacaacagctagctaactatgcaaagcaagtaagcaactagtttttttttcttggtttcatgcagaagcagaagtgaaggagatgagaagaggaggagcaggagggagaggaaggagtcgtaggatcctttaatatggcttcttggaggcaatgcaaaagtgagggagaggtagttgtagatgagaagaagaagaagaagaagaagaagacgaggagagcttagctaggagcaaaagcacaacatggctagccgctacaacgtgagtgatgacatataggaggaggagccgaggaagggggggcgagttggaacagcaacggcattgttgggaaaacgaattgaatgggccaacaaccaaacaaagaggaggttggagcatttatgagacgcaatgaatttgaacaaggtgagagaagcagcacagtacaagtagtactacgctagaggaggtcgtcacgctaggagatgcctcgagcgagagacgatcgatcgatgtggacgtcgacattaacgacgattcgatcgattccaataggcggcagtggcagcagcagcagcagcagcagcggtgtgggggcgtggctggcttgaatgcactgcagtgatttcccatcccgtctacagcctatgcaggcatggcatgggatgtttgcctccccccctctccctgcagctgcaacctgcatctgcatgccatattgccattgccacccccaagccttctctctctctctctttctctacgcataccatgcatccatctctcgatcgcttcttatgttgcgtcaggttcgcgtgacgccaatggctagctaggagtagtgccgtgtgatgcgtcgtttgccggcaatggctggcttccaaggaaccggctagtctttgtactacgtcgtcgttgacgacgacgacgacgaccaatgtcttctgaattctgatcatctctgatgagctgtgctgctgcagcagctagaagaagaagaactgatcgatcagatctcagtgattctgcgtagtacgtactagtagtagaatgcttgaaaagggaaattaattgccgttaaattcttgaagcgatcgatgaaggcgggcgtgtagtcaggatcggagtatacgacgaccaccatatgtgcatccatcatccgtgaattgatgaagtgtttggccggtgcgtgttgcgtgacgccatgggctgctgctgctgccaacaacaacacgcagtacaattaattatgtaaacggcaggcaggcaggcatgcacgacatatatatgagtttgatgtctctgcatatatggccatgtcgacaacgataatcgagtcaaaatggcaatgatacggggagattgatcgatccagtggccaaaccaatggcgatttggtctgaaacaatttttcgtcgtcagcgatatctgtgcatagataattctcataatgttctttaggcatgtggatcgacaaagggaatcagttcatcatgcatatgaacctttatcgctggcaatctcacgggcgaaatatgattaattatctctttttttttctgaaagaatacatgtctacagtgaagtagctgtagttttttcgtgatggcgctttcagtgattgcgagctttagctagcaatgcagcgctacgttcataaatgcagtatacagtatactgtatacgtactggccatgcatcgtgtacgtttagaactggagtagcggcaatgaatgatctgcagtccatatatatacgtacgaacgcatgtgtagcacgcagacatcatgcttagcatgaatgaatgatcttgcaagccccagccagctttaatttaagttttctgattctggcttgcttactcttaattactactaaagtgacaactaatagtctggggttggtaaggaaaaggattcggctctcacattattcttagcttatcggtaggacctagggtcctaggcttccattgatgggtgagtttcttgtgaaaatggaacacacctcattgatgtttgataagctacaacggacattgttttcaaaaaaaaaaaaaaaaaaaaaaaaaagctacaacggacatgacttgcccaattcacgagcttggaagccaaaaaaaaaaagaaaagaaaaagagaaaaaaggttaacaatgaaacaagcacaattttgcactccacccaacttgaccaaaacacagttggttgtaaattgaatcgcttcctgcattgttctcttctgcttctacttggccaacaaatcaagcacacagcagctagctaatatacattccaatattaatccatcatcccaggccacaggcaagagcaaccaaaaataagatcgatgcagcagattgatccctacaaaaccccaggaaaaaacaatcaggattccctgctcgcggcgcagcttcatcctgacactgcacacattgaatgccagtgccaggatgaagaaccaccatccaggctctgcgaccagcaacagaacccaaacgcagtaaatttaaggacctcgtgccggcgaccttttccatcagcagctgctgctgctgtcggtagagccaggcaggcaggcaataaagcggcaacagcaaccagattaatgacacactgagatctagattgacctcgtcacagcaacggtaaaagttaagagaccacaagagaacacattcaccagagccacaattacttgggagtattatcaagcagcgtatatatgttcagaacaactgagaggatcttggcattactactattagagtttaaagatttgccacgaggtaagcaaagaatatacacttgtttggcaagtcttatttacaggagttgagagcgatattgctgccgcgcctagagcagcccaaaggtgttctcgccactgtaggtcatgtagaggaacccatcctcatccttgttctcctcgtaaattgcggacatcagagcagctgcaaatccaacaaagtgatgaaatgagataacatgaaccatgcaggttctttgagatactgggatcataaaccatgcagtagtatactattcgaccaaagtccttgtgttttcaaaggaaaatgattcaagggattttcagacctgttggtggaagagtattcttcacaaagatgaagattgctttctcaggactgagcttgatccgcttccgaacaacatagacaaactgcccaacggtaagatcagcagggaccaggtacctatattagaaaatcataagctactaaggatgatacggtaatattgattgatacttgatgtaacatgtattaaagtttcagagcaacaaaagtttcgagcttgaatgccatagccataccggcatccttgcaataataaattgaaacacagtcagctgcttttggaacatagagttaggactttacagtgataaatagtaaatactactacatgtttaactaaaaagagcataaaggatttaatgtgatgcaagtactgtaatgatgctgtactgctagtaccaaaaaagtttataggacaccgttaatcatgactttaagtccttgaaacaattataataaaatgaaatatgcccccaaaggacccacaagcaataccattgcatcaatgcagtcctagataaggataaatgaatggcaagagctactagttgctatcatctgaacacctgaagtcctccactagcatttacttgatagcaattaaagacaatattccttcctttagcggttcaatagactaactaaataaaaatctaaatgctatggtttcgtaaatgcttggaaactgactttttcttgtcgatgtcaggaatatcacttctttcagctttctcaacaatcacctacattacattagatatgtaacaaattagagcaaaaaaaccacaatgaaggaaacaacataactgagcaatatgaagagcaagcttacaggaattctgtcactgtacttttctctgatacggttagcctcagcctgcctcctctctgaaatacatgcacaagaagaacaagattttggttattatgaactgactaaaaggctgaaacatctctaaaatgtatacataaatcaaggttgtagaagatggagaacgagaaatcagagatttcaaatcactgtagagaaaactataataacagagtgattacaagaaagggcaaccaaaaaagtgcaatacttatgctgtctatttctcaaaaaaggaatctatgctatcatgttggcacacacattaatcaacttaaatattgttcaagcacaaaaggtaaaagataaaaaattagacaggaagaaataactcagtgaaaaaaagcatgatactaaacatcagggccctttcacagaagattgggcaggatttacagcaacccctaaacatgcaatagactaccaaaaccatgttctcaagcataaagtgttgggtgattgaattggaaagtctattccttatacgatccatcagaaaaggaacaagaccacataagtcttaaaaacaaatcaaagaatcagctaatgatgctggattgtcaggtcaactgttaatttatagtctacaatactagagatattgggttttacagccttacataatagttaaaactggtgtatcagaaattcagatagacacattgaggctctttataatttgattcatcagtaatgatgacatattttccccattaaccatccctctatccatccgcacagaacctactattcccattatgaaaaggcatgtactactattattactaccaaattcaaatcagtcacacaactttgtagcaatcgcaacctactcctactcccagattcgcacagaacatgcacaattcaataaacagttgctaccacacacattcagatgttttggtaagccatccccttaaaccgggggaaaaaacatattcctgtgtctctttctctcgtcttcgcacacattcaatcaattatcgaacaaataaacccaacacgcaatcatcgcagccacactactaaagcacatataggaaaaaataaaaagaggaacacgataagaaaacaaaccgaccgagcgtgtggtccagcttgaacgagctcttggccatggcgctccttcctgcacacaatcaccaaatcagcgccccccaaaaaattaaccaccagaaacacaccgatcgaagccaatcgcgcaacgaaacacaacaactcgatcaaacccttacgagagactgagctggtcctggagaacacgagcaaaaacacgaatcaaccaccaaatcggacaaggaagcccccctgatcggcgaacccgatgccgaatcgacggaagaggggagcggaaactcacgcgactcgccggattggattggattggattggggagagggagggggagggtttcttcttccttggcgcaatggagatgtgtgggttgcggagacgggtggtgggtaggagaaaaggtgtggggttgcgttggtttttaagtaacgaaaaggttatacgacttggacgcgctgcgcacgaaacgtaacgaaaaggaaaccttgattaaaaactcctctacgtttcctccaagaaaacttaggcttctgtaatccttaagagaataatattgtgacttacgttaattcatgaacaatgtttcgaggtagtaatgtataaggtcgttatgaaatttacatcgagtacaagcagtaatatacgagttgtttttcctttatattagctactccctctgtgtcaggttataaaatattttgactttagtcaatattaaactgtttcaagtttgactaaggttgtgtttggatgggaactaatcctttccgcacgaaaaacgaaacgatctattagcatgtgattaattaagtattagctatttttttttaaaaaaaaagattaatttgaatttttaagcaactttcgtatataaactttttgcaaaaaaaacgtaccgtttagtagtttgaaaagcgtgcgtgcggaaaacgagagagaggggttgggaaaagagggtaccgatcacaccctctttataatactaaattagtttcatcaaatcaataattgaatatattttcttaataaatttgtcttgagttaaaaaatgttactattttttctacaaacttagttaaacttaaaacagtttgatttgtaaaaacgtctcgtaatctgaaacgaacatagtactaagtaatgtataaggtttttatgaaatttatatcgagtacaagcagtaatacgaattcttttttcctttatattagcaacaacatgagatcaatacgccgagaaaatgttcagctgtccttttccaataagcactcaagatgcataatgtttataactttatttagatcgttttttttattttaaagtctttgtcgataaagacacgacaactccatcctagcaataacaatcccaaaacattttaaattgacgtattcgatgacggcccggatcggcccagcacaatccactgatcagcaatactcggcccactgtgttcagtgggcaaagctctcatcccaaagcgcagacaggcctcgttttggtgggcctcaatacatgtgtataggccaaaattttagttcaatctcccggcctatacatgtggaagggccaaattgaggcccaaactagccatcagggcagcgcaaattctacaacgctgcagaagagcacacctaccaggctaccaccgaccaccgtaccacgtttgtatctgatcaacgctgatgcaaagacgacggtcactcgttcttcgctgtcgccgttttgtcagccatcaatattttccgctgggggacagcggaacgacgccaaccgctagtcattcatccagtcgcagtcatgtgacctactccaaccgtttcatattaaaaatcgtttgattttttatcaaacaatttttttagaaacacagtacaaacgcaggcgctcacaacgtgcacacactcacccctatgaacatttttatatttgatcaaagtttacagaaaaatactctctccattctaaaatgtgtagtcttacactatttatattcaatgatcaacaacgtttgactgttcgtcttatttaatttttttattagtattttttgttgttattagatgataaaacacgaatagtactaacattttttttgtttttttataaacttttcaaataaaacggacggtcaaacgttagacacggatacccacaactgcacttattttgggatggaggtagtataaacaaacattgcatcaaaatttattcaatattaaattcaatgggactaattccgtgttgtagatgttgttagttttttttttctataaatgtggtctaaccaaagaatttgacaaacaacaataacgataacaatatgtacagttacgacgatggaataatcatacatctgaagtcctttctttaaaggatcaatcctaaggaagccaacagagagagagcatacatttgaaactagttctttgttcctgaagcaatccactgttgatgacctcgggatggtaagcggccaggcacaggcagacacattcacggcagacagcgtcggtggcatcctgcgcgacgagaaaaatggcagcggccgtggtcggcggatccctcgggcatttggatacgagcgacagcggacgggcagacggctcccagctgcggacagacgacggcggacgagagaggcgacggtgggctcgcaaaacaggaatagagaaacggcgaagaagaaatgtctgacatgttggggacggtggtgggtggggggggggggggacgggcccgtatgcacagagattattattttccagtgatcacacacgaagtcacgaactaaactggctaatgaaaaccatgcacggcaaattccaaaataatcaacctataattacgtaatcatgtgtacgtaagatcaaattgtttaatacgaacaaaataattatgatgtgtatcagatgatttcgggagcaaggaagacggagctgttcatggggcagccgtaccgtaccatgccggcgaccagccggaaccgaggctgggcaccgttgagcactcgagcatgtgccgcacggccccgtccaccaatggaccggcgatcagaggcagccgaacgacgaggacatgggcgcgcaccttactcggcggcacgcgacccggttttcttcgcgcaccacggcaacatcgaacgcctgtggtattaatagagcaggagaaaattatattgagatatatacatggttagatttttttagataatggaatataatatcccggcctttgctcaaaagagctacagggttagatgaaaaaaacgaaacaaataacctgcaaaaggagaggcaaaaggcagagattaagtgatatctcccaaaatttcaaactcctgcaggatagaagcccctgctttgacccatgctctctcttcctccttgatctttgctaggattgaggatagcgaatatgcattgttgcggaagattcttgcgttcctttcgcaccagatttcccacgagattaaaatcaccagggtcctgagaggtttgcgtggagtgtttggagatttcgttacaagtgtccaccattactcgactgagtgatagctatgccagttgttcatctgaaggtcagtcccggtccatctctgcatttctgcccatatcctctctgtgagtcacatttggccaggaggtacagggccgattcatcaacattgtagcaaagtaggcaaatcttttggttttgccatcctcttttttctagcctgtctgccgtccatactctattttacgtgactagctaagagaagaacttgcacttcagcggcgcccatgtctttcagattgactgatagaagatagatttggcagcccttgccttcctttaaaaaaatcgagcgcctgtggtacatccgccgtggccttctcttccccggcaacaccaacttcaccgtgctcgacgcgagcttccacttttacaacgaggatgcccgcctcatctgcgtccgcgactccctcgacgcggcgcgctgcgcttcacgtactaggatgtgggtctcccgtggctgatcaacgccagctgtccacaccggcgcccacgacaggcgcctgccggggaatctggacaagaccgtgcgggtggcagtgatgaggcccaagacgtcgaggagccgcaaggagaaggacgccgaggaggaggtgcttgtcatcgaggggatcgaggtcagccgaccactccacgtacattaagttcgacgtgttcgtgttgaacgcgccagcgagagcgggaacatcgcggcggcgagtacgtgcaccgggagcgtcgtgctaacgcagacagtgtccaccacgacgagaggatgcgttctccgaggaagacggtggcgaggtcactactataaaactaattttcgcagtggccaaaactaatttttatagatgggagagaggtccgcctacaccacaacgactgcgaaaatcatcgatttttgcagttggggcaacagcccgcctgcgaaaatggaagggacgaaaaaaaaaaatcgccggcccacgccgggagccgccgccggcctcccccccctcctccggccagatctcggagggaggggggaagggagccgtcgccgccgcccggccagcgccgtcgccgctccacgccatcgttgtcgctgttggcctcccccctctctcctccggccagatctaggagggaggggggtagccgccgccgccgcccggcccgcgccatcgctgccctcgccagcctcccccctccctcctccggccagatctgggagggagggggaggggagccgccgtcgccgcccagcccgcgctgtcgtcaccgccgccctcgccggcctctcccctccctcctccggccagatctgggagggagggggcaggggagctgctgtcgtggctgggagccgcgcctcctcgccgatgtcgccctccgccgccaccggccgccgcgctcccccctccccccctgcgcccctctagatctgggagggacgggccgggccatgccgccctcctccgtcgccctccttggccgcgccgcctcgcctcctcgccgctgccgcccttcgccgccaccgcctgccgccgtcggggagtgtagaagtgaggggaggggaaaggaggagatgtgtgaggacttagaaaaaaattacggcccgcaagtctatttatatctctatctctactacttaaaaaataagagatgcttccatcgtccgaaaaaacccagcgaaaaaaccggacgagagagaaaaaaaccggacggaaaaaccgtaactgtccggcgaaaaaataatccgattctgtgaaaaaaaaagggcgaaaaaccggtgaaaaaaaccgtaactgtccgataaaaaaaggcaaaaaaaaagtccgattccgtgaaaaaaagggcgacaaaaaaccgccccaagaaaaccggacgagcgagaaaaaaaacggaactgcccgatcccaaaaaaaaatccgattccgtgcaaaaaaaaagtgaaaaaaaatctctatctctatctctacttgtctatctctatctctacacttaaaaaataataaaagatgttttcttcgtccgtaaaaaaaagctaaaaaaaataaaataaaaagtccgacttctatccgattccctctcataaacggaaaaaaaactccgactatagatccgattctcaatctataccgtgatatctcacagatcttggtgaaacaaaatgatgtgtcggattgaagatctgtttaataaacggaacctacaggtcgatagcattccatttttatatgatttcaatttttgggtttgtacttttgcttttgagtccctgtaatttttatatttacatttgagtccctataatcctgcaataaggtacttgaggccgtgtttgttaaaaataataataaaagagagagaacaaaaacagaaacgtgcatctctactacttaaaaaataagaggtgcttccatcgtccgtaaaaaaagtggacgaaaaaaagaaaaaaaccaaacatatccgattaaaaaaaccagaaaaagaaaaaccaaacgtaaaatagggggcaataaaaaaaaccagatcggtccgataaaaaaaccagaaaaagaaaaagaaaaagaaaaaccaaacgtaaaaaaaagggcgataaaaaagaaaaagaccagatcggtccaataaaaaaaaccggaaaaagaaaaagaaaaccaaatgtaaaaaaagggcgataaaaagaaaaaaaaaagatcggtccgataaaaaaatcccgggcgaaaaaaccgggaggaaaaaaatgggcgaaaaaaataatccaattccgtgaaaaacaaggcgaaaaaaataaaaaaaaaagaatcggtccgattctaaaaaaacgaaatcgggcgaaaaaaaacccgtgaaaaaaaatcaggcgaaaaaaagaatccgattttgtgtaaaaaagggcgaaaaaataaaaaaagaatcggtcgaattaaaaaaaaaagaaatcgggcgaaaaaaatcgggtgaaaaaaccgggcaaaaaaaatccgactatgtggacgcggtaaaaaaaggcgaaaaaaataaaaatgaatatgtctaatttgatcaaagaacgtgggtctgattttttaaattaaaacccgttggataaactcctgagtagactcgaaaaataaattctaaatcatatactaattcatcaaattagtctcggttctacctatttgttaatatatcaaattaaacttgatttttaccgatttgaggtttttaaggtgtcacattatcaaacggtgtttctcccgttgcaacgcacgggcactattgctagtaaaaagaaaaaggaaagctgcacaaaaaaaaaagaaaaataacaacaacaaaagttccgttttcccttagtggcgaaaaaaaaattgtagatccgaaccaaaaaaatccgagtcctataaaaggcaaaaaaaaagtggtgaaaaaaaaatactagattcaattcctttaaaaaccggaaaaaaagtctgattcctataaaagcaaaaaaaaaactgaaaatacatctaaaaaagtttgtccgattccctaagaaagtggcgaaaaaaatagttcgtaaaaaataaaaagcttgttcgtataaaataaaaaatgcacacgagaaaaaaattgaaagggcgaaacaaagtctgatttctaatcgatatatatctcttctctatctctaatataatctaactatttaaaaagataaaatacacgagaaaataaaaacggttcaaataaacgcgtgagaaaaaagtcagaaaaagtgcaaaaaaacaaacactccaaaaaggttttccatcttccataaaaaaaataaaaaaacgggcgagaaaaattatttccatcgtcggtaatttttttaaagaaaacatgcgaggaaaaaacagtcagaaaaaacgcgccaatttaacaaatggttttaaaaaaccgtgcaagaaaaaaacaccgtctattaaaaaaatcgctctgagtcggatatgatccatcgatgtttttgccacctactacacggcttttatttcgtcatatattctccttactgaaaaaaaaagaaaaaagaacatttgaaaaaaaaacaagcaaaaaaacgcgcgagaaaataattggcaaaaaaaaggcaaaaaaacacacgagaaaagaaaagcaaaaaatggagaaaaatatggttttcgttgtaaataaaaaagcaaaaaatacatgctagaaaaaaacttttaagaaagaaatacgccattcaacttttaagaaagaaatgcgccatttctgaatggtttgagaaaattgggcaagaaaaaaacaccgtttataaaaatacaagccgctcattaaaatacaaacattgtcattgacatgattattcatgaaaaatatatattatcattagaattttttcacccgttgcaacgcacgggcatttttgctagttcaagtctattttcgcaggtgccgtcgcaggcggacattaaatttcatcccgatttctatttttataggcggtaatttggttctaagggtcatgtccgcttgcgaaaataatacaccgtgtctgaaaaaatgatttttctattagtggttcggcatcggcaacttgctcgatgacatcggcgccgacggcgaccggacgatcgtcgtctcgatcgtgacgaggtccggctgcgattcggtcaccatagtgtttgatgtgtaactaatgaataatacggtataaataatgacataattactgactagtcgttctttgattaaatggcgtcattagtcgttctttgattgaatagcgtcaatagactcccatgacgtaacgttgttccttagtacccgtactacttgttgtaattaataaggaaataaatattgactcgtcgttctttgaatttaaatggtgtcaatggtcaataaaaaccttaggggatgattaaaatggaatggaaggagtaattagtaatgtcaagacctaaaaaccttaggggatgattaaaatggaatggagggagtaattagtaataccattgcaaatatagaagcatagtaagaaagaaaaaagtgggcgctacactacagtatacacactagagtggattctaaattcttaggatcaggcattctttcgttatttgcatatcatccaaattattatgaaaaaaattaaaaaaatttaactaaatagattaatatgtgatagatcattccataagcatgcaagttaaaattcaaccattacatgttaaaaaaaattaagctataaatagttaacgtatattcatagttaaattttgttttttttccattacaatctgtagaagttaattttggtattgcatgtttatggagtgattgatcatatattaatttattttattgattttttttaaaaaaaatttataaccatttagatgagatgtaaataacgagtgatctattctcaatagtttagattaatagtttctcgtatacacacgcattgccctataaaatacacacaccactgcaagaactagtttacagctgaatgccgccatggagagcatcaatgtagcacgaggtgcatccgtgacgcctcgcatggcgctgccgtgcatcagcaacctccagacccttcactacaacctgctcttgcaccgcaaccgcaagacgaacgggaggaaactgcggagcgtgtcatgcagggcgagcgccggccgaggcggcggccgcggcctcgaccgccgcgacgtgctccttggcataggcgcagcggccgccatggtggccacgcagggcggcggcggcgcgctcgcggcgccaatccaggccccggacctcggccactgccacgagcccgtggacctccccgaccccgacacagcgccggagatcagctgctgcccgacgtacagcgccggcaccgtcgccgtcgacttcacgccgccgccggcgtcctcgccgctccgcgtgcggccggcggcgcacctggtggacattgcgtacttgaccaagtacgagagggccgtgtcgctcatgaagaagctccccgccgatgatccccgcagcttcaagcagcagtggcgcgtgcactgcgcctactgcgacggcgcgtacgaccaggtcggcttcccgggtctggagattcagatacacagctgctggttcttttttccatggcataggtacggtacgtgacaacaacattatactccgtcccaaaaaaacaaatttctagctacgaaactagacacatacacatgtgtccagattcgtaggttggattgatattttattagacggaggaggtatatacggagacgtccgtcgatgattcttacataccacttaccacttactagtaaatagctataaattttctaaaataattaataagaaaatatgagatatatcatttcacaaattaacacataagctcaaatttgaaatctacaaattgtaaaaaaaagagagagataaattattaaaactagtcaacttacatccgcacctttatttttttttctgttgtaaaatatagaagttgtgtttgaacttatataaaaaagtaatactccagctaatgttaatttatcttatttttaaaattttctgttgtaaaatgtagaagttgaggggtatattagccttttgagtatatctcacgttaatttatcttattttttaaattttctgttaactatatattaaattaaatgacatgaaaaagaagggatacccctcaaaaggctaataaagacactttccccaaatatacatcccgtctcgtctggttcgtgtacgggcatccagctatatgtgctgatgtggctgtgattctctgcatgcactggacccatgcgtatgaacgtgcaggatgtacctgtacttccacgagagaatactgggcaagctcatcggcgacgagacgtttgcgctgccgttctggaactgggacgcgccggccggcatgtcgttcccggcgatctacgccaactgcaggctgtcgtcgctgtacgacccaaggcgaaatcaggcgcaccagccaccgttcccgctcgacctcaactacaacggaaccgacctgtcgaaactagatttcggcaataataaaagggggtggctatcaagctaggaaagtgtatgggtttggagacaaaggatttatacaggttcaggccttcttacaaaagaagtaataccctactcctgtccggggatgaatccgccgagtgtgttattgattgtatgatttggagaaaatccaacctccgcccctagaggcacccggaccccccttatatatgggaaagagtccgtgttacaaaagataatctatattcctaacggaatatgtaaatacagataaaatacagtcgtgaccgactaagtctcaaggtgtttccttgatgtacaagttaagaaacaaacccaggatacacataagatattctatctatattcggtatcctatatccagtccaaatatcatcgccgtgtagatatgggatatccataatctccacagtagcccccgagacctttgcagtcaaccatcatagccttctcaaagataataatccgagtgcttcaaaacttatcatgccaagacctgccgagtagcgaagacgaagactgtaaagggcgaaaagataaaaatatggtgcatcgaatagatgcacctaattaggtgtagcccccaactatgtgattagttaacgaactaaacatatagttgagaaacaaaataataacacaattgtgcatcatatgacaaaagcatacacggcgcctagataggcatgctagccgactgctttttagccataatgaaaagagtccgagtggtttacactctaaaaggttcacgaatgaacacactggacaggcatccgaatataaaactctaaagattacccaccaagtattataaaaattatggtaatgaataagtctaatagcctgggccatgactatttaccataatgaaaataggtatataacataccaaggaagtgactatgataaaaacaagtcattccaaattaacccagacagcttttgtagcctaataaagctaacaaaaagcagtataacacctttctgtcgggcaccttttaatttgcattgcaataattccaaagaattatatgaccgcataaaaaggattttatcagcattgggcaacactattgtgcgcataatattgccaaagcaaaatatgcctaagtccctaaggaacacaatgggccacgctgttaaaagtattgggctgaagtactgttcaggcctaggcccatttgctcctccgatacccttaacaagaaatcccgagatccaagcaacgcttcgtctcccccgccggaactctcgccattttccccactccttgctacagtgcagaactgcgccggcgaactagggttcaccactccactcaaatccaccttcgaaaaaatgcatcaaaatccttcccgtgatccaccgcctcaattcctcacctctcccaagccatccctcgaatcaaatcagcgcattcggggaaaatcgatggcggaggaaaaagaaagctttgaaggccagtgggcgccatccgacgtaacggaagagaacctgaaggagatggtggcgcacggcgttctccctgccaaggagatcatcgggtggcggccagcgtgcggtgagacttttccgacccccgatacacatgagattgtggtcttctctcatttcttctatggcggcttcgcccttccgacctcgaaatttttccgcgggatattaagcttctatggaatcagcttgcatcacctaaacccgaattccatagtccatatcgccaatttcatccatgtttgtgaagcctttttgggaattaggccccacttcgctctgttttgccggatcttctttctcaagccccaaccgaacaagaataagccatgtgtagtcggaggggcaggatttcagttgaggggaactctgagtcagaagtacttctctatgcccttcaagacctcaaacaaagggtggcatgcgaactggttttatgttcagaatcctgagcctgctcttcccgagtattcttgtcttcctccggtgtaccaagatacttggaactctcttccaatcggagatgaagctgcccaagctttggaattgttggatcgcatgttaaaactcaaagaacaaggcttgcaaggagagcagatcactcggcatttcatcaaatgccgactggcgccaattaaagaaagatcccgtacagcttttgagtttgacggcaagcatgatcctaatcgcgaagaaccagactctctggatttcaaaatcatgaaggagagaatgtataaaatcttctcaaatgccatcgtcgtcagctactcacatcagctgccagttgtgccatataatgcattcaatccgcctccgcaggtatgcatctgaaatcttcaatctatgaccaaaacattatcttgtcttcatgttgaattaattaaccgtggaagcatctcatttaggaatatgcattgatgaaatctgatcccccaatcactcagcgccggtcacctcgtcagcacaccgttcagggaagtggagggccgacaatcaggtcagacccacaacctcaaacctccaaaccggctgggcagacaggtcctcgcaagagaaagctggtgcttaatgacgatgagggcgatgacagcaacaaatctggggacaagggcactcccaacaaactcccaaagcataccatgcccgggaaaaaactggctggccgtcaaattccaaagattagaacatcttccaggtataaacctctcgataccattttatttcggcatgcttctcttatagaaattatgctaaatgtcaaaaggacactttgcaggaaaccatccgacatagatccaactggaaaagatcctgatccggctgtgacagagccaaatttatccaaagacgctgagccgactgccgaaaatcagccgaatgccgaaagccagccgactgccgaaagtcagccgactggcgcccaagcttcggacgacaaggccaatccgagtgatcagccgccgactggaaaccagtcggcagcaactgaaactgcaacaacccgagagcccccgactggaaaccagtcggatgtagatctaaatcaagagattcctgaagctgaagcgcagacaacttctcaaggaccaaaagttggtaatgactcagtgattgggtctccagataaagagcaaggatcccctcacgctcagccaggcacatcctcaggtaactcaacttctcaagtgatgccactctgaataactccagcttgttcgtctaatatcttgggaatacatcaggtccactaggcggcgacgaagaagaaattctccgcataaaggcagctaatgactctcgtcctcctatcttactcaaatggtgggacgagaactctcaagtttccggcattgttataaatcgccaaaaagaagacgaggaagtgtgccagctgaagaaagtacttggagaagccactcgcattgtgaatgtaagtcttctaggtgattgcctttgatgactttgtttttttgttagcaaaactaatccctgaaccaccgtgcagagaatccatcttcgtaatgaagccaagactgcaaccttagaaaagctggttccacatttgggaactcttgaagccgttagggaacagctacacgaggctaaggagcatgccaagaaaacggagaaggaattaagggagcgaattgcacagctccaggactccaacttcgagctgagtggttcatcaaaaggtaatctctagatctgtcccatttgtgctgtcataactggatcctcaaacatttggattttaaacagcgcaagccaccaggatgactcaaatggagaagcaaatagaagccttgaaaaaagacaaggtagaactggctgcggaaagggactcagccttgaaggaggttgaaggtactgccagctgacaatttgaactgccctctctgtaaggcagcagattcttattataaatgtgttttgtagaccgtaaaatcaaatctcaagctcagtttgatgtcctggttggtaagatcaagaagcttgaaggagcaagagatgaagtcgccaatgtcgctacaccacttgtccaagctatgtttcttaataacagtggtccgagtgcacttgatgcaaccgagatctttgacaagctaagagttgcaccggatgtgtacttcaagaacatcaagaaagctggaagtatgggagctagcatggcattggcaatgaccaaatccttgtacccgagaatcgaaattgataccattgatggctttgcagacgggacaagtgaagaagctgctcttgatcttatcagtaatgctcaaagtgcggctgacaagattgcaagtgatgttgtagagcaattccgcaacaacgaccttcagccgagcaataataactctgatgatgaaaggactgattctgactgagtgtaaatgtagcaaatggaggctcaatttgtacaatactggtgtatttatgctgtgcttgatagttctagccaagtctttgatttcttaaaagcttttatcaagctttgttgagcctaaaacccaaagaagctattaaaaactttcagtcctcgcagactaagtagaaaaaatcaaacaaggcaatgatagaccaagtaagcaaattaaattgataaaaaatcacactccattattatgatgatagcccccgactgacaacggcaagaagaaaacttgatgttgacagtcaagatagggaaatacaatgataagcttaagcatagaaacgacgaagatgttcaatgttccaagagttgtcgacgagagtaccgtcttcgcgcttgagtcggtaggaacctggtcgggtgacttcagagatgataaatggcccctcccataaaggagataacttgtgccgatcccgtgtagtttgaattttcctcaaaaccaggtcgccgactagaaaggcacgggatcgaacattgcgattatgataacgccgcaacccttgtaaatatcgagccgaccgaatcaaagctgcttcgcggacttcttccaatcggtgcaagtcatccactcggtcctcttcgtagcgttcttcacggaaatttcgaaagcgcaaagattcgaattcgacttcactcggcaacattgcttctgccccatagacaaggaaaaaaggtgactggcctgtggcccgactgggtgtagttcgcaaagaccaaagtactgatggcagctgttgcacccatttgccggcatagggttttagccggtcaaaaacacgtgctttaatcccttgaagtatcatgccattggctcgctccacctgtccattgctcatggggtgtgccactgaggcataacaaattttaattccaaagtcctcacaaaagtctttaaaaactccaccagtgaattgtgtgccattatcagtgatgatccgattgggcactccaaatctatgcacaatgttgatgaagaagtctcgagcattatctgctgtgattgtgacaaccggtttagcttcaatccacttggagaatttgtcaatggccacaaagagatgtgtgtaaccgccgactgcctttttaaacgggccaaccatgtcgagcccccaaaccgcaaacggccaagacagcgggatagtttgcaactcttgagctggcaagtgaatttgtctagcgaaaaattggcaaccttcgcacgtgcgcacaatcttgtcggcgtcggacactgcagtaggccagaaaaaaccctgccggtaagctttgccgacaatggtgcgtgcagcggcatggtttccgcatatcccagaatgtatgtcctgcagcaattgtctcccttcctctaaagatacgcagcgttgcagaattcctgaagggcttttcttgtataactcagcttcatgcataacataaagtttgctccgccttgaaatccgctcggcttcatctttgtcttgagggagttcttgagaagtcaaaaatcgtatgaggggttctcgccagtcggtttcaaccatagcgacgtcatgagtgcccgcaacttgagtggtatctttgtgaggtactgtcggcgtataaaggtgttcgacgaaaacatcagagggcgccacctcgcgcttggatccaaagttggcaagtctatcggcggcttcattattatgtcgaagaacatgactgagctcgagtccatcgaacttatcttccaatttgcgtacctcttgtcgatatgccatcatgttgtcgtcaaggcaggaccactccttcataacttggttgacaaccagctgtgaatcgcctcgaactattagacgctttatccctagggaaattgcaatccgcagtccatgaaggagggcctcatattcggcgacgttgtgggacgccgaaaaatgtatccaaagcacgtagctcaatctttctccagttggggaaatcaaaaccactcctgctccagtgcccgaaagtcgtttggatccgtcaaaatgcatggtccagtgctccatgttctccgcgggggtatcctcctggcactcggtccattcggcgacaaaatcagctaacgcttgggacttgattgaaattcggggcttgaatgatatgtccaaagacatcaactccaaagcccacttagcaatacgtccgtttgcttcgcggttgtgcagtatatcaccgagtggaaatgatgtgaccaccgttaccgagtgaccttgaaagtagtgagatagcttcctggtagtaattagaataccatataacagcttctgaacctgagggtacctcgttttggagtcggctaggacctcgctgacaaaataaatcggtcgttggactttctggacatggccttcttcctcgcgttcaacaaccaagactgtgctcacaacctgggaggtggctgatacatacagcaacaacggctcctgcgggtgtggtgaggctaagactggtggctcagtgaggagtttcttgaaatcttcgaaggccttctgtgcttcgggtccccactggaagttatctgttttcttcagcagcttaaagaagggcatcccccgctcgccaagtcgtgaaacaaatcggctgagcgccgccatgcatccagtcagcttctgaacatctttctgggtacttggcggtttcatgttgaggatagcagtaactttctccgggttggcttggatgcccctatgagacaccataaagccaaccagcttccctgacggtactccgaaggtgcacttttcagggttcaatttcatcctgaaagcacggatgctcgcaaaggtttcttctagatccgagatcaaatcatccttttgcttggtcttgacgactacgtcatccacataggcttcaacgttgcggccgatctgcgttgagaagcatctctgaatcatgcgttgataagttgctcctgcgttttttagtccgaacggcatggtgacgtagcagtatgccccaaaaggcgtgatgaatgaagtcttcaagcagtcggattccttcagtcggatctgatgataccccgagtagcaatccaaaaaactgagaagctcacggccggcggtcgagtcaactacctggtcaatgcgaggcaacccaaaaggatctttagggcaggatttgttgaggtcggtataatcaacacacatgcgccattgccctgttttcttccgaactagaaccgggtttgccagccagtcgggatgaaggacttctttgatgaagcctgctgctaacagcttggttaattcctccttgatcgcgtctttcctgtcttgtgcaaatcggcggagtcgttgtttgataggcttggcgtcttctttgacatgtaaggaatgctcaatcacctctctaggaataccgggcatatcagatggtttccacgcaaagatatctttattgttctgaagaaaggtgatgagcgcgctttcctatttacaatctaactcggcgcctattacagcagttttagcaggatcagagggatctaggggaatcttcttagtcttggcttcgctttctccactctttgaaatcttggtagcgggctcttctccttcgctcgccgtggctgcagccagtcggatatcctctcgggcagacgccatctcgcgagtttgggccatgtcgcaactctccttgtcgcatgtgacggcttgcttgatgtcactccgtagggataggactcctcggggaccaggcatcttcatcatcatgtaagtgtagtgcgggacggccatgaacttggctaacgccgggcgtccgagtatggcatggtatgctgtctcgaaatcagcgacttcaaagctgatgttctctgtgcgaaagttttcccgagtgccaaaagtgactgggagggtgatctggccgagtggagttgcggataatcctggaatcactccgtgaaaaggcgcattgcttggttttaactcggagtgagggatctgcatatcatccagggtcttggcgaagaggatattgagtgcactgccaccgtcgatgagggttctgcgaagcttgacattacggaccactgggtctagtaccagggggtaccgccccgggtggaccactcggtcaggatgatccgagcggtcaaacttgattgcgatctctgaccatcgaagatattggggcgtgtcgggctgaacagcattgatctcccgttcagtcaacttctgcttccgtttagactcataagccagggggccgccgaagatatgattgagctccttgcggtgatcttgaaaacctgccggggtgtcgccgtcgtccttcttcctcgacgtgctttgttcttcgtcagaattcttccgtgcagtcttggtgtattgatccgcgaattgcttgtagacgaaacaatctttggccacgtggttggagttaggatggtgcgagcattgggagttcatgatcttgtcgaacgtgttgacgcgcgaacgctgtcgagaagagtgactggcggttgcaacaagttccgcaggcttacgcttgcggtccttatgattgttacttccacctcctcccgtagccggcgtacccttgttttgcttccaactgggacccgactgctttgatgcggtgacggcgtcttcagccttggcgtactcgttggctttttcaaacataagcttgactgtcatggggggcttacgcccgaacttgccgaccaattcttcgtggcgaatccctttggtgaatgcggcaatgatgacgtcatcggtgatgtcggagatcttgttacgttgctcagaaaatcgccggatgtaatctcgaagagattctccggacttctgaataacgttgtagaggtcgtattgtgtgccgggtcgctcaaaggtgccttggaagttggcgatgaagtggtcgcgtaattcagcccaagatccaattgtaccacggggtaatccatggagccaagatcgggccgaatccgctaaagccactggtaaatagttcgccatggccttgttgtctcctcctgctgcgcggattgcgagaccgtagacggtaagccacgattctgggttagtggtaccgtcgtacttctctattccagtcggcttgaagccggctggccaatccactcgacgcaggtcgtcggtgaaggctgctactccgtcaaggtcgtcgtcgtggcggttcggcgaatgatgatggcctcgagctgctcggcgctgtatgattgtgtcgcgaagatcgacggggcggcgacgaggtggtgagcgaggccgttccactcggcgctccctatattggtcgggaggtgagtgaatggaccgctcgtcgtgacccctgctcctgcgattggatcccgcgccggtgatgctgaggcttggatgacggtagtcatgagatcggaagtgggggactcggctgccagtcggcgtgtggacgctttcggagttaactgggaccgaagccgcaatcatggtcttcgtctggttcaagatgttgacgacgtgatcggattgattgagctcgttttggttgaggagggtgtcgagaagggtgatcgcggcaaccgcattctgttgaggggtgcggaaaaccggtgtcccttcgacatcttgctggtcgatgagatcacgcgctcggcgccctgcttccaaagctcgctgacgtcgatcctcagcctccttcgcggtccgctcacggtcctgctgctcacgccgtagccgttcttgttcttgtgcttgatgctcctcctccagtcggcgacgttcttcggtctcccaggcttggcgttgctcctccgtctcattattggccatgaaaacgccaaagtagagaggggtgtagttgtcatcaaggcttccgtcgaagtcgtcgaagtcgttgtagcgagaactaaattcgtcgtactccacgatgtcagtaggacgtgagtcgacggtgggagagctgttgtagtcatccagctgatccgtcgaaaccgtgccgagtggttggaggatgacgccgacttccctgaagctaggcgaaatcggtgttgaagccgacttccgcctaggcctacgggatgaagacgttgtcgtggtggaaacggccgctaaatcgtcggggagcttcatcaggactggtgggtaagccccatcatcttgatctggtgtcgttggagaagatgcgatctcggccgagtggtttgaagccgactcggttgagatggtcttgaagtagctttcagccgcgttcgggaatccaaacgggaccgaaatccggttctctcccgactggtctgattccgagtcgaggagagaaatcttgccgaagttgttggtgacgaagtcgaggctgccgaaccgaaacgtctgcccgggcgggaagacgaggtcgtcgatgccggagacgaaacccattgcactgatcggcgaaaagcttgacgctacccctacctggcgcgccaactgtcgaaactagatttcggcaataataaaagggggtggctatcaagctaggaaagtgtatgggtttggagacaaaggatttatacaggttcaggccttcttacaaaagaagtaataccctactcctgtccggggatgaatccgccgagtgtgttattgattgtatgatttggagaaaatccaacctccgcccctagaggcacccggaccccccttatatatgggaaagagtccgtgttacaaaagataatctatatccctaacggaatatgtaaatacagataaaatacagtcgtgaccgactaagtctcaaggtgtttccttgatgtacaagttaagaaacaaacccaggatacacataagatattctatctatattcggtatcctatattcagtccaaatatcatcgccgtgtagatatgggatatccataatctccacacgacccaaccatcccggaagatcagctgatcgatcagaacctcaagatcatgtaccgccaggccagtaatcacatacacagtttgacacaaactaggaattaattgaagtagctactgaaaaccgtagatagcaaactccaaattaattagtcgactttaaattggatcgcgtgtctaatatgaacagtataatttatgatgtatcagatgatttcgggggctaggaagaaagagctgttcatgggacatccgtacagcgccggcgaccagccgaaaccgggggcgggcaccgtcgagttcgtgctgcacaacaccgtccacaactggaccggcgacccgaggcagccgaacggcgaggacatgggcatgttctactcggcggcgcgcgacccggtgttcttcgcgcaccacggcaacgtcgaccgcatgtggtacattcgccacggcctcttcccccgcgacaccgacttcaccgaccccgactggctcgacgcgaccttcctgttctacgacgaggaggcccgcctagtccgcgttcgcgtccgcgactccctcgacgaggccgcgctgcggtacacgtaccaggacgttggccccctgccgtggctgaacgccaagccgtccacgggacccgccggcgccctgccggggaccctggacaagaccgtgcgggtggccttgacgaggcccaagacgtcgaggagccgcaaggagaaggacgccgaggaggaggcgcctgtcatcgaggggatcgaggtccccgaccactccgcgtacgttaagttcgacgtgttcgtgaacgcgcccgagaacgccgacgtcgcgtcgcgctgacgccacacggggtccaccgcgaggagaggaagcgttctccgagaaagacggtggcgaggttcggcatctccgacttgctcgaagatatcggcgccgacggccacaagacgatcgtcgtctcgatcgtgccgaggtccggctgcgattcggtcagagtctcgggcgtcagcatcggctacgtacgctaagtgaagtacaacgtgaacgtaagaatacgtttatgtacaatgtgtgacgtgtgattaatgattgtatgagtgtgatgttgcgtgtgtaatggtgtaggcgcgtgtgggtctgtcattaaaaaatgataccccgcgcgttgctgcgggatatacaaatcattttagagatgtgaacttgttgaaccgccgctaacatcgtgttgaactaccgctaacatcttgtttaactgccttacaggattaaattaatatcattacaaaagaaaagccaaataacaaagtaggtatgaatccaattgagtgtaaggcataaaactcaatgaaaaacttgatggtccacatcgttgatgattgatcaatgataaaaactatacatgatgtaatttggtctcgatcagtactggcttttgttataatcgattgtcaaataaaaaactcagttcaaacagttcaaattaatggattgagaatatataatttgcaaggaaaccaacttaaaaattgtaaaataataattaacaaaagggccgcggtgtaaaatagcacctctcatgtcttatctgaccagaccgaatggacgatttagccgatagtgatcagaaatgatgttgtcggccttacttagctgcatatatatagtggtgaagacaaacaacaatctagctaatatatgtataacaaccttttgtttttttcttttaaaaataaactaatgcaacagaaagggatattgttaccatgtatttgtacatcggtaaagttgatatatccggtagaaataaatagaatatgattacagagattatctccttcaattttgtacccccaactgcccaagtcagaaggaaattgcaatttgaccggtgattgatcggcgatgtgatgttgatctacatgaggcaacttgagcgaagctcccagactttgcaagcatggcaacctcaatgcccaccggtggtagttaggattttagggataacgatgatcaaggtgatgagaggaacatccaatcgattgaacttgtaacccctttccctgaatgaatatgcttctgttttataggatagacatgacttttgagctcctcttggggaaaacggtagtgcaatcacttatatcgtattggactacttggatccttggcagtttcggccacattagttacccgtatgtcattaatcatcgagctgcggcagaaaacgtatcattccctgatagaattgaagacggcagcggcaagcgtgcggaatgcatgtagcgttgggtgcaacgttcctagcatgtgacgctagacgcttaattaacatcgaatggctgaaagaaaagagggtggtgacgtggaagcataagaacaaagagaattgctaataactacactaagtaaggatcacttatatagtattataggatatgattgtataaaaataatgcgtgcatcagcgtgcatgaactgatgatttggtaaccgctgccaatttgaaatcattttttcagataacaacccgaggaattaaggcttcagagatcagatggcatgccattaggcatgcacgctcttaagatgggtagaagataagctaaagagagcatccgtccaaacagggccggctctacaatttgaagggccttagggcgagcttgatggtgtaggctcttaatatgtgttttctatttatatatttttaaaccatatattttctgatgaaataaacattgaacatcttctgtatataactaaagaacatcaaaatggagctaatatgaataccttgaataaaggtcaaactctaactgtctaacgactctatcaataatacctcacaaataaagagattacaaatatccatggcttctcacgaaaaaaatacactcctttaaacatttttgatgcaaaatctttaaaaaatgtaatgagattaatattatccatcacattcttctcaacttagcacacagccaagccttgtcatagggcctaaacatagtatgttctcgtggtaatttggcctttcaccgagcagatgagatagttaagagacatactccttagttacttcttacttgaatacaaactcactcaagaatagtacctgaaaactgaaggttgtgaggtcatgtttccacggaggcagcaatgacgtgatcagttggacacggttgctccgtcaccacaaacaatcgccacgcatttgctcgcagtatatacgtatgtagtttctaaaggtaaacgcacgtatacggcataccagttcgtacttacttacctgatcttgggcccctacttacgttgggccctaggccgtcgcactcctcgccgtagctctaagccgggcctgcgtccaaagaatctaatctttgagttacagaggtggtgtttgaatcccctgaatatgaagataaagataaagatgaaaatgaagtgtttcacacaaaacgagttggtaataacgtgtgattaattgagttttaattattgcgaacttgaaaaatggattattctgatagaaaattttagaacaattttcatatagaaaattttcacagaaaacgtgccgtttaatagtttgaaaagcgtgacatgaatatccaagacttaatccacttttttttaaggggtaacatgtagtagatctgagactgcagaatcgcagaactttgggcagaatcagcatgtccatccgtacggggcgtcgcatggtcgcgaatttgcaatagcaggacaaaagccattggatggctaatgaaggaatgtttaacgttgtacttgcctgtcaagggcgtacttcgatggagtagccgtaatgccattgttgtcagctccttcgaaactgaacccattcggctccagtgagatccggcgacttgggccttgtttagttctaaacttttttttcaaacttttaatttttccattacatcgaaacttttttacacacataaatttctaattttttcatcacatcgttccaatttcaaccaaactttcaatttttgcgtgatctaaacggtgtgcagcttctgcttcaaggtggtggtggtggtggtggtggtgggggttgtgacttggttagcgaccgcccataataacggaactgactccgagcacccgcgaccaagcagcagcacagctcgtaggggagcgttgaccactcccctgctcatccctatgcctaaaacgccgttgttactacttatgggtgtttacggtgcgccgatttgtcattcagcccgagcatgaaacgttgaaaaatacggtgccatgtttgcctctgatgctactcacctaaagcccgcacattaaaagagagacacttgttcccggtcagctagcattgccaaaaaaaagcaagaagatatatgtcgcgccttcggaaaggggtaggaagcttcagctcctctcctccaatatttccgccaccattgagcagtagagaacgatgatgccactgtcgaggaagctgccgtcggccgagctcccgatctgtgtcacctgaggaggggactgacggcggcattgactggagactcaggaaggccgtcgccaccgcgtgggctcgggatagccgagggagaagtccggagaggaaggggagaggcgctcgctgtcatcaccctcgctgccaacagatccgctagggagaggaaggggagagggcccggtgccgccgcgtcttctcccaagcggcgccggtgggaggagagggggggcgggggagtcgtcgccatgggagaggacggagaggaggagggggcgggaggcaccgtcgtgggaagccaagtgagggagaggacaagagagagaaatggggaacaagcggcggaggttggggaggtgggtgtgggagatgttgctccaggaaggagatgacgatgatagtaattttcgtggtggggccaacctaaaacaatggtggtgggcccacctaaagctacacgaactatggatatcggagcatcattttttttcctacgttgatacttgggtttcttgatgaggctgggacacactgctatagtgcccaaggtgtggagtcctgaacccatctctatcatgatatcatcctggccctaatgcccacctctaccgtcagacagatctcctcggttccatggcaatgatatcctcttatcccctaggtccctcaatgccaccccctaggaggtgttgagaaaattaaggggagagagactggagggagggagaggaaaaaaggttctactatttttctttatttttgttcgagagacttatacgagggtttcatctaactttttttattgaaaactaaaaaactggatcaatataatattgtcgagtgattttatttgcaccgttttaaaaatttagaggataacatatatatggttttacagttgagagatgtgaattaaattcgaccatagttgaaggatttgaaatacactttttccttaagttcacgaggagtgtcaacgatgacctggctcggcccagctcgatccattcagcagcaattctaggcccactctcttattctctatgctgactgcagtgctctatccttttcgctagtcaggcctcgttcggatgggccacactcccagaccatttatgtatgagagaattccttatatgccactctaaattaaccggttttcttatatgccactttaaattgacttctcccttttatgccatcggttcaagtttctcctcccttttatgctattgccgtcagtccaccgtcagttgaccgttaacttcattgtaaaaagacgcaattgcccttaagaattagtatacaaccaataataggtattttagtactaatataactactggatacaacatatgaaaattgatttttttctgcatcacatgcaattttagccattaccatcacaaataaattttcaatgtaagcatgaatcatgcagttttccaacaatatttttaatataaagagcatttttcactagttctgacaaaattttgttcactcaaaaaagatttaaaataaattagttatgattttttgaagtttacacattttttagttgagagggcatattggtcatttacgaaaaaaaactatcctttactaacagtcaactaacactatagtggtgggagttgcataaaaggttggaaaaacttgaactagagagaagccaattttaagtgtcatataagggaactggtcaaattctagtggtatataagtaattctctctttatgtatatgggccaaaatttaagttcaatctcctggcctatacatgtggaaggaccagtctgaggcccaaacaagccatcagggcaacgaggcagagcacactgcacaccaaccccgtttatgtcaacctttaagaacttaaaggtatgtttggattaaaaccaattcttgccctaccaattatttggtagtagtgttgtagtacttgttagctatttagattgaggttaaatcttactaattcaatagagttagaaacaacatagccctaccaaaatttttggtagtgccaaaactagcccaagatttggcaataccaaaattttggtacggcttcaaaccaaaatagctctataagtgttgctgccacgtgtttgacacatcgcatacatctgatctgattgggtgaggatcctctaacataatatcactatcattacaatgactgttatgtacttccttcgttccataatataagagattttaaagaaatactccctccgttttaaaatatttgacatcgttgactttttagcacatgtttgaccgttcgtcttattcaaaaaatttgtgaaatatgtaaaattatatgtgtacatgaaagtatatttaacaataaatcaaatgatatgaaaagaataaataattacttaaaattttttgaataagacgaatggttaaacatgtactaaaaagtcaacggtgtcaaacattttgaaacggaaggagtatgacacattctaatacatgaatctgtatagagagcccgtctagattcatagtgctaggatatgtcacatctcttatattatagaacggagggaataagtcttactctcctattgtttcacatatcagtgtctctaatgatattgttattatggtaaaggacccgatatgatcaacgacgttcgctcgttcttcaccgtcgcagtttttgtcagccatccatttttttcgccggggacggcggaacgacgccgacaagtcatcagtcatctagttgcagcgtccaaacgacgtacgccgcccggcctgaactgaaactccggccgttttaggcaagggttagttgacctgggatgaactgcctccatcatccatgcatatccgtgattccgtagcggagttggccggatgaattgcgtgtatattcagacgattcacgcacaggatgatggagtgtttcgcccaacgctctcgtaggtcaggtcgtttgggagctttccgatttgcgtaacgacagtgaaactgttgttgacgggtgcatagttattaactggttcacttgacaatttcgagccgctgggtgaaaggttaatctctgaactacttcgagctgacatgatatctctcaacgggattgcttaagtgacggatatatgtttgacttggtatatgtggtgctaatgtgcactaggtagagatgtagcaaagtgacagtgtgacacgacaccagtagaaggtgatcggtgtgtgttcctattttaattaatatatttcgatgtgatcttttaatttcacttcgttttttcaaatttcctctttctgttccactgaatcgagtagaaagaattattttctctctgctccaataaatgttcgatgataagatgaactgtattccgtgactatgataagaatgtgttttccaggtaataagaatcatatctcaattttctatttagtgagaaacttaattactacaacaatagctaagcattagattgatactagttttcctaatgtatagttggagggccactagttgtcatgaagattaatcaaagagcagtggtagtgtagagacccattccaatatattaaaaaattatacagtcttggtacattactcccttcgtcttagaatataagcatttttagtatagtgatagatcaaacattttcaactctaactattaatagaaaaaaatatcactcatataaaattgatgttactagatgtatcattaaacaaattattataatatataacctttttatttaaaacatcctacttttatagatattgttagttaaagtaacatctcggaaatcttgttagagtctaaaaatacttatattttgggatggagggaatatgtgtgattagtattttttatgaataagatcctattttataatagtcagtctcccaaattgttagtgcgcggccctgcaaacggtcacaccaaagtaccaaacaaccagtgggctactacagtatagtagtatacacattgccctataaatacacacgctattgcaactttgcaagtgcaagttcacagcgcagtgccgccatggagagcatcaacgtagcaccaggaacaaccgctacgcctcgcatggcgccgccgccgccgccgccgtgcatcaccaacctccagagtacccttcgctacaacaacctgctcttgcaccgcaagacgaaggggtggaagccgcggaacgtgtcctgcagggtcgaccgccgcgacgtgctcctcggcatcagcggcgcggccgccatggtggccacgcagggcggcggcggcgcgctcgcggcgcccatccaggccccggacctcggcgactgccaccagcccgtggacgtccccgccacggcgccggcgatcaactgctgcccgacgtacagcgccggcaccgtcgccgtcgacttcgcgccgccgccggcgtcctcgccgctccgcgtgcggccggcggctcacctggcggacagggcgtacctggccaagtacgagagggccgtgtcgctcatgaagaagctccccgccgacgacccccgcagcttcgagcagcagtggcgcgtccactgcgcctactgcgacggcgcgtacgaccaggtcggcttccccggcttggagatccagatacacagctgctggctcttcttcccatggcacaggtacgtgacattgtgacaacatggctgcatcacgttcacgtctcgcgttgttcgtgtacagttgcatgcatgatatatatggggagtggattttttacgacttcctcttattttgtacatgtcattcaaaaagttatcaaaaaatttaaaaaatttgtcaagatagatcaatatacggtatatctttttcgcaaacatacgagttaaaattcgacttatacaattcgaaacaaaaacaacaaatttgaccgtgatttacgcagttaaatttgttatttttgtttctacttgtataagttgaatttgaatttgtatgtttgtgaaataacatattatatattgatgtaatattgatctatactgctatatttttttaatttttttgatgactttttacttgacatgtaaaaatgagaggattatttgagtggctcatgagattctgtgaacgctggacgcatgcgtgtgaacgtacgtgcaggatgtacctgtacttccatgagaggatactgggcaagctgatcggcgacgagacgttcgcgctgccgttctggaactgggacgcgccggacggcatgtcgttccccgcgatgtacgccaacaggtggtcgccgctgtacgacccgcggcgcaaccaggctcacctgccaccgttcccgctcgacctcgactacagtggaaccgacacgaacatcccgaaagaccagctgatcgatcagaacctcaacatcatgtaccgccaggccagtaatcacatacaaattttgatataaataataatagatgacaaaaactccaaattaatcgacttatgagttaagattggacgaacaaaattttatgatgtttcagatgatttcgggagctaggaaggcggagctgttcatggggcagccgtaccgcgccggcgaccagccggagccgggggcgggcaccgtcgagagcgtgccgcacaaccccgtccacagatggaccggcgacccgaggcagccgaacggcgaggacatgggcatcttctactcggcggcgcgcgacccggtgttcttcgcgcaccacggcaacgtcgaccgcatgtggcacatccgccgcggcctcctcttccccggcgacaccgacttcaccgaccccgactggctcgacgccagcttcttcttctacgacgaggaggcccgcctcgtccgcgtccgcgtccgcgacaccctcgacccgtcggcgctgcgcttcacgtaccaggacgtgggtctcccgtggctgaacgccaagccgtccacgggagcagccagcacgccggcgcccgcggccggcgcgttcccggcgaccctggacaagaccgtgcgggtggccgtgacgaggcccagggcgtcgaggagccgcgaggagaaggaggaggaggaggaggtcgagatccccgaccactccacgtacgtcaagttcgacgtgttcgtgaacgcgcccgagagcggggacggcgcggcgacgtgcgcggcgacgtgcgccggcagcgtcgcgctggcgccgcacgggatccaccgcgaggggcagctgtcgccgaggaagacggaggcgaggttcggcatatgcgacttgctggacgacatcggcgccgacggcgacaagacgatcgtcgtgtcgatcgtgccgaggtgtggctgcgattcggtcaccgtcgccggcgtcagcatcggctacgctaagtgaagcacaacgtgaaccgtggacgtatatttatcatctatacatgtgaacccagatggagagacggatttgtgtttgatatgtgtgtgactaatgattgtatacaaaataatgccagtaatataatgagcatggatgatattggcttaaaaactttgaaacttttagagtattcaattgatggtttggttcacgctgccaatttgaaatcaattttgagatgtcagcacgagaaattaaaaagctacacaggccgtcacatgccattctgctcgcacttcattccttctccgagtgagcagaaaataaaccagagagaacatccgccctacaaatctaatctgccttacatatgtacatccgaaacactgcagaatcgtaaaatggaacatatttgcatggtacatgtttgcaaaactggctttaagcacgatgagcttcctgcatgtcacatacgcacgggcgccgtacgatggcgaactcacaaccgcaggataacggaaagattaattgatctcttactgacgctggagatcaatgtagaagccgggattggattctcctcattttctttctgtctaaagaatggtacccagagaaagggtatgtactgggatgccggcatgtcccagaaacctggggaaacctacttcccaaaatccatgtgttcttggggctagaaaggtctcagttcttgcgagcggaatggtacaattccatatagtccagagcaggtcggttccatgtccaatcttgctccatcaccctcttgcagagggagtggaaccaatcgcgagcatcataccatgtggtgatcgctctgaaattggatagcaaaagaatgaattattaacgtcgtagcattaaaatttgtgttaactcctatgggttatacttacctgtcaagggcgtaatccacaccgttgctgtcagctccttcgaaactgaacccgtttggctcaagaccttgttctcgagctcgatccttatcatcgtcgacgtcaaaaacggtgtcataaaggcctgcataatgctcggcgtatcttttatcgatgctagaaataccaaaaggcaatgcaatgtcagggagatatcaagatgacaacgcacctccagttttccgaactattgggatagatccataacgcatagcagtaagctgggttaaaccacaaggttcaaacatggaaggaacaaggatgaagtcggcaccagcataaatctacaatacagtagaaccatagatttagtacacaactataaatcagttttccagttctaacataagttgctattggtagagtgtgaaacttaccaaatgagatagtggctcatcataggttaaacaaagctttacacgaccatggtattcgccatgcagtttactagctaagttggtaaagtcaccttgtatgcgatgatctggagctgagcctagtaaaaccacctatttaagaaagccaatgtgtttcagtattgaaaaatagaataacagatagatggcaagaaacatatgcatcaaacagtgtggcatctatgagcaagatatagacctgcccattgcgttcaagagttcgataaattgcatgtttgataaggtgaattcccttctggactgtcagacgactgataattccaacaacaggggtatcagtttgctgtagtccaagcctctgttgcaatgcctttttggcagcactcttgccctcaacaacattctcagaggtatagtggaccttaaagaaacaccccaaaaaaatgttaagtgagcaaatacccgtacaactactaaatcaaagaattggatatttgatcaacagcgaatataagcatatgtatgctactaatcaaattagctgcagataatcaacttcttaactagacatgcactctttatacactttacagatccaagaagatagtaaatgcacagttatggaatatgaatgaatatactgaatggtgattaatataccgggataaaattgtcactgtatggatcccaaatatctggatcaattccgttacgaataccgtggaatttggaaaagtgaggggcaatagcaccatgtcctgacacttcccttgaatacgtatatgaaacctgcaagttatggccaaaacagttaaaaacagacaatgagaagcacacattagtgatacgttcacatagaaaatggtatcttgaagaatttgaaaaagaaacacgatagtaaaaacagaacacggccaggtcactcacagttgtagccttatcacaacgtgccattgctttgccgatgtgatgtgcaccaaattcaaggttgtggatggtaaatacaacccgcccatttgacagtccattttgagcatattgttccttgaatagccaagcaactggagcacttgaccaatcatgacaatgtataatatcctgtcagaatgacagcacttgtgtatgagaagggtggaagcaaaaaaaaaaaaaaaaggtaacagtacaaaatctgtgaacagtgatggttcaaacgttcagcgatatagcaaaaactagctgctgcttggaatcaatttgtgatgaacagaactggaaaattgactcattagttcttttaagatgagttcacatataaattgtgattagttcatggccaagtacgagaacggagaaaatggcatggtacaaaaaacttaaatcttttcctacactataatcaaaggggcagatctcttgcacccattttcgaaataaaagcttaaatcttatggaacaaatcttgcacttacaggagaagatccattttggcggagaaactctagagcagaatggcagaagaagccaaatctactctcgtcatttcttccatagacacatccaacccaaaacatcctgcaaataaaaatgtcagaacaaaccttattttatgctaaaagacaaggtaatagattacttatcataaataagggtgcattgacagaaggaaaaagaattatgtacaccctccgttttttaatatatgatgccgttgacttttagacatatgtttaaccattcattttatttgaaaaaatatatgcgactatcatttattttgttgtgacttgttttgtcattaaaggtactttaaccatgacttctatttgcaaaaaagaaaaatcaaataaaacaaatggtcaaacatatgaccaaaagtcaacaatatcatatattaaaaaacgatggagtgatcaagaatggtctacacgtgtgtaataaggtaaggtgctgtatacccattctgtggttccaagaagtaaacagggacgtcttcaacttttccaaaccatacttttatctctgtattaccccaagtaaaactttgacggtaatgtaaatctttcacctgaaccaaaagacaagtaaattaatgagaaaaaagcccccacaaacagcgatgttcacactctcaccagcgaaggaagcaaatgatcgtaaaaataaaagcatggactatagttgatttcacgagaaatgcttcagtgctctttcaaaagtgaaaagtgaaaaccacagaatttaaagtgtttagagggactagttgcaaccattgaaccacctattgctccagcacttacagttgatttgatatttgcactttgtttttgccagtatctttaagattccacaaaaccccagagctacatatattagataaaacaagaaagaaaccatctgcactgtgcatatacatagcatttccatagaattccattgaaacactgaaaagaatgcaaccgaaaaggaagacgccaggatgccttacattgcttaggtttaaacagtcatacttgggaagaataacctcaacattgtggcctaaatcttgaacggctcgtgaaagacttgtaacaacatcaccaagacccccaacctgtgacagatcattttttagtacctcagcactttctgtggtccaaaagaattggtaaaaggtgtctttacctttgcaataggagccatttctactgcaatgtgcacaatatgcataggaggttcttttgcaacggaatcagtcacaggactatgatagtccatgccattcctgttgtcatatattccaccttcttccgactcagagaaaacaaagtccatcatatatgcatccaaaggaaccctaactagaaaaaagaacagatcacgtcaagcaaaggaaataaagtcaaacaacatcatcatacaaaaatgtgtgtgtgcatctgagagagagagagagaaagagagacagagagacagagagagaaccatgacaaagaagccaaatttcttttcctacagctcctaccacctcttattagtagtacaatattactttttatatattatcattattatcttcattttcttgtgtggctccacttgggtttcatgtcgatcctacattcctacccaaggttgctttgggactaaaagtcattgggaatatcattaatattgacatattattcaaaaaatttcaaaagcatgcggtgaaaacaagtgggattagatttttacacaaatttagtatgtttgaaaaaaggtaactcctgctttatcaggtttgcatgcttattagattctttctggtaaccatagtaagagaggaagagtagtttgaactagtctcgaagaagtctaatgaccttttaattgaggtattagtatgaaaaatgcaatcagaaaaaagacccccaacaaggacacacacctgttgctcttaagtgtgaaccattctccgcattcaccatcttctgtggcggcaaaggaccacttggatgagtccaacgattaaaggaacatctgaaccaaacctctggctttccgttcagcaccgtgttagacggattgtatagaacatccacggtggttcctgcacgtacttcgagaggctcagtgtacacaatgtgtttctgcgagagaagaaagtctctcatagtcttttccttcatctcagctttcatttttgcagttatctcagactgaaacaaacaaaaggcaaaagtcaaatgatgccctcctggatgtgttattgaacttgaaccagggccataaattaccatttatcaacaaagagtagcaagtaaccaagtatatacagtaatataggtttaatgctcctaattaatatgcaaacattctcttgaactgacctttcttcgatcagcatcctccctttctttcctttctttctgaagccttttaaatatcatgtgctcttcttccacccaaaacaggtcctcagatatgttatttggaacaacagcatggaaatcctggcgtccattgttatcataattccttgcattcccaggtggcccatcagcaaaaacccagtctaacaccaatgccccttcaggtagagtaactatacatggagtaaagtaaggagtaagctacctgagtaatagactaaaaaagcaagaaaacaccaaagatccaaggcatgtaattcactcatgagagatacacatttattctaggaaacaaacatcagtaggtgtcttcaagtcatatacgatttccaagtcaacgaacttcttaatattgaattcgataacattttaactctttgcatttctaaattaagaaagctataccatgattaaatgtacatactatcatgttacgaatcatctctcaagagatgaaaagtgtgaaatagcataccatctgcataccaccaatcaccatccttttcatatgatttgattaatttttcagcaatagagagcccatcactccaattattgtaaccgccatgcatccaaatctcagtgttatgcattagcggtcttgagcttctgttgtagaacaatttgaccctatcccctgctttgtatgtgtgaggctctatataccatagattatcagcatatctgctggctgaatttaataaattttgcaacttattcttgttcatctcgacttcagcctttgcttgtgccctgtcagcctccattgcagccctttcttcctccttacgacgctcctcctcagcctgtcttttcctttcagcttcttctgcagcaagcctttcaagctctctttgtttttcttcaaccaagaagtcctcaaatgagtgttcattgatttcgctttctatttgtaggacgaaatcattatgattgttattttcgtagatggtgtcaccattaaagaatacaaaatctaatctgtaagcctgcttgggtatatggagtttgcagcaccaccaatcccctgttaactcacttttatgcattttttgggtaaattttttccatctccaaccattgaatgcccctttgataagaatatcaggctcactggctaaggctgacatgctatggttcaagtaaagatcaatgaccgaatccgcctgtactacttcaggaaaaacaaaacacttattcccagccaaataatttttctcagcaagctcttcaagccgcctcctgagcacttgtggatccacatcatcctgtactggtgctatatcaggttcatactgttcatccttgattatcctagggtcatcatcagcaaacagaactttctcagtttctctacttaatggttccctctcaatactcttgccagttatctcttctggtgcttcttcggtgacatcttgtccactaataatggttttctcttctgttggattttgtccactgacaccactacttggctggctttgttcgggaacagagacaattgatctatcttgctcatggaaactaactacagatttttcttgttcatgaaaaccaacaattgatctgtcctgtacatgagtgctagaaactgatgtaggttcaggtttcgaacttattagtgcacttattttaccacggtattcatcaagttttctgtcaattgcatcatcatccatagattcagaagacagttctggagactgattttgctcgacctcttcttcagtctcagcttcaaaagcatcatccattccctccaagaatacactgctcgatacatttccagagaagtccacctccgatgattcttctacattactagtttgctctgttgcttcactactgagcttcccattgcttgtgccaagatcaccttcatctgtgccgctttgtccaatcttcttcatgctggattcaacagtaggtctcggagcatatgttctagaggcagcacctttaggtttcggagtggaggctctccttgggtttctcttagaataatctgaacaatgcaatgtcaggaaaaaaaaaacatgatcaaagaagtaccacataaagacagttgtgctttgaacaaaaccattccaccaacctgcacttgccaccaagcatcggagaagccttgtccttgtaaatctcctgcaccttatgatcggctggggaaaaaaaaacagaaaatggtacatgtgtgtgagtgcagatcatttacctttcctgaactaatcgtacttaatacatgcatttcagtgaaaatatccctgaagcagaaccgcacaatccaaattcccacccaagctacaaaaatttccgacaatgttcaatgcgtggagcaaatcagcaaaattgtcataaagttcacttcagtcttcagatacacacaaagcctgaaatgaaccaaccgaccggaacaaattctactcctagaaagtagaaaccaatcaaaggaacggaacaaaacgcctcgaccacgcatggcctcatcttctaaagcggcatggcctctcagtggtagcaccaattaaatcagaacccggagaacacgaacaaggaggaggccaaaaccgacacagccgcacccaaacagctccagagacgcacctgcgcgaagccagtggcggccgtcgccgggcggacgacgagcaccggccggctccgggagcagagcgggctatgcgccatctccattgccagcgccaaaacctccctcctctccccctgatcccctcctcctccctccctctccctctccctcctcagagctgactcccttcccttctttttcttttctggtttccaaaaactcgcatcgaaatgcgcagctgtgtgctgtccgcagacacacacacgcgcgcacgctcgatcgaaggagaaagaaaggctcccgtgctttcccgtgaaattttcgcgatctttttcttttttattttctgcggcgagagggaggatttgtgcgggatttgtgtggacggtgtagggtgccgaggtggtggggccctgagcgcagggagacaggagcaaaaggctacaaatcccaaaggagggggccgcggggttgcaaacggccaaacctggcgcgtcagtgagtgggccagggggcgttgcaacggacggctgctcttggttgggggagatatggatggggacatcggatggatggcgagagccgtgtatgccttcgccgttccggtggatcggcatctctccctgctgggttctggaacattccatgttagatctcgccgactgcccagtttcaagcagtcacctgttaacgtctatactgactttaagatagctataacttttttttcagaatcaaaagtttgcccaagcaatttaacatttcgtctagaatataaaaatatgtagttgtagatttcagaagataaactagaaaccagattcatagaaactagctatcaactaactacttcttagaatattaaactcctaaacagacccttagtcagtgaaatctattaataatattgctgctacactgatctaggcttctagttgtagtgtattagtactacagtgctttaacaaaatcaagaatcagacacgtgatttccaccataagagcaagaagtgtcttaaagtatcactagtgttgtctcacaatccaagagcatgaatacattatgacatgaataacacaatcgagaaattaaacattcatcttttctacatatatgacaaatgcattagtacgttgtggtactacattgtcagattcattctgcttaactttttagacaaaagattaattttcattggcccagcttttaggagaaagccaaaagaattcatacagaagttcgtcctgcttattgtttagtaacactgaagttatatttgaagcaaacaaaagataagggaagaaagaaacgtatctgagttgcttctcagctctcacggtctcacctagtcagttctcgactcgtctaatgtccatgatgcatccagcagttgtgcctgaatcattgcttgtaaagatcttgattgattgatggcttatcctctcctaaaataacagcaaaggggggcaagctgttcttgtcctcatgttaggtccatctcctgcaagtccaaatggaagtaagacagaatagtagcagcaacaactcaggactcaaatacgtccaagttccagaatcattgtacagagaaaccgtcgacattgaacaagattgcttattgctgaagcgtgtatcaggttaactgtagaacgtaggccgtaaagtagcagttacatggaaacagattagttgagtgcataacaaattcagaagaaaaaaaaaacgtaactcaggaaacacaaactgtctgtcctttttcattgcagcataacaaatacccgattcatgcttagaagttcagtaaacagattgatggggagcatatggtcattggaagagttctatgagttagcaatactaattttgctgcctagaattccactttcattctgttagctgaaagactaagagaatgcaacagttctgccatattatttttcttttgtagtgtgaggccgtggaacataaataggtcttcaaattaatgagacaagataagaacatgagtgaagaaatttgatttcaggccaatctgcaaattacacatggcaatattaggccgtctaaagaccttcctgagtcctgacattgactagagaacgataataccctaacagtatagtcacaagacaatcatttgtgggctttctatgagttcttatgagctaaagaccagaacaaaaataaatgcacaaaaaacagtaggcaccattatactataagcattcaatcaccacatcagtattgttcatgggtttaaccacatcaggtggcccaaattcgaaagcactaacagactgaaacttgagatttgttcaaggtatcaccatacttgcagacagtaattgcaagcatcatgctaacatgactaattaactaagatgtgatataaactgagaagaaaataatgtcattaattacaaaaggcggataggcattaagcagctcctactagggaaatactcgaaggattgcgacatttgcacttcaacagaaaaacttttagcaattatgccaagatgtaaatgattcaacagcaacacaccatggaaatcaatgtcgaccagaccaattcataaatggatcagtaatatcagttgataatatgtaaaaccccactgcttactaaagcgatcaactataaacttaacaagatgcaaaagaaggaaacacaataaagaagcgaagtagaacgtaccatccgttcttaattgtcttaattagcagtaccctacgattcacctcactatacaaactaaatgaagaaagtagaaatggctggtccgaaaacgaatcatgttccaacaaaacagtggaacaccattatgtatacaagtcatagatggtatataacagcaatgcatgacataagcccaactcacatttctcagaagttggaacttgaaagcatcaaattgattgctatggatgacgacatcacgacactaatggctgcagttgaagatgctccatgttagtagtcaccgagaacaaatgaacctaatacatcagtcacagaaaaggcaatatcatcaaaaccaagcgagaatttggaaaacatcctgaatatgctcccaaccattcaatgtgaatttagcataagccactattgctgcaagtgaactgataacaagagtattttcacaatctgggcagaatgaagttctattaagagcatacgaaatgtaagagaaaaacatgaccaaagttaattcgaaggcagctctgactaatgattttggttactagcagttacaaccaagaaagcatactaagatttatgtcagataagagggtagttgccaaacaaatttacttactgtagacaaatagctttcaatttctgaagtaataccagctcctctttactttcacacggcaatgaaaaatacaacatgctatacccatagaaaaatcaagaacaaaatagcttcaattcacagagcattcaatagatcacagtaagagcatccagtcatattgcaactcttttctgtcactttcgtatttttttagcaaatcaaagcataagtattcttttttgtctttgttttcacatatcagtacaaccaaacaaggaaaaaaaaaatcataaaccacaaaactatcgaaacaagggagagctagatccccaaatctacaggtctatcgcagcaaatacatcacgatccgccctcctagtgagcggcgaccaccatgtccggcgagccgaggaactccatggccacctcgacgggcaggtccgggctcggcggcggcggcgcgaagagcatcaccctcttcgccgccgcgagcttcttccgctgggggcaccgcgggccgaggagcctcgatacgggcacgaagtacggcatcaccgcgccgccctcgccgtccccggccgcagcaggagggggagacgacgagggcgcggcgggggaaggcgaaggcgacgagggaggggcggggcgggagacggcggggttccggcgccggagcctggcgtcgcggaggcgggcgagggcgccggggcggaggaagcggtggtggtcgacgacgcccgcggcggcggcggccgacgaggaggagcggggcttgcgtgtggctgccatgtgggcccgaggtgtcagtgagagccggatgcgggaggcgcggattggtgggaggcggagggagcgggtgggggtatttgaaggggttagggttgggcggggacgcgcgagccttaggagggaaaaaggtttgtgccaaaaatgggatcgcgccttcgttgctggtgacgcgtttacactatgacgagtgggtcccgtatgtatgtgggtcccacatggcggtgggatagatggcgcgtgacgtggagggagtaaattggggggaccggttgctcacgttttgaaacgagcgggcggcggatggcgcgcgtgccgcgtgatcgatcgcgcgcctatcacggtaacccgaccgatcgtatgggccgggttcgttgaaagcgttggatcgcgagaagaaaaaagtccactttacatcccttacaaatggatcgagttttaataatataacttgaacgtaaaatcaggtatactgtgcaactcgagtaaaagtgcatcataggaattggatgcaagccttgtccacaattcaacagttcgactagaaatccatccacaattcaacagttcaaggaattggatgcaagccttgtccacaagtcaacagttcgactagaaatccatccacaattcaacagttcaagtagaagtgcatgatgttccataggccatatttgcataggaattgccgaattggatacaaagtgtgtctgcagcaatagtctaggataagaaaaacatttgagcgggcaacaaacagacggcatacttgatttgttctaaggatacaactgccggcacagtttgtttcacatataagaaagtagtgcataaaaaagggacctagaatacaaatgtggaccaaaactgcacaaaaacagtaacgaaaaggtgatcattacaatcttaaaatctggaaacaattgtgaacgatatctgaaagatggcaagttccacattataagctgaatcaaaaacatcaccggcatcccacatccatatttacattctttgaatcgaacacatcatcagatgaatccctcggcattctctggcttctttggagttttggtactgttcacatcagtagtggccgtgcagacaggaatcgttgcagggcttcctgggatatgggttttcgacaattcgctgtacgggttcctgtgcttttcacttttcgcggccatcgtgaaacttccaggtatatcggccttaggtaaatcagcctcctgatgcttatgctccttcccggttatttgggcattttcttgcgcatgggctgttgggattgcggcctcctgattttccagctcccgtttacccatttcaggtttttctggcatgttcttctttggtcgttcaccttcctgatgcttgccctcttgtacaaactctttagagcttataggagaatagtcctttgccggtttatcatcttgatgcttgtcatcctgctcagccaccaccatttcctttgattttgctccagcatcagttgcagtggttgcaaccttgctataggcatcggttacccatgctgcccctgtaaggatgtatctgttactcatgattgcagagccagcagtagagactgtctgttctgcagctgctaatgctgatttggtcttctctgcaacctggtatttctgatccatttctttcatcttctcatttaccactaaggtaccagtgctgaacttctggcttagacccatcttcctatcaagcgaggtaactttcgcagttgcggtggatgtgagctgatgcttttcatcaaaagacttggccctttcaagggcatccttcccaaggacaaatcctttggccaacatggaaacaacagcatcctccgccttccgaagtgcagattccatgccaccagcgttcttagactaacagttcaaagataataaagtctagttactgaaagcaatttgcgaaccaaaccagagatgcaaaaattccatagttctacctcaatatcagctaaaacggctgccggcagctgataattagtggccggtgttatgatgacagacatatccactatagtcgcaccctgcaccagaaaagtacagttttacatcatatagagagcacaaccaataagacaaattttgaatccatagcttcttattacattaagtcaattaggcaatgtataggtgctaaagcacaaaagcacatcattatcaattactggaagaaaagaccgttacatattaccgtgagaagcatagccctctctgctccttcgtcatcttcgaaggtgatgtaggcaaactgagaccgctcgtcaccactgaaaagcattgcaaaaaggttagagccatatatcctccttcgtgagctgtctttgaaggttagttgctctgtataaataataagagatgtcatgaaggacatagcactaacctttgcatttcaacatgtacgatgacaccggaaaaggaaaagaactccctgatatcttgttctgatgcttcaagtgagacattgtggacctttattgtgctaaccatgcttgctttcaaaaaagagcataaacagaaaggcactaatcagcacactggttagggttttccatttttagatgcctctctagttagaaaaccaggacggtgtagaatgaacttcctcttttagtaaacaaatgaattttatggatcaatcaatttgggaactttctcacagacacacaaccgagaaattaattttatgcaaaactatgttacttgtcagcaagcgttatcaatggatcatgtcttcatcaaataaggttgaaactcacccaatttcatgaaagtaatacatttgaatggtgcttaacaagtaaaagagggagtgccagtattacatgcattattgggtctcagtttctaacagcttttgaaaatggaacagtcaacatgtgctcatttctgtgaacaaaatatagtatggaagagacagacatatatgttaagactaaaagaagaatgaaacattaaaagatcttctaaattttataaactggcaaaatatatcatgatggagtggtaaaaaaaatgtgacatgccaaagatttatagtgcaggtaaggatactaccgatctatgcagcagacaaccttttttagatgcattagatgttagaaacttagaatcatggtattacattgtgcaaattgccaaaacaacatgcatcgggtagcacatcaggaataaataaatcaacatatactagaaaaaagaactttagacatccagaatttcagagtaccaatgctgtctcttttcctcacatgcgagaagctgcagcaataatattcagacaaacatcacaacgaccagaaagtatgagccctaaagaatgtctaaccatgcaaccaaatgagttccaacaaagaatcataggacgagagcacttcgatctcgaactcacacggcatcaggaacaacgggtggtaggttcctcacctcaaacgagaaattgtgcgctcgcctccacggacccaatccgatccgagcagcgctcgctccggactccaatcgctatctcgaactggggagagggagagggtcgacggaaacgggatccgttgcgcgcgcgcattttgccgccggtttcgtcggatcagagtggtggtgatgccgaaaccctggaggaggttggcaacgtggcgacgcgcaggggacccgatccaatgggccgtgggccttcttcttctcttgggccgcctcaaagcccaatgcctcgctcatcaagcacacgcttcctccggtggtcggcggcgagccgaggcggcggagggatgggtggggggatgatctgagcggcggcggaggacctggcgcggagccggccggtggcgctgtcgctgtacaggcggatcctgcgggcgctgaactcgccggagctgccgctggggcacgcggcgcggctggcgaagaaggcggagtgccgcgccatcttcgtcttcggcgccgaggagaggtcgctccacaacatccgcgacctcgtcgacgccgcgcgccacaccctcggcctcctccaccgcggccgcctcccttgagttgggagaagaagcaagctcgcgagctacagctatggtattattacgcgtctatttcagtgttttttttcttagccattctagattgtaagattcagttcgtccctgtgtgacatgaactgtgttggagtgaactagtatatgcccgattttagatttttctgctatgtatgtgtaccacgcataacatatctattccaaaccgaaaaacggttagcattatgaatttatttccactggagtcaatttgatgttgttcttagatttgagatgtaaagttctcgatggtacgaactgataaaaagaaaatttgaaacattcaagcactagcatagatagataatgtttccagattccttgcacaactcctaacaatttcatgcagccatagccttgctagacataggactacaagaaataggcggggacgttcgatttctgacagaccaatgaagctgcaacttcatatttacacctttgtgatccgaggtaacagcaattctctcagcaacattgttgatcgatattactaatactgtaccaagctatgaaaattatttactcttcatttctgtgaaataaataactgtcaccctgttaacgttgttacaacttgcaaaatggaatcttaaatgtaatgaggcttctaaataaaaagcagttctctgttcaatgtaacggaactgttctaaattacagattgagtggatttatggttccttacagaaggtatactcagtgaattcaagatgcatgcatgaggctacaggccaatcttgcacgtaaagcccagctttaagtgatttcaaagctttggttcacagttggttttgctgaaattattttggatgtagattttttttagccaagattatgttgatcttagtgatatatatttggtcaggacttaaacattcttagatatctcaaaatagaaatatcacaaatacctctacaattaccatcaactgattcatttttattccatctcatatatacacttataccatctcatagagactcatttttattccatctctaggctgcgttctttaccgctggttcccaacccatctctctcgtttttcgcgcgcacgattttcaaactgctaaacggtatgtttttttgcaaaaaaaagtttatatatgaaagttgcttaaaaaaatcaaattaatccattttttaaaaaaatagctaatactcaattaatcacgcgctaatggatcgctccgttttccgtacggagatgataggttcccaaccccaactaacataataatctgataaaattatacatttatacaacattttctagtgccaacctaaatttggccctgtacacaaattctcctatccagttgtccatcttgagcagatgattgcaacgcatccagtttttcctctttcttctgctcgcgtgcatctccattgtcacccctacttcttgttgcacatggttccttttctggagacgaatcaatagccgtaacgacttacgaaggccaagaatcaagatatgttgcagatcgtttcttgattatagcaccatgcagtaatatgcaggaacatcttttaacacaaacaaaaacatgcagacaaacaatggccattgagtactgcagcagcattgcagcatggggagaaggaagataaccatgaatggctaaaacagtaatttgactgaacactgctgcttctttatgtctatattatacatcataatggatctcacagtagcctatcaaatggaatcaatatcaccaggactacagtgagatacagaagcagcaatgctccagctggcccacaaaggccaacctgatctttttcttcagtactgtagtgcatacattacaagttaccctaaaacaagagaaatgaagcatggaaatactcttggaattattccttggattaaattctaggcttacaatgttttccctattcggtggtcgtggcaactctagatcttctgcttgagcacttgccggagctggaccttctggctctccatccgtgcctccatgagcttggatttcaggctgtgcttctgggatgtccgtgggtactccatgcagcccttgaagccccggttgaattgcatgctcattgaatccggggagctccattgccctatgctcggcgagctgaggcctatttcttgaatgccactgtcaatggtagaatgggtcccaacggatagccgaacattagatgatcttccattgatcgtctccacagcatctttcttgcagacgtcattgttctttggacgggacgacttccagagctttgataaggctgattctttcttcttgggttggttcatgtttgtcaggtatatatcagtcgaatcatccttcagtttctcagcttccttgtactcaaaatcgtttcggctcgtccaagagatgcttccatcacagatcttgttaactgacggttcacttccatccggtgaaccacttgaagcctgcatatcttcatggcttattgtctcccagctgctgccatcttcagtgtcactctcattctgagggcttttacttgagtacaccttggttggcttttccaggaatatatcagtcattgggctagcctcttggatttctgattcgcacatagcagagttgttcttgtagcatggctcaatctcctttatgacaggctcttcacttggacgcagctcttcaaaaatggaaaatatgtcttctgattgtgccggtggctcatatctgaattcaatatcttgtgctctaacagatttgatcgcctgtattatgttctctgcttcttccacaaccataatgtctcctctagcacaactgcatgcagcaataaaagcctcaacatcctgttgcagtttgctcaattgtgtgtatttggcatcaagagtaagttttgcatcaacaagcttcatctgcacccgttcttcacgccaaacctcagccatctgtagcatcttgcgctcctcatcaacctcctctcgcagcttgagggaatcatgtttcaaggcttcaatctcggctttgtcttcctccacctcccttgccagttcattgcacacctcctcagtgagctcgcgtgctttcctctcattatcatattcttgcagtagctgctttgctgacatcttggcttccttcaactcattgacaagcttcaagttaatcatctccaggcgtctcctgtttttcttctcatggtcaagatctgccttcatatcttcaagaattgcgcgcactttctcatgctctctactccgccaagctgccttttcctctgcaagtttcttgaacaagtgatccagcttcttcttagccgcacgtcgctcggtttccagttcacttacccgatcacgtgcttgctggagctccatctggaggttagcaacataagttgcatcttgctgctcgttgagaagatttagttgactagctatcagataggcatcatgtgcttccattccctccaagctctctggctcccattttgttgccttctccatagcggtgactggtagcacagctgtagcagcatgaagcggtacctgcagaattaaatagatcagtgatcttacatgctggtgcagcaaaaagtatacagaggttttaacctcagtgcctcaccttatggagctctccactctttcgttccaaaacagaaattgggcttgaaatctcattcttaagggtttggtgatgaaccaaattattctgtttaataagctggacttgtagatgtcttgggatatgctgtcacaaaggcacatgcacaaataagttacaagaaaaatagatccaccagattttacagcaaatccatccagaattccagaaagcaggcccctcccccctagatatgtataaattcatgttactgtttaccactggggctattccatatataacaaaacagtgaattgtcatgggacgtcatccgaaacacagagaatccagaggggcccaaactatcatgacagatagacccctctaaaacagaaacatatgcactgaacctaaagtccaacctacatgaccacacttgtagcgttggtaacatcgatctcatttgttggctaggattccccatcagacctaaggttcaaagttcaaaaaccatttgatgtagctaggatagactccaattggatgagacaagaagctgtatggtcagctagtggctcacaagggaccacatagctgaacccagcttgcatatgtttgttgctgcacgggataagagttcaatcatttggctcatcggatccctcttaaaccaatcaacccaaccaagatccaaattccaaatcacacacttccaatgcaccattcatttccgtaaaacggagataagctactaccgttttcaccaacgaaatggcctaagccatacggacaattcatttgtagccatacgggcaattcgattgtactagttgcacgagcatggagaatccaatgactggggcccgaccaggttcacatgaggggatccgggagcaggaaatgcaactgccctttttggatcagtaaatttatgcgacaaggatcacggccatcgcccaatgggctcagcacggcagctctccataaatgtccatgcttctgagcgacgcatcctgcgcttacgacgaccactgaatgcgtcgatgctgagcgactgacactagtactgctaagcacttcaatgaggagaatggattaatggatttgactacggcagtcggcaggcgagtttaaggcagaaataagcagatgaagctagcaggcagatggtacatgctcctgcatggtgtaatgaagaaatcgcccagaaggcgaactccgaaatgttttgcgtgagatctgaacatctctgcaacaaatgagtgcgttttgacctggaatcttagcattttggtagtaatggattagtcaaaaaaaggataaacatgaccctagccaaagtttttgtttgttttttctttgattcaagctgaaatagcatgagaccggaacaaatccatcaaaaagcattgaaaatgcgcgctttcttagctggacttgactaggagattgacgaacgatacagcaaatcagctcagcgaaaaagcagacgaagcacgagcttctagtgagctcaccagcactgcaacgcatatttgttgggggaaaaaatcaaaaacgaaaaaggggaaagggtttaagcctccgtgcacgtacctcgaggccgacgtgaaccctcctcctctccccgctccccgcggcggcgcccccggccaccgcctccggcggccgcagccgccacactccagccgcgagcctcctcaccgacacatcccgcgccgcagccgccttctccgacgggccacctgccttctcgccgccgccaccccccttctccgcgccattccccacatcccacttgagcagcggcgtggcgggcccgctccgccgccccccaccgccaccgccaccgccaccggaccccgacgccgtcttcagcgggcgcctccgcagccttcgaggcgtccggacagcagacggcggcgccgccgcaggagcagcggcggcggcggcggagcggtgcttggagctcatctgcgacggagggtgcggctcgggtggagagcgcgctccggcggcatcggctcggagacaagacagggagagagacgcgcacgcagtggagctgaacagcagaggagagcggagaagcagggacgggagagagacgttgggggtggctggctacttggctagtgaggaggcgttgggaaacgggaggtaaattagagagagagagagggggtggtggtggggagaagtaaactagagaggggaggtgtggagtttttggggagtgtgtggagatagtggaaggacggatctgggcctggccgcggtttaacgtgggtaaggctgtgtttggttccatgttaaaataaaattggaagtttaaagaaattaaaataatgtgataaaaagttagaagtttatgtgtgtattaaagtttgatgtgacgaaaaaattagaatttaaacagagcctaaatggatggggagattttggatgcacgcacggctttgttttgttatcaactctcttgatgttgcaacaaaaaaaaactgtctacgatttttgggtgtgtgatctactgcagtacactataggttcaccaagaggctgtcatgtgagtttttcttaaaaataatccattgttctcatgtcaaaattgatcaatatttaagcatggtctcaaaatagcatatatgtgtttttacggatcagatcctctatagtaatgcataggggcactgtttatgtgaggagtacagtaatgcaatgcagtgaacaatgtcgattcattgtagcaacaataacgaaacacattgtatagcactattgagtattgcggtagatttactgtagcacgcacgatttggacggtctccattccccctaataccggatattgtaaatcctctccattacaacatgtaatgcagaggatcttgattcgtatttctacgttaacgtttctctacatctttacaaaatatctcaataaccactcctttataaaatgtagtacttatcttattacgagaacaacgagttactacttctccatcagaatgtgaaggaaaggaactatggctgtgtttagttccttccaaagttataaatttgggttgaaattggtatgatgtgactgaaaagttgcgtgtgtacgacaagttgatgtgatggaaaaagttggaagtttggatctacacagcatatgtgttggtacggtacatcttccgtggtggaaattcagacaacttttatgtgttggtacggtatggttacaaacttaaaaacacgttacgtcctctagtatttattgtgtgagaaaaaatatacgaagttaacaaaacaaaagcaaattaatcacataaaagaacatcaattaacttaggggacaaggtccaatctcagatgacgcctcctatatctctagaaagcgcaacagcacgtcacatgacatatcgccgtcaccggctcaccgccgcaggtccccctccaaaacggagggcaataacggaacagccctcacaccccgcacgtcgccgttgaagattgaagaacccatcatcaaatgatcaacaaaatcccaaatccaactgcttcgctaacctctccagatgaccacagatccgaacacacaccacacgttcgacaccacgacacacctccacgtggcggcatcccgcacgagcgccgcgctgtccggtgtccggactccggacgcgagcaccggccgagagccgcgcgggaaaaaggcatccgaggtcaggagcacgagggtacggggagaccccccgccacgtcggaccggacgggcccagggccccacccgtcagagaggacgacgtggctgcacgcggtggtgggccccacctgccgcccgcgtcagcatctcgtccttctccatccatcgcggccgcggggagcagtaaaaaaaaaaatgggtctcgccgggaggaagacgacgacgaggccgtgcgcccgtgtcgacgcaacgcacgcagcgctatgactttttctctttttttttttgacagcagcgcctgtgattcttctgcgagcgtaacagtggagggtgaattcaaaatttaaaccttgccgcaaaggtaaaaaacgcaaaccggcaaaaccccattgtgatctgtgaattcttcaactttttttctctgtgttcggagctctcctcttcagattctttccctggttcatgtggatggatccgattcatcacccatcaagcgtggagacagctcgttcgtaaacaataacgccgtgtctgtgataaggatctagcaggagagaatactatgccgcagcagtagtagcagcatccgagctttctcatcaagggggaagaaagaatacgatgtagcactagcagcagcgtgcagcatgcttgacccgacacacacatgaagatgagcatttttaactgcagatcctctcgtgctcgtgctgcgtggagtatgcatgtggcgtagtcgaatgctctacgggggtctaggctagtagtagaataattctctttgtatcaaaataaaccaatatcgtatcggatatgatacatcgttcaaattcatcgtataaaaatatgttacatctaatattatattggtttattttgaaacggagagattagtatagagcctgttcactttgatgtaaaaaaaaaccttttttggtaaagttgtcaaaatttcagtaggatttcttatatagttaccaaaatttaatagcaaactaaatgtagctattttttttataacttaactaaaatttggttagattgaaaatgtgaacatgcccatagatttgcctcgctggtcggctcggtgccgacttctgagctccgacgaagatcaggtaggtgtagttcaggtcaggtcgcatgattagtcttggagcggcgttttgctccgtaattatggctgcagatcgatcggtcaaggcgtaccgcgtacagtatgtactactcgtatagtctactgtagaagtaacatgctggtggttggcgatgccttgttaatcttgggggcacggtggttagatcatgattcggaaatggtagttgggcttgcagaggagacaaagcaattacatgtgtaaaggggagcgattttttcttgcaggtacaggaatgccttttcaactggtgtagtacgcattagtagctcggttgttgcgtattctttggattccccctatttatgttctgtattgtgttgctctcgacgctgcttgttctttgggcttaggattccccttaagtattttatgtttatcctgtattattattgcggagaagcaaagcttgaaacttcctggaaggagtacaaaaatctagaattcggcctgccttgatgtggctgagaacgttggcccaacttagcccaaacaaatttaactggctttggcccatacaggattcaaggtttttgggtcccacggaaaacgaactgaatgtatctctatctctgtcaaagttaaaaatatttctaccacaattttagtacgtcatccgtatttgagttagttataaatccatacttaatttgaatgtctaaaataactagtatatacttttagggaccacctattatgcagttaattgaaaaaaacgaaatcatcagttgattttggtatagcgttcaaatccaacggttgttgagtaaaacaacccaactcaactagctcaacctttctctctcccaccctaactcgaccgacccataccatcccatgcgtctccaatcgacgccacgtgcaccttctccgaccggcggtctttttctctcgctaatcctgaccctctccctctacttccaatctcatctcttttctttttttttctcttcgaaattcctcttctcataaatattttccttttgaatttatcattgtttaaaatgtgaaatgtagtaagtttgttacattgcaaatacctttccatctagagtaaaagaatgtttactaatgaataaacaaaatttcaacatttgattgacgaggtatagtaaaatgcgtcaacttatgtaatagacacttgattgatttgtgagattatagaaaagtgtacataagggattgttcgttccatgatgcatgaagcacgtgtaacccgcaatgctatacatggtttctaactttatttgctgttgttttatttgtctattttcgatttttatcaatcgtataagttatctcactggttaaaacgcatacatttttgctggttcgataaaaactgcgaaaaaaagagcagtggcgatcgagactcttcgaattcgttcgattccctccacgaaatttgcccaaaaaacagttctcccgccaaagcgtgaatcccccggccaaattttccccaccggatcttcatcctgcgaccgcggctcaatcccaatcccatgccgatcccctcctgcttcctctctcaaatctccctgccgcaaccctagcctcgccgccgccgccgccgcctccggctcgccggctcccccctcccccgcggatccaagctatccaccaaatccctccctcgccgtcgccggcggatggacttcactgccccttccttctccctcggctccgagttcgacgagccagaggaggcggtagggtatacggcgcccgatgccccgtccttctctctcggaatcgatttcgagggcgacggcgacgagtcccacctcaccgatgccggcaatggaggggaggagcagaagcgttatgaggctcccgatgcgccatccttctctgtcggcatcgattccggcagcgacggcggtgaggagcgccgccgggaggagcaacggcgaagttacgaggctcccgacgcgccctccttctccctcggtatcgactccgatggcgacggcggcgacgagccccacctcaccaacggaggccaccgggaggagcagcagcggcgttacgaggcgcccgacgcgccctctttctccctcggcatcgacttcggcgacggcgacgacgaaccccgcctccccaacgcaagccgccaagctccgcgctacgaggcgcccgatgcaccctccttctccctcgggttcgatgacgacgaagacgatgttctcatcggcggcagccgtcacgagctcgggactgtcgaggaggaggacgacgacttcgtcctcgccgacggccaacagcaacagcaacggcggcacgaaactgttgtccccgacccggcgccgccgccgccagagatgaatcgattcaagcggctgcggagaggccccgcgccgccatctcaagcgccaacaccacctcctcataggacaccagcgccggctacgatggaggcttctccggtggtgagctcgaaggccgtcttgggggatattgggagctttgaggatgagatcgaggatttcaccgacgaggagagattcatgcgaggtgagggaaccactgaccctactttcttgaatttttgtgcttacttatctttctaggcatttccgtttcttattctgaatctagtaatacacacgtacacactcctggtcaatgaatttgtaatttggcttcttcaaaaagctgaaggttagccaaattactggaaccagcacagcacacactagacatccaccaaaacttgcagtctgaaaaatagagagagtgatttctagcgatttggagtcacatgcctgttcatgtaacataagagtaatccagtagtcaaccataaaaccacacactcagtagatctccaaaataacactggtcagattacactgaagactgaacaacccgtagtacttcctcaatcttcagaactaacttcagacaagaaattagctgggatatcctcaaccaggcttgctgccatttcacaccaattatgccttcagatttgttgtatttgttgcttgattgcttgaaatcctattaatatatttttctggtatcgccccttgactagacattccaacatgtgctgtgtacatctgctggatgaggaacttatgccccttccaataccatcctgtttgttgtcagccaaagagcccaacaaagagctagcagcccgtataacataatagtttttttggctaactttttagcttcccatgtctcatctgttctttggaaaattcagaaatagagttaggaacactgcaaatttgccatagagcgctgaaacaaagaaaatgtggccagcagcacccaattatccacacaatttctattgtgattattcattcatcatgtatgtggtatatttgtctgcagctggctaatctctatattttacggaactttcttcatttccttgtgtggattgtggaacatgtaacaacttctctgcttgcagacgtaccgccgtctgttggtagctgcatcacttctagcagctcaaggttctctcatgccagcaattcaaagttctcgctgatgaaccatggtgtcctgatgagccaatcaacaagtaaatcaaagaaatttgcacaaacacctaattattctgcttcaaaatctatggaagaaagcagcaccaagaaactgctccctaagacagcattgagcccaatgaggaaaattcatttgcttgattcagatagtgactcggatgataacaaggaaatgcctggtttgcagcaaaactgcaaatccaaagtgagcactgttcaacataagggcaaggctgagatgaatgacagttgggcgacacctgctcttgatgagttctgcaatgagtatttcaaatccgtggaagactcgagaccatctcagcagaaagaaggcaacagtttttgtggccccaaagtcatacgttctaactactctgttagtgaaactggaggacattttccacatcaatccactccaagtggggctgtactagaggacaatcagacagatagtcatcctcctgcaatgcattattttttccaccatgaccagttggttcgtgacctggtccgtcaaagactcaagcattttgttcctgttggagtagacagcagaggaaatgagcaagatggaacacaaaatctccagtacaggtaattgcggttcacacatcaacaaattcacaatcatatcctgcagtcctctgtgcaatgtcttcgctgatcttggttactctgtttcatcatccttctacaggagtcagaccggccggtgtgctgctgaaaatgatcggtgggtgactccgaacaagaggatgcctgttgcaactcaagttggcagaagaagagtaaatcctgctggaatgtctggctctggccattggttgactggagacgatgggaagaaggtaaacctgcatgtttgttttcaacactctagttgatttcttgatggaaaaaaggctctgtcgcatatgcactgtttttcattatggaggccgacctgtttccccctgtattttggttacgtattcatcgttgtgctccattggatttgggctgcaggtctatatctccaaagatggccaggagttaactggaagggttgcttaccgacaataccaaagggtgatatgctcattcctttatgattaatttcaaagcattatccttgtttgcaccacactagtttcatacacaatattagcatattttgatttattttcaatttaagcatatagtggttacatatgcctagagttgcacaaatatatttagtttggaattcatagtgaacctggcatgaggatgttatttttactgcatggtggcatgccatctaatttaacaaatctgtgcggaacaggaaagtggcaagggatttcgccagtcgaagaagaaaagttcggctggaactagagcaaagaaagccactactaaggtgaaacaagagaaaactagagcaaaaagaaagcgctgaattcaagacgtgctggcctcgtattcacagacgaggtggtgccaatgtaattagtcaatgagaaatcatagtcattatttgttcaatccatttcataaggagttgttaaaaacatagagcagagtagaatgacatggtttatgtcggagaatataatcacataacaaagcttcaactgttcttctttgataaggtaatttgggtgactagttatttgttaacttgatcaggctttgctactattttacacgtcgtgctcgtggttctctcatagcactaatgcaggaacacaaggccttggggctttgaagctgttcactgctgggtgaaccttgattggcaaacgaggtctccatggagtcatggagagaagaaaacggtcagacaatagcggctgcgcagcctgggcattcgtgaccgtggctgatagctgcggcgcactggtgttggcctccctgtttcgcgcttaaggtgttgtttcttcactagatgagctgaattcgctaggatacgtagcagccaaactagtaggcctaaatgggccttaacatttatttcacaagaaaagcttcaactgcagctctccttggataaggtgatttgggtgacgattgacttgtactccctcttccctctgtccaaaaaaaaaaaaaataaacccaactataaaaaatttttatataagacggacagttaaagttggacatagaaacttagagtttatcttttttttttttggacggagaaagtacgtcgtacgcgtggttctctcctgttgccacactcaattgtttacttacccttgattagttgtttgtcgtgtcgtgtcgtgcccgtggttctctcctgttgctgcactccatgtctattgtttttaccctcggtcaattgtttgggaacccacggtatcgagctgttcgccagccgaatcgtaagttagtacagagctaatgcagacagcaaacatggttgcggaacatggccatcagcagttcagcactccccaacgttctcacgcgttctccaacccttctgccagagcaattctcacgcgtgcacgcgtcaggccttcgatttgtttatgttgtgcacttgtgcttgtgcgtgcggtgtgccggagtttcgccggccactctttccactccataaccataatctctccgttttgacagtccacccgcggaagggaaatgcctggaggcgcggctcgtgtgctggcctgcccagtggccgagtgcttccacgccgtgcgcttgcttccagtggccgagtggcctttgcctttgctatgatcaagatgagcgcaatgacgggacgtgcagctgcatcgttcccgcgccgcgcgtccaacggctaacgcctccaaccgccaacgaaatccagagtcctaactaatctcgcgcagggttcggttaccttacctgcactgagctgccgaccgattattggtagaccggccggaacaattcaagtccatatttaaattttaaattgcatgatctacagattccgtgcaacatatatgttgaggtggatctatagaaaaaaatgttatgcattacatcatctctactctctagtagtatcctctactttagagtccctaagagcacccgcaatggtaaagtaaggtgctctctataaaacatgtacatctcagcaatagactagataatagtaaactacttcaatagtatgtctacatgggtatctatagctctctaatgcattgcctcgtttttctctatagactatctccaggttagtagatagctgtgctctctctcttcatttaatctcttccaagtaggaaaatatgctgacatggatctcttgtagagagcctatatataaccattgtgggtgccttaacaatcaaatgggggttgcctccaattctttaaaaccttaaatatgccatcaactttagtagtagccctcatattttagctcctatttcttttcctcttttattttagcatataatttatgtttatatatagtttaacaccaaaagtttgaattttaagttttgaagtcaggaaggcggattattttttaacctgggtttatcggcagtgatcggctcgttatccgtggaaaccagtttttcaattcaaaatgttattatattcaaacttttgtccacaacaactggccaattaccggtattttttttcacggaacttcaccgtagcatggcaccacgggtccacgaccgtacatggcccgagtcgcgactcgcgagccccggcccccgcacatggcacaccaccctgcgcgcgcgtcatctttcgacggtgtcggtaaccagtgaccacgcgcgagccaacatccgccgcccacccgctcgtctgatcggccggtgtcccgtatgacgcgccgatgcttgcgtgcaccgtgcactgtgcgggcgggtgcatgtccatatcgatatcgagcatcaccaacaatctacttatcttattccaaaactaatttttcgagattttagttaaaaaaacagttccaatatatacctactctcctacccgaattttgagttcccttctctcgattcctcactctatttatatgcgggtgtgaaactcactcccaatcttgcactccgcctctctctctccagttaccgcgtgggagatagcgatccttacatgtgtgaaagaaaaaaatggaatattctattagtagtttgacagaagggcccatttttaagttttagacggttgaatttaggcggttggagggatgagtctttcactttttattttcagtttagaaaaccaaaaatacttttttttttggaatgtgatgctcaccaaagctggattgaaacggctctccatcaatggcctgagcgctaaattttgcgaggaagttttggcggatgggaaccggtcgataaaacagagacgatcatgctacccgatacaacgctgccacatgttagagcaggagtttgtcagtttttggctaaacgggcaggattaccggtttcaaccgatgtatttggtgtaaagagaacttttacggtacaatctcttagtatatactagtagtatatagaagacatgttatctatgatcgggatcagacatgctgtgaaagttaagctatcggaaatagaaaaagtctatacgtactaaatttttcttacaaaatgtttacaaactctgatatgtcaaactgtgagtaaatctagatttcttacaactttcatctagttaaatcaaacggttgagaaatttgttagtaaaagttttgtaagaaaattttagtacgtgtagcagtactctcggaaataagcaagtaactaatcaggatttgatcccaaggatcgtatctacagattacagaatctgtacgaattacgtataactgttaatacgaaacccttaacagcatcatcttccaaatgctacagtagtagtactacattatatgttcactcgccattattgcgttggaccttgcttgatcgcgcgttcgggaccttgattaatttgttctggtgtacccgagttcagtcggtactcggcagtgacgtggttgcagcaacgtgagaaatccaaactgcctcctctccagcggccgctcgcccgtccatctgctttgcccatcccaccccgagggaccgagagcgtgacaagcagggcaacctgctctcccagccgccaccaccatcaaagtggccggggcccgagccgcgcacggcgcagcgcacggttcgcccctcgtccgcgggacgctgaccgcgcgcgcgacatctaccgatccgcgcgggcgtcacggtgcgtgctgcccaaccgatcgtgcattcgcgctcctccccgctgtgcgctagcttcctctggccacaggccgcgcgcccgtcccccggccgtttctgccacaccccatcccaattcccaccccgcttcccctcgtgcagtcgcgtggccagtgcccggtgaaaacgttgcatacgcgacgcgacgctgctacttccaccgtgcctcccgcgggaggcccctcgctcgctcgtctgatccgccagcttcgtctcccggcgttgtgcggtgccaccctctcatgcgtgcgattccatcgatcgatcggtgcgccactgcgtgccggccagtggccgaacgagaaagtgagcaaccagccgaccgggcgcgctcgtttttttgcacaaggccgccgcccgtacgtacgtctacaccgctctaaccaagttggatcggaatggctccttcagtggccctctgcccctctcgctctaaatttcgcgagggggtttcgatggaaagggacccgggtcggccgagcaaaccgagacacgacgtgttacctgacgcgacggtgccacaagtttaaagttagctagaccaggtgtttgtagctaaacgggcactgcttagatacacgtgatccggatcgaggcagcccatcagggggctccaaatggcgtccatagaaggggcagatggaccatcgacaggtttccatcgttttcgaatccaaatgctactgaagaacttgttccccttcaccacaattgcggtggacctgacctgttattagcttgcggagttgtggtatcagtctctcttcgaactttccagattttcttcctctcggcaggtgatgtacgtgtgtcagtgtgtggtcctgacgggctgaattaatcccctaacaacggcatgcatgcatggattgatggatacgccattaaacactgaacatccgatactttgttttcgcatatttattatctgacagtgtcggcgctccgggttatacaagtttaccatgtcggagaatttaaggggagagcggttccattcttctctctcattctctcttcctcaatactaaggtgtgcttggtttgttactatgccaaaatattggtaaccaaaatctaggcaagtttttgtagtgtcaatattttggtaactttttgtgtgctattggtagcaaaccaaacactattaaaatactaatcaaagtgctaaacaatttggtagggcacattttggcttcaaaccaaaatgaccctaaaaatatggacagagtgaagtccggtgtcggttgttagggttgagttttggacaatctcactgtagtttttttgttggccaagcgacgattggtcacgtttagcaatgatcggtccagtgttagctttctcacgagtttaagtgttaacgatgttggcgcgtggggtggttattattttttttttctggttacgatctttcaggactgtagtcttgtaaatttttttattccctattaacttcgtatttcgtattgtcttgtgcgagtgggtgaaaaaaaggttgtttcattctagacaggccttaaacaccttagttggaattctacgatattacggcgccagcttcagaaaaaactgtagtatactgcagtcctacacagatgcacaacaaataattttccatgtttatggcatgtgactagtcaaagtcctaacatactagcagccacctagcaaagcaaaacatttctagtatgatctccctatagtcaaacaaagcccttggagccactgacagtgggctccacttcacaaatacaaactccctggattaaataagcaccaccttaaatacgtgtccatcaacaatcaaaaccaaccaacacgctgttcaactccagaacctcactaagtttctggcaaggtctaatcttaaaataaattttcttaatgggtcaatttatcaaaattgctgccagaaccttctctattagctctccacaaccacacaaagcttcgcgccacgacgctctctcgcctctctgctgctttagcgttcgcgcgcgcgcgctgcggctggctggctggaccaagctaatagctatggacaccgtcgtggcggccgcgacgacgggatcgagacggtggctgccgtgggcgcggcggcaggcggcggcgtacctggcggcggccgggggaggcgacgacgggtgggcggcgtgcgcggcgtcggcggtgcggatcgtggtgtgcttcgtgtccatgatggcgacgacggcggcgtgggcggtggtgatgctgctgctgctgccgtggccctgcgcgcgcatccggcagggcaacctctacggccacgtcaccggccgcatgctggtaaccaacgctgcgagaagccaaccgatgtttcttggactatacgaattcagcgaagctgaataaactttttttttttgcttgcagatgtggattctggggaatccgatcaagctggaagggatggagaacctgaacacgaggggaatcttcatctgcaaccacgcttcgccgctcgacatcttcctcgtcatgtggctggctccgaccggcactgtcggaatcgccaaaaaggaggtagatagaactgtatatacacagttgtgctagcatgcaagagagtgagaaaatcatctgcctagattgtactaataacgtggctgaaattgcaatttatgcagatcatctggtacccactgttcgggcagctctacgtgctggccaatcacctccgcatccaccgctctaaccctgccgctgcaatcgagtcaatgaaagaggtataattaagttcagtgatgtttacacactcctgttcatgtcgatgcatcattgtgcttgtgcatttgtgctgtttcgtagcatgctcatatttcttctgccctgctgttcccaggttgctcgtgcagttaccaagaacaacctatcactgatcctgttcccagaggacacacggtccaaaaccggaaggctactccccttcaagaaggtactacaataccaatacagattcagcaactcctcatcatcatcgtaatatcagctgaaaaactcaccgatgaatctcgatgcgtggcacgcaggggttcgtgcacacggccctgcagacgaggctgccgatcgtgccgatggtggtgaccggcacgcacctggcgtggaggaagaacagcctgcgggtcaggccggcgccgctcaccgtgaaggtgctgccgccgatcgagacggacgggtgggtggaggagaggatcgacgagtatgtggagatggtgcactcgctgtacgccgacagcctcccggactcgcagaagccgctcgagcctgtgaacaccgggaagaagaagatgagctaagttcacggttagttaacgcacacacggtgacaatgggtgtagttttgtgcatacgcgctgtgctgattgttgtatagattggtgtgtgcgtgatatacatgcttgatttggggatttgtagatgcaacagaaggttaaaaaaaggttattgattttgtgagcacatgaagcattgagcttgtatttgggtgccaatgctgtcttcagcccttctgcggatcatattttcgttcttttctttgctcgctctccaagcgaaacactatctaaagaaaacagagctaaagaccgatacaatgttgtactcattttctccgtgcctggattccctttatgtaatttgattatcccaagctgcagccttcgtttcttgaaattgtatggagatttttttttaatattatcaactaaaatacgatttagcacttaatacactaagcattcccattaccaaatgctccaagatcaataaagtttacccagtgaaaatgactaatgcaagagatagtgagcaataataatggatgtccttgtcacaaattaagagatcgattgcattgatgagctcggtacaggtatactcagccgtttatagaaggaagaaaaaaaaaggcacaatcaacctttacgatccaattgaggaccaggcgttcttttgattatatatgtatacacaggtcagttatgcagcaaataccaatgttaggttcgtattggcagatgcttgcttcaaaactgagagttggaaatctttccaggcatttatcgacctggattccctgaacctagcagcaaaagaagaaatgtcgcattaattcataactgcaaaataaatatcaacgcataatagaaatgatggataatagtgatatattaccacatcatcatatagagtcctgtagtgatgactgatgaaataaatcattatcccaatttctgttttgagttacgcaaacacaccaagtcctcctagcgtaaccgttcagtcagttggtcagttgattgccattgggctctgggaaattaaagaaccgtttcaacttcagcaaactgaagtttacgtctatttaagtatggaatgtctttcccactgaaataggccagacttctcaacatcaccaagtgacaacacaggaaaacctgaaagcccagcactgaagctgttagaaaacataaccaggaggctttggcaggcctgctcttcttctaggtgctctgcctcattgcgatgcatagcaggatccttccaaggttgataataatgcctgggagaataaacatggttagatcctgcagtacaaaaatatctaatcataagagaagcatagacaaatgtaaatgatgtggttttacacactagaggccataccatctccatgcaggattagcttcagccggacattgtatctgtgagcacagcatttcgatttgtccataatcgccaatgaagtttctgataactgctttaagaaggttaaaaaaaatacgagtgcaaagcattagcaagacgggcgcatgttagacctagaattgatagattaaaaattcaaatcacggtaaacataccttgtttattggatctgtcaagaagcaacaagcaaagagcagccaccacagatggcaaaaaatctcggttcattttcagatgtttttgcaggtacagtataattatagctagtgcctcatctgcactgtgactgccaacagtttcaaccttttcatcatatgtatagttcaagaaagattcaagagatccaaaattgttggcatcccttgtaaggtctccacacttttcatgagagatgcaggagattttcccaagaattatggaagccactaaccagcgcagcatcttagaaagtaggcactcgttttttagtggctcttcatgtggcattttcagtacagatctttgttcatcacacaaccagaagatgttagaagttgcccatgaaacaacagttgctgtcatcgacttatcctgccattgtcacaaaaaatataatttataaatcccattacacaaaatgcatatgaagacaaaaaagaaacatgttactgcaaattatattaattatgaggtccacattgttcatggcactgcacattctcagttattaacagtaccacatggttaggcacaaaaatatatacagtaaaatcttataaattccacatgaatcaagagtatgcaagaatagggacagatagagacaaggcaaggcacaaatgaagtaccatttcagacaaaactggcagaggaccattcataagaatgacatcaatgccaagttgcattgcaagcttaacttctatgcttcttgagatgccaccaatagttcggcacaatttatgtatgccatggagggataaagagaaatgtggttggtaaatcttccttttcatagacaacctcatcgttgatgcaatcacatttagcactgaagttagcaatggaacatttcctttcaacaatttcatatcttcaacaaggacataaaggtatttagatattcttgagagttgctcaagggcggtttcttggagccattctgcaattaatcttgatgatgtcaaatcattcactacctggagagaggacataaaatcatatgtatagattaaaaagcagattcacaatactatcgtaaagaaaatgatgtgcaaaacattgctaaaaaaactctccaaatcataaaataatactagaccattgaacaatgtcgttctcatagaaaaacaaatgttataatctgtgatggttaatggtatgcaggtgacaaacggctaaaatagtgtgtttgtatcaatcctatgggttcattgactgttttctaaagatatgatttagtgactcatgtttcagtagtagttgcttgacagaaacaactgactggcattatcaggagtgtgagttgcaacctacttaacttgtctaaagaaacagcattactaatgagtgagaaacatatatttagaactgcatgcaccaattaatgttataaactaaactaggacagctgcaataattatatatacttttaaagtattgacacaaggaaacagcaaatatcactgcagagtgaatttgacttaaggaacaaaatcaacattaataaatcagtcagttctagtaatatcaagcaacggcaagaatcagtcccacaaagtagttagttgaaatgatcctcatggtcaccagcagagatcccatgaaagaaatgatgggctacaacctacaatcaagattcatgaaaaaatatgacaaatcctagagaaatggttctccaagtgtatatatgtgggtacatgcactgtcctgcccagttatagtgcttcaatatctgtgcaaaggtaacacgatagaatgaatggatagggaacatgggtggtttggtttgaattttgaagattttacaccaatctcaaggcatatgtttgactgcagtgatacatgcagaaaatacaataaccaactcgtacagtcaagaatctcatctataaaagtgttatagaaagtaatgtaaaacagtgtttacctccaacgctgacccaattactgtagaagaataggagttttttacactgtccagcccttcgacatgagatgagattacagaggataaccacaacagaaggccagagtcttttgttaaatgatgagccagaacgggaagttttacacacttctttagcacctaagttacaagggatattataaataaaaacaaaatatttgaaaattcgaagtagttactggattcttggaaggcaaaataaagtatacaaagccaaaatggataagtgaagcaaattacagtaaaaaatacacatcaagtgctgcatagtccatggcttccagtgtggtgtagcaggtaaattaatgtcaagcgacatgtcaaactcaaagtatcatatattgctaatttgttatgctcttatgttgttttgtgttttagactgcatgcagcaaacaagatactaagcatgaaaggtttactagatataaatggcagcaggctaactactaatgtgcatagtaatagtaataataataactactatagtgcaccatcttgaaatcggtttataacgagaaaattacagagttacctggagggttaaaagctttgtttcagaatctgaaacagccgaagaaccataggaaagagcaagctctaaaacacctcctcttttgtatatcttagcatcatctgctaggtttgatccagcatataacaactgaagcatccacaagcggtcagatttgaaatgcacagcattactcctaaacaatgctggaaataatggaatgctctgcagtcacaacaaaatagtatatataagtatgacgctgtgttcattattcaaagctagttaataggtgtaaataaacataacgcacctgaaggttgacagaggcagaatgcatcaaaaacttactaattgtagcaaactgagtatgagagctatcaagtagtgtcaaagatgcttctgcggcaaaaatagcaataacagaaggtatcctctgccattgttcagatatcccattctgtagatatgtcaaaagaagctggagctgccatgtttccttgcttttctgagaagcctgtattatatagaagcagtgattcttcaagaaaattacagattattgtaatgaaaacattctttattcatacaagctttacacacttacacctagtgactactatagaagataaccactctgtactcagatctactgtaatgaaaccattctttattcattctgcatgggatatgactaaagagttaacccagatttccttgttatcccttttcaggcttgttaagttatttgtcaggcttatcatatgtattagttggatcagttaaggagggtcctcaactcctcatctcttttgagttaaggaagaaatgaattagcccctcaagttcctctctctagtctggttcctctcgactctactcaccaccctccagtttttccttcaaaccatcattatcagtctatttctacagaattttagtcccacatctaccagaaatcaaactgctcccagaatgtcaatacaaattatcttttcacagtggtttgagacaaataaatatcaaaaccatgagcccatgacattacatatgtgcctagaaagttaagagaacattcaatgtgttagcattacaaagacatgtttagctggcagtgtagcaatataacacaacaacaagaaatcaaagtagggctgccactgccagagtaggcaataaccagtggcatttgaattcaataaaccagtatgacaaaatatcatatcaatattcaataaatagcagctgttcagtacctccaatgattttttgaatgttcctagagattcataacccagcttccttaagtcttcatcgggagatgatatgctaactaatgttattgcaagtagccctagtcgggaaaattcaacaggttcaatatagcccatcagaagagtatggattgagaagtgcaagataaacacaggatcataaatccgaaccgcatccatgctttgagatgttgcctgtcaaccaatacaagtgtggtttaagagcacaagggagacaaatataccaggaagataaaggagtgttattctgaaagaaaaaaaaaatctagaacaaaaatggagtcaaaacttcaattgacacaaattaccttgaaaatatcgccaaaattatcttgctgaagctgttccagtgaaaaaatagaagctcttgaagatctcctatagcaaaattgtaagacagtcatgacacagagcttagaatcaatgggtatgttctcgcggaatagcgaccttcgcctatcactaatttccgcattttccattttgtgcgtatcagatgctgaaaattctagcttcagttcttctctaaatttcacagctgcctttccccaaagatgatccacatcagtaatggctttgcactcagatgactctatctcattcataaggtgaagtatctctagatctgtttcactaagagttgcaccataaacagataaaagcaagaaaccaagctcccttgattcatccaataggctactgttatgttgcctactcttaatatcatacagtaccctgagtaacctgatgatttctactttcttcctttctggaatgcagtcttggaacttgttttcttttgcaaaagcagaatcaactgattttaaaatacttggtgctggctgaagcaggcccccagtgggattacaagcagatgggcactcggaaactccactgcaggttattgtcgacacaaaatgggagtgacccagtatgagttcaagaatttcatcagcaggaaacttcccttcagataatacaacaattatgcatcggattgcttttattacaacaggatcactgaatctatgtaagagggatgatctgatcaattggttgaggaaaggtattggcttcaactggttcagatgtgactgaacctccgaagacaactcaacaatgttcttgaggattgcatactccaaacaactgacgacattttgttcctcaggagaggaaagtaagatgccatcactatgagggaaattcctgaatattttatccaacgttctgaccaatatgcttataaaactcagctttgcattgttgactcgcttggactccttctctggggctatttcattgttcaacgatcctctaggaggagataacaacatcctaatcagtgatatctttgcaaataactcattagtaagcttcataataccgttgcatgaaacaggagtaacaaaactgatgtcagaatctaagagctcagatgattgtgggcaaattgaagcaattatctttaatcgttgcttccgaggtatctctttcgaatagaaataatagcatagcatagttattgacttccccaagagagtgtcaccgaaataattcattatatcttcaactgatgtgtgtctaaagtcactaaaatcttcctcaaaaatacttctagtaacaaaacttttccaacatggaaagccattatcactcaaaagaatttcacgatagaagactggaactggctcaaggaagtcaacacactgtctattgccaccactatgatgctctatgtatgataaggcagcaggcaacaaaagtataaaactatcctcatgagtccatgaagcattagaatcggaacccacgacttgcataacagaagtgtcttttttcagaatatccgtgagcaattttccaaaaaggcgcatgtgcataggatttgctcccaaaagcaactgtatagctttagctttaaccttagatgtgggaaacatgcagtgatgaagaatgtcaatgggagtgttggccaccattgtcgataacatcatgtgtaatgcaatataatcagtgttcctaactgcagatatttctgtatggtggatacgaattaacatcttcagcaagcaaagatcagcaaattcaagattcaatttagtagcaaaatgaagaatgatattataaacttgctgaatggtggcaatatcacaattatgaatctccaagccccataatcgacagggtcctgatctctgatcaatttgttgtaaatagtcatatagcatttcgaaggcaatatcggcagtgtatagacaacaaaatgcagcgggagcatatgcaggtgaactggaactgaaaccttcaaacgttgagaacatccagtttgcaagttccaggagtctgacaggagatacaaattttgccagtgtacggaacatgtaaaaatttggcaaaaacagtccaaagttccttttctccatgcagagttcaaacttctccttgaacaacagtagtattctctcaagcagtagcttcggagggccaaacagtgactcaagggattgatcatcattattagagtagttagctccaaaactaccagctaataatacaaggccatatagattactcagaagatttaaaacaaaactatcagcaaggtgtagcttttccttagaaaaactagcaaaatcttctttcacatattccacactcccatctgctaagtcttgaaaattggataaagagcatgacaaagacaggccaattataggatgctggacaacagactcaacaatgccattaagacattcaactggatagaatgccactgaagattttgagttagcagtatcagcagtcaaaactcgaatgcgctcgaagatgctgtcaataagagagaagcaaacaccacacaactgtgcaagaatatctgaacacttcacagtgtatgatgacagcaagtgatggctccaaaataagacgactctcaagaaaattgtcaactcacttaatgggctttcagaaatcttagcttgaagaagatgtacaagctcatcttgaagtaatggatgtgcctttgtgatttcatctggtgctgaaaatgcgaggcttaatactgatggtaagagtgcacaaaatggagtcacatttagaaaagtacttatcacagctgattctgaacaagttgagtgctttccccatttgtcctcaacaatattgacactatcaacatcaagatttcccttgatctgcctgagactgctgaagaacatgtctgggcaataactagcaaccttagctagataatcatgttgcagaaaaagaactgatgacaagaacggcaaattagaaggaaaatgtgtcttcagaacatgaagaagcttcggaaagctactgataacatcatctggtggtgcacatatgactgaatataagaatgatgttgctacatcatctggtaaattggtgggttgctgatttgacatttcctcaattgttctagttacagaacacaaagaatttccataaacttcagacgaatgctcaagggtgctgaacaaactagaactcttttggtcagaaatactcctcaagatatgcaacaaatacatcagtggcctccattcagcaaaacaaatcctagaatttatttcctctgatgaaaatttaccgagtctctcatttaggatggtgcctacaagatcaggcaataaaagcacatctacctgtttatgatcattggatcagtgaaagaagagtagaagaccatgcaagacaggcaaataggcgagagaggacataaatgcaatacctgtgactgcataataaggtagactgtgttgcacacatataatgaaattgtagacttctcatgtaatttcacacttgcagactccgagtctagtagcctaagacatttctggagaacacaaacaatcaaaggactgaaagatggagaatagcctacaaatcacaagaaaagtttgagcataggaataagttggttctcattaggtaataattcaaaagcgtggcatacatggataagaacctgccagaagactcagtgtattaaattaaagtaaaataatagatgcaacaaagtaccacatttataataaagaagttataaggagaccagaagtttagaacaaagtgtaaaactccaagtctccgactgaacaaaaggagtgtggttcaattagatatccatgtgcatggcaactacataatacagacaaacaatagaaagataaataaacctgtattccaatgaagttaacaatatcatgatcatatgaaagattgtgggaggactttaacccctcaaatgttaatccttccatttcatattataagtcattttgacttttttcctagtcaaactttcttaagtttgactaaatttatacaaaaatttagcaacatctaaaacatcgaattagtttcattaagtctagcattgaatatatttagatcatatgtttgttttgtattgaaaatgctactatatttttctataaatttaagtttgactaggaagaaagtcaaagcgacttataatatgaaacggagggagtacaaactatgatagctcacattgtattttaggtgatatatgtagctcacattgtatttctgtttggcaccaacatttccaatagcattcgtattaaagaaaacaggaattgtactccttgattttcatacaaagacaaccataccttcaaactggttaaatttagagataagcttacggatatgctcttggtatttgtacagattgttcccaactactgaaatggcatcacaaaggaaagggatcacaatgtgtgacagtctattagatgcttcaactcctaagccctctctttcaaaacctttggccttgtaacacggcaagaaagccaaccatgcatcaatctctgcaatgttctgatcaaaagcgccagaactcgccacagcagctttaactaaaatatatgctttatcacggatgctcttaacttgcgaatgcaacataatgtcaatcagaggttgcaaatacttgtacatagattctggaactttttctgggcaccaatatccatcagattgacctgaatactcaactaaaagagataaaagggactgctgttcatccatggacagatccaaaggattaggcggcataaccttgaagaagtcaaatgatccatcaaaagagctaggcattaccctctgaaaagaaattgaagttaaaagttagaataccaaaagagtagattgtgaacgaaacttaatatatgcatttgaatatcaaaacattaaaatcataaattgtgaaggaacattatcgatttccttttgctagtcacagaaaacaaaaggagacagagcaggaatggaggaattaattaattcgagcaatgaaataagcaaatatagatgaagtggaaggaaatttaactgtacctaccagatagaacctgagaacatcaagcaactttgagtggaaaacatctccaaccacttttgcatctttgatcttcggatcttgcttatttagaccccatatctcacacagaatagtagtatgatcatttgccaagtccatctcttgctcttcaggctcatccctagacaactcaacatcaatcccgccaataataatatcagcatcctcatctgtggctccacgtctccttttctttcgaggaggctcaagctgtgcatgtttcttttgtttactctgagaataattttgatgcttctgactagcagaagagagtagcttgagaagaacctgcggatcaggtatagctccacgaactacatcttgaatatattctctcagagttatccacctatcgacgtgcattttgtctccatgtagaacctcatgtacaatggatgcatctgctgaagtagaacagcttaatcctggaaaaccgtctattttgactgtcacttttgttgaattatcgtgttctgactttaccctagcatttgatactatgtcattgattacttcaattacatcgcacagaaggttgactgattcaaaaacaagtctcagagcaccgtgctttacaagatcatcagaatgcagaagccccctgtttatcactgctcgagtgcacatattgggcacaatgcacttcaacagtacttgcacttgctcatcatcaacagataccagatcatgtgaagtggacaaaagattttgaaagatgccatcacagtttactgaagatatcatgtccgctgctagggatatggcagaaaacctgagaaacagtaattagataggaaagagtatactgcacgccaataaaaattacagagatgctcagctcaaagaactaaccatgaggaggatgggcgtggttcaatgctgtaagggaattcattcatgtatgctgaacaaagagacaaactcttactcacaatagccagcaacaaattcttgtggtgaacgacctcagtagctttcaacttcttcatgagatccagcagacgtttctggttacctctcaggtttgagcttggcatcagtccattttttggatcagtacacaccatgattaacacctcatgagcaatgtcagctgcctcccccgcatccaaattcccagatatcaagctcagttgttccagtgtggcactaccaaaaaggacactccggagccctggtgggacaagtgactcatctaccaagacattattccgcaacgttgagaggatatagacaatggtatcagtatcatcgtctccgatcccacgaagaacccctgaatagagctccctttgttgaaggatccatcttagcatcctcgggttcccaacctccaagaatgacatggcaaacccaacaaacgatcgccttgtggatccgaaatcagttcccttcttccgattccccccatctctgccacctctcttcttccgcacccccgagagctgcggcaaaacagccatcttgaaatcaaagctcttagcaatctccgacgccaaccctccaccacgcctaacaattgcagccagcaaatcaagcgcagcattctgcctccggaactcaccactgttcagctccagatacacgtcgcccatcttctccttatcctccagtatcatcctagcaactccatccaggctcttcttaaccaaaccatgccgccgcaacttaccgccagggtgtcctaagacagtagcaaagagcgaaagtatgtaagccatccctggcttctccctatgcaatcgccatgcctcagccagctccacgagccgtggcgactgctgcacatactcccgcagcacctcaccctcagggtcaccatccaatagctcaatgaactccctcgacgcgtcggagtagattttgatctcggcggtgtggaggtttttaaggatatggattagcctgaccttacaggttgctccgaatgactggttccaggcctccatccccaccttaaccaaattttgctcccgtttgggttccgcttcctccatctcattgtcttcattgagatcaacatcgaactgctcgtcgtcgtcatctaggattcattaaaaaaaacagtgagcatgttagtgttccatcgagaaatccgcaccaaatcgaaccgaatttacaccaaatttcaccaaaaaccgggaagtattttggtagctagaggtgctcaccgagatataaatcctcttggacgatttcatgctcgtcttcacctccaacgtcggcggtggagtccatcggagtttgtctcccggcgagcgattgcgagcacaatgcggaatcgagctggtagggtttaagcgaatcgaagggtagggtttaagggagggtatagagctgcaacgggatgagaccccccgcggcggaggaggagaggacccggcgagccgccgctgtcgtcggaggaggcgaggacggccggtgaagtgggtgctcgtggaagaaggggagtcgcgtccggtcgccggagcagcgggcagcggcgcgagtcgcgcgcgttcgccgccgtggagaagaagtcggcggccgggatgggaggggggaaagcagatgaaagacagaccagggtttcacttccgtttacatgggcttgggctctatccacgtgggcttctatttacatgggctcaatctacgtgggcttctattttaatgggctgaaaggctgagatatgtgaacaccagaccaggtttggcccaccatcatgcgtttcgtggcttagaataagttcacttatactctcttaacaagtggtatgcctaaaaaactaccggatattttgaacactcaactattaaagccgctgcaatttgactcacttgacgatttagaggtgtgacacctacatagtgttgacctagggttcatccaacgtcagatatgaatcagattagaaagctagctaaaggatttatagaggagttatttcctcttggctttgcgtcacgcgtagcggcatgcgcggtagttggatgacttggatcgatgcacggagctttcatttttgtttcgcatactactagcttggaatatgggcgggttaaacgacgtaaagaattctcgaattaatacgtagtgcgagaatgcgaatagtccataaatacccgcaccggaagcgttcgatatgatatgacccgcccgcctgttcctttcctttcgatgccacccatggctagcagttcgacatcgtcgagatgcctgacggcgagcgtcaccgggacgcacaacttggaggtgacgagctactcgctgctcgaaggcatgggggtcggcaagttcgtgagctcgaccaccttctccgtcgccggctacgactggaacctccgcttctaccccgacggcatcacggacaacgacagaaaggaaggctacggggctgtttggatgcttgcttcagtttaccaaatttctatagctaaggtgtggcatgccacaatttatgtggctaagaaattcttggccacaagttaggcaaatgttggcaaatgtatgtgcctatgataagtggggtcacaaaatcaaaaagtgtggcatgacaaagatgtggcaatcaagcaaacactaggctaaattggtcaaagtagcttgccaaagttgtggcaaagtatgatcaccatccaaacaacccctatgtatccgcctctctgcatctcgttggcaccacgacgggtgccatgccaattagggtgagattccgcttatccctactgaacggatacgggtttgacgcataacttcgagcgagccggcagcgactgcaggatcgccaggttcgtcaagaaatctgacctgcaggaacatgcaattcgccggattcggttcactggcaacgacagcttcaagatcgagtgttcgctgaccgtcataagcgagtctcgcgctgaagacgtgagcacgatcccagtcccgccgtcgaacctgcaccagcacctcgccggcatgttgcacggcgtcgagatcgcggatgtggagttcagcgtcggcggcgagccgttccgcgcccacgcgtgcgtgctggcggcgcggtcgccggtgttcagggcggagctcctcggaccagctgctgcacggagcatcaagatcgacgacgacgacgacatggagcccgcgacattcaaggcgcttcttcacttcatctacacggatcacctgccgaacgactccggattcggcaaagacgcggcaatgcagcggcgtctgctggtggctgccgatcgctacggggtggacaggctgagggcgatgtgcggggtcaagctgtacaagagcgttagcgttgggacggtcgtggattccctggaattcgcagagaagcaccactgcgcgcagctcaaggatgcttgccttggattcatggcttcacctaacgttcttggtgtcgtcaggaaaaccgatggattcaagcgtctcgtggagggctgcccttgggtcttgaaggagattttagacaaggtgcctagattctgaaaaggtgtggatttttctttggagaggattgggagtcctgggatgagtacttggccttgctgacatgcttgatttcagtaagatcaacgacactgtgcactgaagtttatctatgttcggttacaatccatatcctgcttattgatccagctaataagcttattgacatgtaggcccgatgatatgagatccacatgtcagtgagcagttactgcatatcccatgtagtgccgcattattagtactatatggagcatattttttagataatgactacatggagtatagtttttagataatgactatatggagtatatgctagtattgtgatagtattattctgaactctgaacttgtccaatgcttcccatcaaaacttaacgagagtgatctaagcgcctaactaagtttctatatatttgtccgatgagtataaggactcattctaagagtatactcctttgttttatattataaatcatttaactttattcttagtcaaagtttttattgtttgatcaagtttatagaaaaaattagtactccctccgtttcataatataagtcatttgatttttttctagttaaactttgttaaatttgattaagtttatataaaattttatacacatctaaaatatcaaattagcttcattaaatctagcattgaatatattttgataatgtatttttttgttttatttttatgtgtactagaaaaaatgcccgtgcgttgcaatgggtgaagtttattttaatcttattattgttatatggtttagttaaaatgaaattcgttgtgggagttcgcttggatatatattttttttagaaaatcatgagctgcagttaggagttcgatcatctcaagttagcatgggagttttttttttaaatagatctcttatatgattccttatgtattaccaaaaatgaacgatcttaaaaccaactcaaatacggatatgtattttcaaaagcaaacgaacttaaaaatcgactcatatacggatgacatagagatatagattaaaaccaaaacataaaattaaagctgactcaaacatggatgacgaaccacggaaacatctttaatttttataactgactcaaacacggatgacggaccgcggaaatgtctttaacttttttaatagataatagactagagtaaaacttgttctaaaaaaactagagtactgaacagcttccattgatccttctcatgctcatttgacctgcattattcattagcatcatctagtaaatgtttgctacaccaagagctcctccaaacacttggcaacatcacttgaaccgttcctatgaagagcttgaagagaactcatgggaataccaaatgtgtctcgtagtttgaaatatcacatgttaaatgcctgatgacatcgagagttcccccaaacacttcacaataggcattgaaatagtgccacgtgaagtgttcgaagggaactcacggtgataccaaactaggctccacctctttgtagtttaaaatgtcacgtaataagtgcttggtgacatcgagagttcccccaaacaattcacatagtaggccttgaaatagtaccatgtgaagtgattgaagggaacccgcgataataccaaacgtggctctcatctcattcttgtggtttaagcactacattaaatgtttggtgatatcgagagttcccccaaacacttcacacaataggccttgaaacagtgccacgtgaagtggttgaagggaactctcgataataccaaaagtggctcccatctcaatctcgtggtttaaacactatatgttgaatgtttggtgatatcgagagttcccccaaacacttcacatagtaggcattgagatagtgccacgtgaagtgcttgaagggaactcacgacaataccaaacgtggctctcagtcttgtggtttaaacactatctactaattgtttgatgacaccgagagttcctccaaacacttcacaacaaccctataaataatggtgtcgtatgaagtgcttaaagagaactcttgataataccaaacgtttctctcatttcttgtagtttaaacactatctacttaaatgcttggcgacactaagagttcccccaaacacttcacgacaactctcaatacagtgtgtcgtaaagtgcttgaaaggaactcctagggactccaaacctaatcattctctgtcacttacaaattcataaagtacaagcacttacatacctaacttgaaaatgctgagtgtcaactggagttcccccaagcacttcactatacatagctagcttttggccccatgatcacagttatgtaacagtgcaatgcaatgaggcctagccatagctatctactgaagtggattgaggagaactccagtggacaaccaaccaaattttgactccctagacctgattacttcatttttgatgtggaccacttcacttgtttaatctgccttgctgatgagcacagagccggtggctatttataagtgtatgtatgactaaagagtaagctagctagctatctgtctcctgtggactgtggtgtgtgtgtgtgcatatggtcgtccttgcaatgcggttggcatatattggatgaacttggcaacggatgcacctagccgtgatgcagactaggttagaagatggagtgtagtgaggagaatccaatgtgatctttgggctgcactgatctccgaatcgtagaaagcatgcatatgtggagcaaaaaagtgcccagccctgcaaattccttatcaccagcagagcactgtgtcgtcgcccggtttctgtccacgcacatttctttcacctcaacaaagatggagagaaatcgtcctgaccattgacttgctgcaaatgcgtgcaaattgcaagccccgggaggaaacatgtgtatgtaagattggatcacgagtaatttgcttagtttgtactaggcttcgtagcacgtcattgcgttcgtcgttgcgttgcgttgttcctggtcttttctgatgtgatcggtttgcaatatgcccatttaccggtagtgcttactactgcagtagtgaagtgctcctactgaattctactaccatcccaaaatataacaatttagaattagatgaaacatatcctaatctaataaatctggagaacaaattattatattttgggaccgagggagtaccattctcttaaactacttaatgagttgagaatctagtgatgatgaaattaccctacgaacgtcagatcatcatgtatgagagcacatattaaagtatatattcagttgtcttttgcatgtcggcgaccagtgggtgtcacaggttccccagtgatagaggacagcaatcatacagataaacaatggaaaaacaagccacctaatctggcaccttttcttactgctactccccgtttcataataaaagacaactttctagcattgtttatataaatatttatatagatgttaatatagacatatatttgtgagcaagtattaaactacttgcatgtcggcgaccagtatatataaatatgagtaatgtaagaaagttttatattataaaacggatgaagtattaaactactccatcatatatactccctctgtcccataaaatacgaatctagaattgaatatgacatattttaatactatgaatctggacatatgtatatcatccggtactaggttgattttttatgagaccgagggactaagaatctagaattagattaaatattttttagtactacgaatctagacatggtatctcatccggttctaaattcttatattttgagacggagaaatataagatattttagacggatgtgacacttctcagtgttacggatctgaaaaagaagtactaataagtgtctcatctatccaaaatctcttatatttgaaaatgaagtgagtatgaaaaaaagttgggacacacacaaacagtgggatggcagcattttctcagccacctgataatcgatgagtcatattcccaaaccccaaaaccatatgctcaaaaaggggaaagaaaaaaaaggtgaagaaggcgtccaggttcaatgtatgcgatccttggcattgcaaggacaatctttcagacccaccagctgaccactttcaaagcatgtccaaatagcaggctaggttccagctttaggaggaggggagagatatttgcagtataagtagctttggagaaggaacattcctaaagccaagatgcatcaagaactgttcttcttcaagctgtagcctgtaggagcggttgcgtcagatggagttcccccattcttcacttctggttcttgtttgcttcttcaggtagagctggtttggttttggtgattttcgtgttcatgattcatggagagatggatttgtttctcagtatccttatgtatgttgtagctggatcatttcaaagcaaataaatcgacgatgagtaaagagattatctgtgtttctcgatctttctagttacttgtctatttgtgtgttcggatgtgatgacctcaagaaatgcaaatgagtcagtttcatgctgccgtttagagatcgaaaggtcacagatccaacaggcaagcaacccatcagtgtcaagatgtttaggccgtgtacctacacctctgtactactgggcatctcgattctgcaacgcaaaatctcacgaggtttctgatgaactttaatagccgatatcatgccgtggtaaccaggtttacaaactgtaccgttatcgtggttatcacgtgtaataaccttctcaatttttaaaatcacgatatgtcttacggtaaccgtacgatgacaataaccacatcagtttggtaaaccctagtagtaacgtacacgagtctttgcagccaggcagccagctcgagttatgaaccatgatgcgtaaatcgtgaaccatctagctgactgcataagttggaaatgagtgatatgtgggtcaggatggttcaccatttggaaataagttatcatccaaatgggcatatatagtacagtgccaagatgaaacatcgaacttatagcaaaggaaaaattgaaaccatgccattataattttgcaaaatttgagatatgccatcctgacccacgtatcactcatgtgggtcctatatgtcattgagataccgatgacatatctcaaactttacaaaattataatggcatggttcaaaaggtttcattcgacctctgattcaccccatcctagatatgccatcggttggtcacaggacatcaaaggcaggtgatgggaattgagttaattttcacccaaatatatagcaaaagaaaggtttcagctgacttcagattcacccctcctagctatgccatcgtccaaccggacgagaagtcatgtggctacatcactacatgcccatagcagaatctccaagggacaacgaggatatatatacatggtgagttcgagagtagatgtggagttctagcagacttctatatcaaatctaaggcagatcccaatgttgaatagctcctgatatagcagctttgcgccgtatgggcgtatggcacataacacattgatccttactatatcttttttctgaagagcggcagaacccacgtgattaatacaattatgatgtaattatagtgtactttcaaaaatctctaggtgacatgctaattatgtgaaaacgaaggtaatgatatcgaatcccttacatgtgcgtgagttatcagtttatgtgcatcgaggggaagcaacgataaagtgcaacccccgaatgagtgaagattctatcatgtaccatcacctataccctcaatatcaaaaatgtactagacaatctattactaccttcgtcccaaaatatagcaatctattacaagatgagatatatattagaccaacgatctggacaggccgagatctttggattaagatatgtcctatctattcccaaattactatattttagaacggtgggagtactatatatatatggctctcattttatttctttttctcgttgctttgtttggctgtatacctctgtacatatatctactccatttttttttcttttcgaaggatataagcaagataagcaagaagtgtcgcacgtccagtgatcgtcgccggcgaatcgccatgctattgggcctgtcgagacaactccagcacggcccaatcgctgcccaaattgggccatctattctgtcgctcgcacggataccgcttttgtttttctctggattctgaactcatatactttggcgccggtcacgtatacacaacaactatatataatcaaagagatgcacacagatacgtatgtgtttggaaacaccctgatttgttgcgaacttcagcttggagcatcttgatcgacaagacaaactctgtatttacatgttgttgttttttgttgttgttcaagcttcgttgttctccttcgatcttcgccatgggcaacagcttgttctccatggcgagcagcaccgcttctccttcagatggtcgatccccacggctgccggaaacactgtcgaggtgcgtgacggcgagcgtcgccgctgcgcacaatttcgaggtgacacggtactcgctgctcgccggggtgggcgccggcgagttcgtcacctcgggcaccttctccatcgacggccacaactggaacatccaggtctaccccgacaggtggaagcaggagatgaacgccggctacgtgtcggtcttcctgtgcctctgcggcggagcaaccggcgtcagggcgaagtacacgctgagcctttcggagaacggcggcgagtccgtacaacggagcttgacgcatcggttcgacacggtgggcgccttctggggattccccaggttcatggagaggcccaggctgcggcaatggctgcttcgccgcggccccggcggcggcgacgactgcgtcacgttcaggtgctccctgaccgtcatcagggagcctcgcaccgagggcgtggccgccgtcgccgtgccgccgtcggacatgcgccggcacatggcgaacatgctgaggggcggcgacggcgcggacgtggtggtgctggtgcgcgaccagccgttccgcgcccaccgctgcgtgctcgccgcgcggtcgccggtgttcagggcggagctcttcggcggcggccacatgagggagaggcggacgagctgcgtcgtcgtcgacgacatggagccctccatcttctcggcattcctccacttcatctacacggattccttgccagaaaacccggacacacctggcgatgatcaagattgcatggcgatgcagcatttgatggtggcagccgatcggtatggcctggacaggctcgtgctgatctgcgaggagaagctgtgccgcggcattgacgtgcagacggtggcgacgacgctggctttggcagagcagcatcagcgtgtagcgctcaaggatgcttgccttggtttcatagtctctcggggtgttcttggcgctgtcgctaggactgatgggtttaagcatctgctcacgacctgcccgtcgattatggtggacattttagacaaggttgccagcgtcatgagcaagtaataatagattcatagtctagtctttctgatcttatgagtaacttttattagtgactagcaaagtagtactgtagtagtaataaagttcgagactgagtttgcgacgcgacatgatttgcagtatcacagtagttctattttttgttggtttcatgcttgcctggaaacatatcgaaaaagaactgaagattagagtcacattgttgtttcggtactcaaattgcattcctctgaactctgaagcagtcactctgttcttctctggtctcccctgtgtgttgctgttctatttccaggtgtgattattgttctgtttggcgccattattatctaagtttttgtttctgttacacattttggtcgagtttaactcgagatgagcaaattctttaactttgttcccggttgtaacttgtgagcctgtggcggagcaggttcagattcgtcagaaaccaaaaaaaaaaaaagttcagattcgttagtggcacaggctctctcagccctgaccaaaaatgggctaatctagttggtcaggcctgtggcgggcatgttcagattctgcagttttgggccggaatcaccaatttctctctcagccctgaccaaaaatgggctaatctagttgggccgcctagtcagacgcatgaacggccacgtggcacgtgcttcgtccgtgcgcacccgtggatcacaggcctcgtggcgggggtttcggtcgtgcgcactgtggagtacaggtcggcagggagccagggtcaatcgaatcgagtcgaggagaggagagagagagagagagagagagagagagagagagagagagagactcagggagggtttcgtttccgtttcttgcgcctcctccaaccgcggcggccgtcagtggggagcctcgtcggcgtccgcctccgccattcgcgagaggaattcaggtgatccctctccctaccagagccgcgctcccctccgatcctccccgaatctggatgatctcccccgattccgctcggcttcgctgatcccccctccgccgccgccgccgccgccgcggcgggtgggctatcccgcttgtcggaatcgatcgatttctgaggccttggattgtgatgaagtcatggatatcgggccgcatagcatccagctgatcgcgccgccgtccctctatcacgccgcctccgctgccgccatgggtgatcaccgcgacccggctttccccgcggcggcgggcggctgccggctgcccaagacgtcgtcggtgagcgtcacggagtccgtcaccgcggtgcacgatttcaaggtgacgggttactcgctgatcgaggggctgggcatcggcaggtacgtcagctcatccaccttcaccgtcggcggcgtcgactgggccgtcaggttctaccccgacggctccaccgtcacctgcctcgggaacgcgtcggcgttcctctactactgcggcagggagaaggaggtcaggaccaggttcaccctgaatctgctcggcaaggacggcaaattgtcgcaggtgaccaattcctacatgaagcacaccttctccccggcgagtgacaattggggattcatcaaattcgccgagaaatcgaagctgcagagctcgccgttcctccacaacgactgcctgaccatcaggtgcttgctgaccgtcgtcagggaatcccacaccaaggatgttgaggtcaattctgttgttgtcccaccgtccaacctgcataccgattttgagaacatgctccaggatggtgaaggttcagatgtgacattcaccgtgggtggccaagagttccgtgctcataaatgtgttcttgccttccggtccccggtgttcaaggccgagcttttcggtccgatgaaagaaaatggcacgcaatgtatcaagatcgacgacatggagcctgaggtttttgaggctcttcttcacttcatttacacagataggctgccagatagctgcagagatggcaaggctgcagcaatgcagcacttgctagttgccgcggatcggtacggagtggacaggctgaggctgatttgtgagaggcggctcagcgaaaccattgatgtggaaacagtggcaaccactcttgttttagcagaacaacatcactgctcgcagctgagacaggcttgcattgggtttgtggcatctccaaacatgcttgggccagtcatagaaagcgatggatttaagcatctggtagaaagctgcccgttgattatgaaggagatcttgagtaaggtttcacatatttggattgacaagtcttgctgagaagtttattaagctatcacttttgtagtagtacatcttagtagttatgaaagtcatgatcagttatctacatctctatatgcgactttgatctttttaagttgtgtgatccttccaacgcctaatatgtatgaacagtagaaatcttatgtatatggatgactccttagcaccatggtgtaagtttgggcattcttccccttttcatcttttttgaaatgttggatttactctatactcacatgctttcctgaatgtataatgactagttttttgagtggaatatatacggactaataatcattaattcaactctgtcttggtgatataaatcatcatttcaactctgaacatctcacattctttggtccaacccatacctcagagcatgcccaacaatcacccaatatttgattcccaaaaaatctgaattaggaataccaaaataaaaattgggcccaacaatgaacccctcctccaagagatgcccaaaaatcaattccctatcatttgttagtttgccacgtaagcaaggtggggcccagttcggtacttgtgcacgtcttctccctcccgcaccagcgccgatcgacttcttcctccccggacctgcgccgccgtgacctagcgccgtcatcaccagccagtcaaccagtgtcctgactgctgcgatttgttaaaaaacggaacaccaaggagatgccgtagcaattcgtgtcatcaaggaggtaatcgttagcaaatcccattgatctcttgtgtcgtagtcaatctctatgtctatattttgatatgtggatatatattattggaaaatattaagtttgatctgataattaattttgcagattgattattgttctattcctgccatcagttccctccattgcacttcatccctgtggtaaacgctccaaccccgtggcaaacaaaaagaggagatgagtcgtcgaagcaccctccttcaaatgctattggatgagttttcatcggatggtgacgaagaatttatttcttcggcggttgatatagtgcacgaagagttcgacgatgatgaagttccaaagcatggtgaatctgttataggtcatgcagtaattaatcagtgacagtgaaccttgttagtatgtatgtcagtggcacatacatactgaaattgaatctttcagacactattttcaatctttggcataagcatgtggttgttcatctgctaatctaaaaagtgaggcatactaaatgcagatgatcacttcaattaagcagttgttgtacttagagctaagaactgtacaagttattataatcctactgaacctatgctgttgtacttagaattctgcagctgcagctttcatgaaactaaaagtctaattggcaaaagcaggtggttcttttatcttgaaaaatagactatggattgcatcttgttgcattatctgtcaaattatctaacaacattatcttaatgcaaaaattcagagcatatttcaaagatgctgtgatgagagaaaaatatttcagactttcagagcatatttcagactttgggagtacatttgacatagcaaaaatatttgacacagcatatttcagactttcagagcataccacacatttagagcatatccttcattactaaatgttctgaaacctgatttcctctaagtgttcagactttcaaatttagagcatatcctacatatttcagactttcattcaatacagtacaaatttcagactttctgatattttcctctaagtgttctgaatcctgaattcctgaatttctagcaggggaagtcagtcacagaatagacatcagatcaggctacaacactctgaaaattaatctaaacatcgaacgaatcagggacagccttaccgaaattgctcctatggaggaattcttcatcactcacagaataagctgtggagaaatcgacgccaggagcttcgtgtgagaggggattcagtgtctcccatggagcatgtccctccatggactctgtcgcctgcacaccggagtagggaggttgaggatgaggcagaccgagacgacggcgaggcggcggtgtggggcgcagagggccgtcagccccaaatcgaggaggcagtggtcgacgtgcgggcgccccctggaacagcgccgccgccgacgcctgcgaggaagaggacggcggctgcatcgccgcttggagcaacgccggcgcctgcgcctgagaggaagggcatggccgctgcatcgctgcctggagcaacaccgacgccgacccctgtgaccaagaggaaggggacgaccgctgcatctccgcgtggaactcagtcaacgacgcctgcgaggaaggggttggccgttgcttcgccgcctggaaagccgctgccgacgcctgggaggaagaggaattttgttgctggcgactggcgaggagggcgagaaaaggagcgcgggaacaattttccccctacgcgcgcgaggcagcgacgaccgcgattgggaagaaaaaatggttccctgcaaatgagtaacgacatatacggatatgggaacatggattattgggatgttggttagggaatttgttggatgagaattttggttaaaatttctttaatttaaggatagggaatagaataagtaatctgttgggcatgctctcagccctgaaacttaacctgaacagatatttgcagtcagggccgttctagactgctcctagttggcttagctacttccttgtacttcgtgagcacacgctatcaaaatgttctttttttcaaatgttttctatatataactttcttaaataaataaataaataaatctatttttaaaatttgtaatagctactccctccgtccctaaatatttgacgcagatgacttttttaaacatgtttgaccgtccatcttattcaaaaaaatttaagtaattattaattcttttcctatcatttgattcatcattaaatataatgatgagatgtgagggaggaaggaactccctcttttttaatacctgggtagggtggctttactttgcctacgtaaatcccaaccatctgtcttcatttaagatctaatctccaattaaatttcctatcaattcccaccacctctaccaatcaacgtaaatctcaaccatctctttttatttaagatataatctcccattaaacttcctatcaattcccaccacctctaccaatcaagagattgagagtaaaaaatcaaattcttatgttaatctcataatcaattctctcatctaaacctccaatcctttctcttaaattgccaaacagaattctctcatctaaccctccaatcttttctcttaaattgccaaacagaccgtcaactcctccgaacggagactaaatattgttttttttcttccgaacaagatgtacaccttttatgtccccttttttctcgatggtgcatccagatggcaataaatagcgtcccatgctgttcaaaacttcagaggatgcaacctgaaccacaccccattttttctctgaacattcagactgcctctgttcgtacccctgtactactgagcaggctaggctgtatgaaaggcatcgacatggactcatggtcaccaccatagcgttcgcggagcagcagtgtagcaccggagctcgtgtctctgggcagcctgcgacacaagagtggcgccatgatcagttggattaagctcagattgtcaccttgtcacacgtatcgtctcgttcgcatgatcaggacttcttttgactcccgagttgtgatttggaggttgaaacggatcaggactatagtatccaataccataaattatctcttcttggatcaactcgtcgagagagattaaacggcaacgcgtggtatccaataccataaaagcatcttgcagtctatcgacgaggctctctcttcggcagggtaccggtggctgcatcgtctggtatgcggtatttcaaactctcgttgctcttaattgaatttgttataaatattagtcgatatagcggaacgataactaatcttcccgatcgcttcagtcattgaccacacaagacatgctaggtgacgacataggaacacacaatatttgttaacaaactttagctaaagtctacatctctagggttctgattatgggcaatcctccacaaccaatatagcacctagccgctacgagttcatggcctcgccgccatcctctccctgtgtgtctacactacattgcagtcctcataattacattatggtacccctctctatttaagagagttgccggttacagagccagagtccgactttaactctacccctaccatctattataactctaagtccaactataaccatatacacctattctaacataatcgatttgatttaaacatgcgcttgtttcatccaataaaagaagtgtctttgttgctagattagatttgacaaacaaaatagcacaattgcatcctctttttgtcaattcttgcagtggcagacatgttgacttcatcggctgcccgtacgtcctcacggagcgtgtgggagggcatcaccgggacgcacgacttcgaggtggtcggctactcgttgatggacggcttcggcgccggaaggcacgtctgctccggcgacttcagcgtcgccggccatgactggtatgtcgcgttctaccccgatggcctcgaccaggattccgccggctacgcgtcggcctgcctcgcctaccgcggcaaggagaggctcgtgagagccaagtacagcctgagcttggtggccagggacggcagggcgtcgccgctcgccggcgacacgctgcggtcgcactacttcacgccgacgagccgcagcgccgacgtcctcaagttcgtcgagaaatccaacctgtcgtcgtcgccgtcgtcgtcgtcgtactcgtgcctcgacgacgacaccctgaccatacggtgcgtggtcaccgtggtcaccggcccgcgcgtggtgagcgtcgcgccggccaaggagaggggcccccgcgtcacggtgccgccgccgagcctccacgagcacctggcgcggatgctgcgcgacgggcggggctcggacgtggcgttccgcgtgggcggcagggtgctccgcgcgcaccggtgcgtgctcgccgcgcggtcgccggtgttcgacgcggagctcctgggcccgatgatggagaccaccgctccgtgcatcgagatccacggcgtcgagcccgccgccttcgaggcgctcctccgcttcgtctacacggacagctggccgctcgccggcgtcgacgtcgcggcgacggtgcgcctgctctccgcggcggacaggtacgggctggagaggctgcggctgatgtgcgaggagaagctgcacgagggcatcgacgtggacaacgccgccgacgtcctcgccatggcggagctccaccattgctcgcagctcagagacgcctgcgtcgcgttcattgcctcgccgagcacgctgggtcccgtcctggcgtcgagcggcttcgaggatctcatcatggcgaccggcgcttcggtgaccaaggagattttgcacaaggtgtccgaatcgtggagcggtcctggtaacagaaataattcaagcaaaagaaagtgagaaaaatggcaattatattgaatacgactgaactactctattcgttagtatttttagtttccccagcaaagattatcgagggtacacttttcaaactacttcttcttaaaaaaaaccaatctaagtgattcattatcctagttagtgtcaaagccttttcaaggacggaggaagtacacggtagtttcgtgcataagttttctataacaagtttattttttcaaaaaaaaatcaattataagcttataacaattaatacttaataacttatctcattttgcgtgttgcaataagctaaacccaaacatctattcgaaagtaacctaaactacttagattcctcttgtaaacacttgattacttgaaaatgcatagattcctaagtacagggatcaatgtccttaaattgcttatactgcatataaattttaaaaatataattacttatatttgaaaacaaataaaatatacgacacacttatacttacactcaattttctggtgaaaacaaaacaaaaaaagccaatcaagcagaaaacaataaaaaaaagccaatcaagcagcaaaggagcatttttccccaagctgacaaaaaaaaaaggaattttcgggcaacgagcaaatcacgggctcttcccacggcccacgggaagtggtctctctcggtctcggccatatctgaaccctgcatccccccacgtctcctccccctctctcagtctctctctctctctctctcccgttcgtgcgtgctagctagggcatctcgtcgcattgatgcagcagccgccgtcgcagccgcagcccggcatgggcggcccgcctccgccgccacagggcgcggcggggcagccgccgcagtggggcgcgatcccgccgccgatgccgccgcaccagtacggcgcgccgccgccccagcagccgccggcgatgtggggccagcccccgccgcaggcgcactacgggcaggtgcccccgccccagccgtactacgccgcgccaccgccgcaggcgatgcccgcccccgcggccgcggacgaggtgaagacgctctggatcggcgacctgcagccctggatggacgagagctacatctacaactgcttcgcggccaccggggaggtacgggtcctgatctgctgtgagatttggttgcccgtaattttttgtttgtgtggcttgttgctgatggagttgtactgtggtgtattgcgactaatttagttcctgatgctgtatgttgtgacttgcgactgacttagttctgacttctcaaaagctctaggctatgagttgtgggtctacaataaaaacaaaatttcatgcttcggctgatttatcagtgattgttgaatgtatctttttggtttattgagattttatgaacatgctactttctttagtgaatcgatttcggaaggttttgtttggttttttacttactgttttcacatggatgctaagtttgcagactatataacatttgcgtacattctaaatgctatttatgtgattcggttttgctatcaatatacataagccattgctcagatgataatggatgaaatgcaacatctaatatacccagattgtgtccgcccattcatgatttacctaccgtatctaacgttttgcatttacttgcaggttcaatctgtgaagcttatccgggacaaacaaagtggacagcttcagggttatggctttgttgagtttacaagtcgtgcagctgctgatcgaattcttcagacttataatggacagatgatgccgaatgttgagatggtcttccgattgaattgggccagtgctggcgagaagcgtgatgatacccctgactacaccatttttgtcggggatttggctgcagatgttacagactacctactacaagagacattcagggtccattacccttcggttaagggtgcaaaagttgtaactgacaaaatgacaatgcgttcaaagggttatgggtttgtgaaatttggtgatcctacagagcaagctcgtgcaatgactgaaatgaatggaatgctttgctcttccagaccgatgcgtattggtccagcggcaaataagaaaacaacaggggttcaggagagaggtaaatgctgctgatcgtatttcccattgacaccttttacttattagctattattatgggcagttatctttatttctatctatatgtatggctggctactctgcttgatgataccttttccttttgatgttccgcttttaccttttccggttttacttacttttacggaataaaccaaagcttgtgtgaccctttttcttcaagaagtcattattccttagtacaacattccctgtgaatttggatcatttcatgcactagaactagaaaaatagtagacttatgaaactcgtgttatctggaagcaggaggtcaacaggctctctccgtattggagttttggaactgatttgagctgtgatgcatttcttgtgtaatgcatggcctcatttaggtcagtgtaaaacatttatgttctaaatttgaagtctgtttctttcgatttctgccctccgaatacttcagtcatttattcttcttgctatttcagattctacttcatttgtgcacgcatacgtttactatacattttctttgtttaaaaagttttatgactcatgcttgatgtgatatgcacatagttaaattagcatgttggctcgagcttgcttttatttgctaggcttgactattgagggtcatatccgtgcttcatgtattgaggcttgatatttttaacattttctatttccttctttttgaaaaatagatttttgaatgacaaaatgttagtaccttctgtgaataaattcttgtctttttcatgccttctagtttttgtttttgtgatattttacacttcgagttgccacactgtttatctgttcttttaaacatctggagaatattctgcttcttttctcaacatacattatgataggcttgcaatgtatctctcattttatctgcctctaacttgacatggaatcgattgttggggctgtatttcattctgtattgtgttgtgtattcagcttgtttgagattctatgtatacaatacttaaaaaacagtgttctgcttgcccttttccttgattgggtagtcttattagcatttttggccacttaactccattataagtctgttaagtgaaatcttgtctacatgtgtactattagcttggtggtttcgcctccataatcttatcaaactttagcatggttctgatgaacatgttcctgaattgctgagctatcctagttactctattctaaattgtcttcagtgatgcttgatattctgcttaatgcatatggcttgacatggctggatctatatgaatatcactgcttatgcttgtaataatctatttactactataagaacatcagtgaacgagacatttgcatgataagcattcatgtttaccagcatttgacaaatcttacattgtattttcttcacttttttgctttcatttacagtaccaaatgctcaaggagctcagtctgagaatgatcctaacaataccaccgtgcgttcttagttctatttttcctgtacaacagtaatttcttttcagttcatttagtgactatgtttgttgttgagctcagatattcgttggtggtcttgaccccaacgtcactgaagatgtcttgaaacaagttttcgctccttatggagaagttgtccatgttaagattcctgttgggaaaagatgtggttttgttcaatatgttaacaggttgactctttgttcgtttgttctatttccacagatgtcttactgccttgtattttttttttttgatgaggtacttgcaaattactcttgtcattgcatattcaggccttctgctgagcaagcactggcagtgctacaagggaccttgattggtgggcagaatgttagactttcgtggggtcgaagcctttcaaacaaacaggtccagatcaaactcaacatagtaattttcttatctataaagctgtataatggagctaaagttgataacattgtggtttttgaatgtcttcagcctcagcacgactcgaatcagtggggtgctggtgctggtgctggtggttactatggtggctatggacaaggttatgaggcttatggtgggtatgcacaacctcaggatcctaacatgtatggttatggagcctatgctggttatcccaattaccaacagcaacaagtagcacagcagcagccgccgcagcaggtgagactcccccttcttgtttccgatgtcatctaacattggaaatttacacactttacaaatattgtaactttcttgaaagttatcatgaattctgccatgtcaatcagcgtttgcatagctatatcctctagcgattaatttgaagcattattttttctttcttccagtgagccctgtttgatcgatcgcgtctttgggctgtgaggcacacaacccatttcaagctacagctttagctatgttattgctattctcaatagagagacggtttctgaagactccagatttcgattgaggttttaatgtatgaactgtattatgattatgaacaacggatgctgccatatcgtggttcctatattgagtcatgtattttgaaaacatatcctctgtttccatctcacccttatcatcgattattattattgctatgtaccgtttgtttcccgttggtttttgcgtgttggattctcctttttcgtgaaggacaagtgagttttctggttgcctgattggccacgtgggcggacattgcatcagggcatcagtgtatgctctgcacaatggaatctcgccaacttttgcttcgacactttaccccggttaaaatctttgctcgtgttttttttcaccgtgaaaatggctgttaaaatttctctacttgttttcaccgtgaatggctgttaaaatgtgtatatctatctgatcgtgtgccatggaagacgaaatgataatcgttttcactcgggctatttacgaggttagaaagtagaaactagaaagacttcaggaaagatctgttaaatgccatggtaaatttgacacagacaacgtaaaagctcccattaatctagtgctacactgacaccgacagcgtaaaagcacccgtaaatctagttgtattattcgcttattaacccagttaaagttaattaatctggttccaccatcttatcctagctaatgtgctttaagattagcgcgcgatcgaatcggccgcccttgaaatcgagagagctccgaacttaaccttcccgtttgcacggccgcatcggtggccttttccccttccgctttcgtctcgtctcgcctcgtcgcctcgcctcgcctcccctcccaccaccctctctctcttttccctcccttcctccctcccatggcccgccccaagaggacgaagccgccgccgccgtcgcgcaaggcggaggcggcggcggcggcggcgcagcggccgtcgtcttcgtcgtcgtcgccgtcgccgtccctccccgaggcgctgctgctcgcgacggtgtgcatggtcggcctccccgtggaggtgcaggtccgcgacggatccgcgtacgcgggcgtcctccacaccgcctccgtcgaaggcggatacggtgggtgctcctccctctctcctcctcctcctcctcctccccgtcgttgtttctgtggttgggtggctcgcttagggttcggagatcgcggggatgtggttgtgagcgtgatccagctgtgtgcgcgtgtgtgcgtagtgggtggcgatttttaatagggttggtgctccggctttttttttttttcgtttcgaagttaactggttcgtgatccgcttgttggttgggttgggtggcggtggacgctggacgcttgcgttgtttgttttttggatagtgccatggtgggatggatttgggggtggttgctggttagagatcgctggatgagtttcccccatttgtggcgtggctgtagatgtacttttgtgtttgcggttaagatcttggctgtttggtctttgatcgtcgtgattgcggtggggatttggatgagagtcccgtaaatcgttcctgggttcgtggtctagagaggatctcgcactgggttccaggatcataggcaatgatcctggtctctataatgtaatcgggtatcatggttatgctataaaccaactgcctggttgattgcaaatatatgttgtttttcttctctagaattgagatgccaatttgccatgaagaaatttatgattcatttagtgcattctagcattctggcagcagtcacatttttgggtttgattcgtactccttttggatttgtaatatcctagggatgcattttttttcttgccagatcatgtttataatgttgttctttctggtttcaacaatcaatttagttttctttttctgtgtggagaaaaaatgatactgatgtatttatgttgaacaggtgttgtgctaaagaaagcgcgaaagatcgctaacgggaatgataatgccaatattcctctgggagcttttgtagatagtcttgttattcacccagatgatctcgttcaagtcattgcaaaggtagctttgatgtgcttaaacatgctaacaaattttcccgccaaaagaaaaggtatactaacagattgccttctcgtggacgcttctacttttcaggatttttcactccatacaaaagatgtgtgcagaactcctgtttgtgataccgtcgcagccagtgcatatgtgaagcctcaaacttcacatgtgaatgtgtttccactaaagtatattcttgattcaccaataataggataaaactctttcaattgtttctttaatgatgctggttaataatgtagatttctagcaatctattctgtatatatatttcaatgtctattcattcttgaggttaattcatgctatttctttaacagagaggttaagaagtgcagcacgccaggtgaggagactaacatctccattgggagaagttctcctggtattatgtctaacctctttactattttactccgataattctttttccacttttcttccttgtacttaaacccgtccaactgttatgctagcctctccaactggatatgtagggccacgcctctcctgtaacgagataatgagttctgcggttgttggatcaaaagatggaaatactaagagtgcagttttgactacacccacaatgtcttcagatgtgaaaatctctcctccagccacagttgctaaaactgccacgccgagcaaaaccattgctaaggtgagctctctcggacccttgatacgtaagcatagggaaaactgtgtctagagaattagagatctagaaaaatgttttgctaatatattttaccttttaaggagcccagtactatttggaaagcattatcagttatttcgtccatgtacataacaatctgtgcaaggcttgccaactatgttatcaatgttatcagtgtgttattttcttattttgtattatcaagcacagttctctttccttcctatgtcatggatttctatgcatcctgagggaatgaagccgtgccaattctgtttttatgtttactgctgtcctagatgttctacctttgtaaccttcctgtgcttcatcattgtcatcagtccattcactattgcaggaatccaaactcaacccttgtgctagggtcttctctccttcgtttgcaagttccagaccagtacttgcagctgcaccctctgttaacccaatctacatctcaaactctgtagctggagttccaaccgggttacctgtatttgaaactaactcagtgccaggcggttcatccctgtccagcaaggctgttcattataataacctggctgctgcaaactatgctatttcacctcaatatactcagtcagtaagttctttgattaattcttttataatatcattgttgcttcaatagttcatcactttcttcagattgctgtcatatagtcatgaagtgataaacaaggaaaatattgcaatatggtgccaactcctattcagcaccgacattcctttaagctgataatttgctttatgtgaccactactactatctctacatattttaactattatctttactctggtgtaattttccatttatcttgagattaactattgaactactaatagctatcgtcaggggcggaatcaggcatggggcagctagggcttgagccccatgcctagctccataatccccattataatcttgaaaaatgctatgtaatttatgaaaatatttgagatcccattagctcagccttaggcgtggaaattttctggctccgccactggctatcgtttatcgttatgttatattctgtgcattgaattttcagattctacttcactttgatcttattgctgcataactctggcatgtacgttttgttcggatatgatcctgcctcctgaatccttatacatggttttttgaatgacagaccatggggcataatgtgagcaggctggatcctgctagaattggcacaccttatcatcccatgcaagttggacctgcttacattagccctagtcctcagcctgtaagttctaatcagttgtatatatataaatatatatatatatatatatatatatatatatatactgatattaatttcaaaatgctgttcatttgtacctattggttacatgatatactatcatttgctcctgtactgatctaatttatttttatgttatgacatcataggttactggtgggaaatttaatcatgttgtttatgtacacccattttctcaggtgagtaatgcaacagtgttatttctattaatagctcaagtggaactctgcgagagtaagatgatgaattaatgatgcaagtacaatttgtgttgtttcatacaatacttttaactgattaaatagtgctgattcattggagatatcatggttgtcttttgtatcgctcaaccagtagatagtgcaagtgaggcactgttatccaaattgaacttggatattcgtctgttttaaaaaataaaaactactcagctacatttcacacattagataatgtgaagcttcatttcgtggcatgcatctttgttggcaaccctatacattgcgtagtcatttaggcatatgaagctctcctgttaaccgtaatgattaatatttgacattatcatccctctaaaaaactcatcctagttatatttactgcaaatacaaattgccctaactgcttttagctgatctactatttgctttccgctgaaggatgtaatgcatggagcacctgttatgccccaaggatggtctcttcctgcaccattgaactcacatcaagctagcctccagaagttccaaggtaaaaatcgtactcattgtcgactgcttcctttattttaatggaaggtattaaaatgtttattttatttattcattacactaatcaaaacattttacttcgaaactctccaggcacagcccctgtatatgtagccccacctatcatggcaactgggaacctgccattggtggtaccaagccctgcaccgcttgtgcagccattccaggccgttcgtcccatcatggtacctgctgcaagcagcatggttccaggcaaatacatgtaaacttgtcatagcagtgtgatatcagtttttgttggaagaatcttggttttacccctttggccgttggggtttacatctaagaggactcgcagttttgcctaatctgttaattctcttgctagttgctggtctgtgtccgtctttttgttggaaggacttgcaacttttaccattcttaatgctttggcatcatcacgattttccttttttcttttttttttctttttggatcattggggtgggggtggtgggggtgttccatgagagcagttaaatgaaatagagaatattgaagcattttttttgtcatgtcaaataccttttccctttttgaagagtagcatgtactatgtacaatgagacactgtaaaagagttagatagtaaattgattgttttcacagggctaatgtacattgatcttgtgaactgttctcatataatgacggacaatcccgctatgaattagttttacctttttggagcatgtgctgacgattgatccagtgtttatttgcgccaagtagcgtttgttgtagcagctgctatatatagaggttacagatttctactgtccgctactgctataagatagtggatccaacatagtgtattggaaatggaacttggcgaccgatattacaataggctttgttggcctgctattacgcttaaacacgaatacacgatgttctctgtgtatgaataggatataagttaacgtcgtgtgctttctttctctcatttatttatgttgctttgtagtttttataccttgaaatgtatgagtaattaagtctatacttctaaattgcaagtgaaactagatgttagtgttactacataatctaaatttactgtttattttttgaatcccgttattggacagtagcacccgcgatcttcaatcggctacaaaaatttcaagcccgaaaccttcacaccaggtctttcacaagctacttgagaaatcactggatttgcctctcagactggccaggcacgccaatgtccatgagtaataagaagctagttcttgtagaaagagtgcctaaagtagctcttctagtttgcatattttatattgcatactccctccggttccatattaattgacgttttgaacaagattgaggtcaaacttttatgatttagactatcaataactttaaaaatatttagtttaaagaaactagaacaatatatatagatttgtcttttaaagtactataataaaagtaaacatgcatttatttattatatatattatgatataaaaataagatcaaagatatatcttgtagaccgtgtcattgtccaaaacgtcaattaaaatgaaaccggagggagtatgttattttcatactgtcgactggaatgccctacgataatcggattgtccggttctatagttgttttctaccgttgttgcattgaccagactgtcctatagctgtaagataatccaactccagtataggctgtgtttagtttctgaaattggggagaagtttagggaaagttggtagtttggaaaaaaagtttagagtttatgtgagtaggaaagttttggatgtgatgtggtgtgatggaaagttgggagtttggaggaagtttggtgtgaactaaacaagaccatagttggactgtccggttagttctaattctgctaaaagtttcttgaaatttcaggaaacatctattctaccctctaggcgacaacaacaatactcaaggcccttttcgtgaatagtctgtcctttttttttcttttttttgcaatggtaactgatactatagccgttgagctataaaagggcaagataatacgattggcaacaccacactccatatccccgcgaatgcgtccacataacacatgctctaaacaatagaaaccagcggcacctcctgatctcactaaattcctattgaaacctacgtgtgcgtaatatttgtggacaccaagatttaaatattggtggatggagtcatcacccatatataacttcaccatcataccgccgctggtgcttccctaatcagcttaccatctgattgtccggctaggccaactcccaaggcaaactttgaatcacaaaaacgaataaccctggttggctccacatgtatccactgagcactttagcgatttagatgttacaccatctaacgtgcatcacaccgagatgattagtaccttaatacctcaaactacaagtttcatcccgctagctatatatagtacggtctttgaatgtaaaaacaacctatttgtaagcacgttcaccccaagtccctaactccttgaacgtgtttttaccttgaagagggttgtagccaacttccgatctcttgatgaccgtaagctatctccaaatggacaaaacggtgtagcattgtttgtatcatcaaaatcctttttttttcaaacttagcaaaagtaaatagttccgatgatcatattgtcatcaaccaccaaaacaaccagaggggctagatgctttcacgtggcataccgcatttgctgaagattttgtggcaaagtgtgaataccatccaagtattctcagactgcaccatgatagacttcaattgactttttttttaaaaaaaaaaaactacttcatctgtcccaaaataagtccagccctgagtagaattcaattgatttaatattaacttctgccagattccgcaaggacaacaataccggatgcacatgtcagtaatgaaaaagcaaagtcgaaagatacatcttccggtttctgagatactgtaatagattttgacaataacagcttgccttctgttacttaattatcacaagggccatggtacaaatgctttcgattcagatatgccattttcctatatggggcctagtccttccaagttttttctcatttctttttgttccaagtatgaagtaacttttttgtatggctttacatcattattaaaaggttcaagtatccttaaatggaagacgaatgaaaatgaaagatagctcaagtatccttataaggaagacaaataaaagcgaaagacaagtatatatcctagagtacgagtctacgcctttggcatccagccatttatagtaagacttggcagaaacaatctggatttgaagctttcacctaacattaagaatcattttgtctttctcaagcgctgctttcatttgttgtcaaccttcatttcatgactgtcatctggaattttgattttcaatgtaacagcaagtttgttagttcttgcagtaaataatagataataataaaatgttcccaagaggtgtagaaggttaccttggggattatgtactgcggttgaagcctctaccggaggtgcagttcctgaaataaaagaggggtttatgtttagaacacaatccaaggaaaatggttattgttagcatcactgcttatgtaaggcacacaacaaagaactagcagaaaatcaatggttacacacgactaaggagaaggatttatgttagcaacacaatctagcttatgtatggggaacacaacatagtactagcagcaaatcaatggttacacacgaggaaaaggatttatgttagcaacacaatctagcttatgtatggcacacaacaaagtactaacagcaaatcaatggttacacacaaggaaaaaaaagcttgtgcaggcaaaggattatctttgagccaataaacaaacatatttgctcagaacatatgcccatagaatcaaagcttttaacgttactctaggtgccaataaaaacattaaaagtagagggtatcacatttttacctcctgaggcttctgactttgagtcatcagctcctttggaaatgtctctctctgtgtccagctgcacagcttgttctgtgctttctaaatattcatatcaacagcattaactagagggttaatactaagcatgtcaaataatggaattatgtattacccggtggttccataaaagtttgttgcttgctatttgtagcattaggctgctctttgggacctaaagatacaaatccatttagtgattgttcttgatagaaaataagtcatcgagggcagaaggggcatatatagtgttgtacagatgctatcttgacaacgagcgtgctgaatttgtcatgccccaaaataaaataactgaatctacttgtgtgtgacacacatgaatcgagcatacaacatctaaatcttacccaaagattcctttatagcatccattactggaacattaagcagatgcctttcccctataatgacacaaaaaatgtgatctattatttaagctttatttctatccagaggtaatatattattcaaagtagatcaaattgcattcctccaacgaacatacctgatgactcttcagtgtgctttgaagattcagagactgtttgaatctcattgacagttttccctccagcgacttccttgcatgatgccaatacaggttgacctgatttaataggtaccacagcagataacggttgtggattcacatgttcagtaccctgctcggagaaaatccttgattcagcattactgggtgaaactgagataggtactgctgcaacaaccccagaacccatgtgaggtcttggaacggaagggaccgtgtgcttagtgaaggatttctctacaggcctcctcatctgtagaggctttgcaaatgtaacatcctccaaggggactggaataggaccagaagcttgtctgtaaacagtagatggcctctttcgaacttgacttggtcgaagcatagggagatctggggcaagatcatcttttggtgttattgggcggaggttattttcatctggaatccaacctttgagaacctgattgtccttcactttcaccgtaatcagagaaaacccaggaaatttcttcgacatcttaccaacaaaatacttgccaacaatatcatctttgactgaattaccttgcaaaggagcactagtataaatggaggcttggctgagagaagtcttaaccagattgacagaatctctaggtccactggatctattagctgggccttgctttgtaggcaaagcctgaattgtgcctatattagggccaaagctaccacctgatgtatggttgatctgtatcccatcctgtcggatgtttgagctatcttgtgtgctgtgaagaggtgggacgctctgaatgtgctgcacactatatggtaattcatgcatgccgtactcatacttccgtggacgaccacgcttacgcttagcaccagagcttaatgtctgctccatgggtagtggttcattatgtgcaacagctttattctcttcagatgtcatctttggcaatttgctttaactttttgcagctgaacctaggaacgatgataatgccccgtaaaagtgtattcaccaccttcaattacttgatgagtttttctccccttgaacatgcaaagtgagcgcaatgagcaacctcaatagcgaaaggatggcaaaatatggcaagtaatcacaagaagattagaagatgatagagcaagtcgacaatcaggaagatagaagcctactttccatatccgctaagaatgaaattaattaagtctgctaagaacgtaactaaaaaggaagctctcatggaattattttcaaaagagacatagcacagtttgcaataaataaagtacccacagggtcatatctaggggagaaaatggtcggaaaacagcttcaaccatttctgtaaccgtacttttctcgaaaatataattgaaagcagtagagccggaaatggaaatggaaatgatattgaaaaatcaaaaagggaataatccgggcggaaatgtgttggaatcattaggaaaccaacaattcatgtcggaaacatcaaatagtaacaacatatgttttcacacacttgaccaacacacatatacacgtaatataactcaatttatttaatatgatggcatgtttacatatagccattgacaattgtactaaaaacatttatgaactaataaaatagttgtatacgaggtgcataatgaagtttaaatatttaatatggtggttggtgcatgtcttttctaacttataggtcagctgtttgaatcccctagctggaaccatttttgtgaaagaagtgggcagggtagcttggtcaagtcctgattgacgtagtggctctctacacggtgatgtggcctgaagtggtcctctacttggcgtggatcatgggcctctacgcgttgctatagtcagcctctagttggagctgtatatgctaattaccgatttccccaaaatgataatttctggaacaatatgataaaccaagaaaatggtcgattgaacagcaaaaccatttctgccaccgtttcgaatggctcttaccgtttccgtaaccgtttcaaggggcagacacaacaggggggcccgagcatcccctgctgcggtccaaccattcttccattcgtacaagtggcagggttgtagcgtgtgagtgcaagccgactctggtgtgcatgccgcttagttgagttcagctgctcaggtgttggtgcctctgctgtgggctgtggctgtgataaatgaaggcaatttgtgttcagtttccaaatttacatttataaaattatgaagtagcacttcaaaatcaccattaattatgatgatattagtacacaaatagatatttaagcacatttatcagttctcaggacttcgctgtgcattgccgaattactatcttcaattttcttttgcacgattggtttgtttacatgcggttcatgtataaatttggatccaaaaaaatgattcctttcacttcagtcgttactaatgtgttttttatttcactggcaacccctacattttaatcctgtgtgcgtcggttaccattcctagtgaccaaatccattggaaacagtaattgccaaaaacgagcattggaggaggaatttccacgaagccctagtcatatctaatgtttatataataaataacagtaaatatccatgaagcaatgaaaatgaaatttgtcagatgcatacgaggcaaaaggaacataaataccttcctggctataaatgttctatagcaactattactagcatcaacatgtaataaattaaactgggttatattcttggattacaaatgcagaaaccaacttattacggcgttgagctcttgtagatctgtaacacatgccctgagcacaaacactcaagctttgtaaaatatgtgtcaaacagatgaactagagggaccaactaatatcaccaaacttgttcgttggaacttgtaataatccctaaatgttgcaccaaaattgcaagcctgggctcaagcaacaaaaagaatcgtataaagatgagttggaggtgaagttcattaccactagcaatcttatccaattcctacccaacctaccacactaaaacctaaaaaaaatgcagcaatgcattttttaagtaaaattaaaggccgaggcacagctttgttgaaagcaataaccaaatgaaatgatttcccctcctcctgtaccattgattaccatattacatcaacacataacatcgattaactgagctcctaaattccgggaaaaaaactggatgagctaatcagagggcaaaaaaaaaaaaatccatctaatcccgaatgggtcacaaatccaatcaacgccgtctcatgaaatgacgcagatgcccaagagagaaaaaaatggatacctccaatccgatccgaccccgatacgatcgccgttcccgcgcgcgcgaggaggccgcgcaccaagggtgatagttgatacggccactaaggggggtgaggcaatccgcgccgtgtctccggcgcccgttcggcttctcccccgcggcgcgaggagaggagaggtggcgcgccgaggcggcggaggagagctcgccggggcaccaccggcggagacacggaggaggaggaggaggagagatggggaggaaaacgcgagagggagggggggaggcgatgcgaggcgtggatggaaatcgtttgccgtttcgatcgtgaaggcgaagccgtgccgtccgtcgatcccagccgatggatttagtttggacggtttggatttgttggtattggttttcttttcccttttttttttctgagaggttgtctgttttgatgatgatggatggctaccaactcgaggtttcgaagggggccgagccatcgggccagcgttggcattaacgtgtgggccgacccataagctacatatgggtccacgaggcccatcattggcgtgtttgagtaggggaaaggagaatgttgaaaagatgctcaaaacgagatgaaccattttcacataattaattaagtattaattattttaaattaaaaattaatatgattttttaaaataatttttatagattttttccaaaatacacaccattcaggaaatgtgcgcataaaaaactgagggactttttctctttatcctctccaaacgttttgagttttcatttttctctcttgtttgttgtgcataagtcaatctcaataaaaaaactgagagattttttctctttatcctctcttcctaagcagtttgtagtacatctaaagtaaggtttctagatgctaaacggttcattataataaatcttataatttgggtaaagttttcctctgataacacacgcaagagtagtacatctaaagtaagggtttctggatgctaaacggttcatccattttttctataaaactaatgtccactaaatatctaaaactcaacatgcaaacataatatttattaacactcctaaaatctacatgcaaacatgtcacatcaactcatttaacacacaaagttcaacatgcaaacatatattaattatatctataatttatttcattctaaaagtaagcatacacatgctaaatcatcattctcaaattattttcataatattttaatccaaattactccctccgtttcaaaatgtttgacaccgttgactttttagcacgtgtttgaccgttcgtcttattaaaaaaaattatgaaatatataaaactatatgtgtacatgaaagtatatttaacaatgaataaaatgatatgaaaataataaataattatttaaatttgaatggtcaaacacgtgcttaaaaagtcaacggtgtcaaacattttgaaacggagagagtatttcattatttctcccatatctatcatatattcgcagcaaagcgtggagcatcttataataagagaaactacaaactaaattttcttcaaccgcaacacaaatttttcttcaaccacaacatatcatgtgtagctaacactaaactaaattttcttcaaccgcaacatcatgtggagcgaacacaaattttcttcaatcacaacatatcatgtggagctaacactaaactaaaatttcttcaaccgcaacatcatgtggagcgaacacaaacatcaaactatgtggagcgaacacaaacatcaaactaaattttcttcaaccgcaacattatgtgagcgaacacaaattttcttcaaccgcaacatatcatgtggagcgaacactaaactaaattttcttcaatcgcaacatcatgtggagcgaacacaaacatcatgtgaaatttttttcaaccgcaacatcatgtggagcgaacacaaatcatgtggagcgaacactgaacatcatagttcacaaaatatggagtttactttaagtacagttctacaaagcttctacaaggtgccatacacacttgtaaatgcaactagtgcatccagcttcagatccggcaaccgattcgtcaaagcctcagacataaatgctgacacctcagtatttaagaaaagagattacagcaacagtgattacatcaatcaattccaaccgtccaatgccatatggagcagtacagagaaatcacaaccgcaggttctgttcccttaatctaaactagcctttgccttctttgaacttctccagacttcagaatttctacagaagttcaggttctctcacttagcgacagatttctcaacaggcttcctcatctgtagaggctttgcaaatgtaacatcctccaaggggactggaattggaccagcagcttgcttgtaaatagtagatggcctctttcgaacttgacttggccgaagcatgggaagatctggggcgaggtcatcctttggtgttattgggcggaggtcactttcatctggaatccaacctttgaggaccagattgtccttcactttcaccgtaatgagagaaaacccaggaactttgttggacatcttaccaacaaaatacttgccaacaataccatctttgactgaattactttgcaaggaagcactagtataagtggaggcttggctgagagaagtcttaaccagattggcagacggaccaacactaccacctgatttatgattgatctgtatcccatcctgttggatatttgagctatcttctgtgctgtgaagaggtgggacgctctgaatgggctgtacactatatggtttttcatgcatgccatactcagacttccgtggacgaccacgcttacgcttagaaccagagcttgatgcctctatgggttcattaggtgtaacagctttattctcttcagatgtcatctttggtactttgcttcaaccttttgtagctgaacctaggaacgatgagaataccagcaaaagtgtattcacaatttttctccccctgaacatgcaaagtgaaaataatgagtaacctcaacattaaaaggatgacaaaatgtggcaagtaatcagaagaaattagaagacgatagagcaagttgacacaatatgttattgaaaaggaagctctcatgaaactattttcaaaataaacatgacacagtttgcaatcagtaatgtaaataaagtacccacacggtcatatctaggggtgaaaacggtttgaaaacagcttcaaccattttctgaatcacacttttcctggaaatagaattttaaatggtagagccggaaacagaaacatgctttgcatcataaggaaatcggcaattcatgttggaaacatgcggtatcatttggaaactgtgacaccgtatgttttcacacactcgaccaacatacatatacacgtaatataactcaaacatgtttttacatatagtcatttactattgaactaaaaatatatgtcaaataataaaatagttgtatatatggtgcatatcaaagtttacatactttacagaattggctatccatcaacatcagcaacaaggatggtggttggagcatgtcttttctaacctacagttagctgtttgaatctccctaaccggcgcctatttttgtgaaagaagtgggctgggtggctgggccatgtcctggttgctatggtggccctctacttggagaggatcatgatgggcctctagttggcgtggtatatagtaattactgatttccccaaaacaatgatttccagaacaaaatggtaaaccgagaaaacggtcggtagaacagcaaaaccatttctgcctccgtttttgaatggctcttaccatttctaggggtggacacagcatgggttcctgagcattccctgctgcgaccatagttattaggatcgaatcggtggtctgaccggaaaaaatcggaaccagggccttagccggtccacctaaaagatcgagtgtgcaattgaaccggaataaacaggttgaactgctggtttttacattgaaactggttgaatacaggacaataaaccggctaaatgggccggtgcacgacgctgactcagcttgaatggcacaagatgggtatgtgggagtggaagtgggagggaggagaaattaagccaaaaaggcagggcctgtgcatggggaggtgcgcatccatgttgaggaggtgcgcatctaccactaggctatatatagactagtgatttgatacatatcttttttccatttgaaccaggttggactagtggttcaaccggctggaccaaacaaaccatgaactgaggccttgactggttcgatgtctagtccggtcctaataactatggctgcgaccaaacccactggtccaccattcatacaggtaggtggcagggttgcagcgtgtgtgtgcaagccggctctggtgtgcatgccgcttacttaagctcagttgcgcaggcgttggtgcctcttgtgtggttgtgaggatgaaggcaacttgtgcttagtttaaatatttcatctatcattgcttccaattttctaatttatttttatacaattacaaagtaattaaatagatatttaagcatatttatcagtttgtaggactatgctttccattgctgaattactttcttcagttgttcttttgcatgatttgatatgtttatatgcaattcatgtataaatctggatccataaaatggattactttcacttcgttagccttgtgttttttatttctctcgcgcccccctaaatttcaattgtgcattcaccagtgaccatttccgattcctagcgagcgaatccatcggaaatggtaattgccagaattgagcgtcagtgtgggaatttccgcgactgttttcacccatagtcatatatatagtgtttatgtaataaataatagcagtaaatatccttgaagcaatgaaaactaaatttatcatatgcatacgaggcaaaaggaacataaacaccttactagctataaatgttttatagcaactattaccagcaccaacaagtaataaattaaactgagttacattcttggattactaatgcagaaaaacaacttattagcacgctgagctcttgtaggtctgtaacacatgccctgagcagtactcatgctttgtaaaatatgtgtcaaataaatgaactaaagaattcattcatagtgccagagggaccaaataatttcaccaatcttcttggttagaacttgtaacaatccttaatgtcgcaccaaaattgcaaccccggggatactcagatactgtaactgtgataaaacaatcttgtaaaaacgtgttttgaccttttggaagtgaagttcatcacccctagcaatcttatccatcccccaacccaacctaccaaactaacacctcaaaaagaattgaagcaacatccaaacgaaatgatttccccccttctgtaccatcgattaccaccatatcacatcgattcacttaacccctaaattcgggacaaaactggatgaaacaaaaaaaaatcaatcggaggcaaataaatccatccaaagcccgaacaagctcaccaacctaatccacgacgcctcatcaagcgatccgcggaggatatgagattgaatacctgcaatccgattcgaaccgagatgatcgattgatcgccgtccttgcgccgcaccaagggggataagagcagggcagggttcaggtaagaggacgaggcagtccgcaccgtgcctcccgggccggttcgccggcggcgagagcgcgcgcggaggcgaggcgaggcggcgcggaggagaagggctcgccgtgtgccaccggcgaggtagagagagatgggggaggagtagacgagacgagtagtgcgatggatatcgtttgccgtttcgattgtgaaggctcaagccggtgacgtgcgcagatcacggacgttgatttactttcgacggtcaggatctctcggccgtatgccagatcaaggctttgtacatggggccggccctcgagatagatggggcccataaggcccatctccatgttggcttggcctgcagctaaacgccgaattttttttatttataattttttttattaaaagttttacaaaaataattttccattttgaaaattgacggaaatagtcgcctaccgccctctgggagggcgatttttaaaaatcgccctcccagagggcggcgaaaatgacgtggcagacggccgttcgctctcgggcgacggccgtcaacgaaatttgcaggcggcccccttgccgccctccgcgagggcgattttgtactgtgcggggggccgcctgcaaatgggcggcgagggggggcatggaaatttgcaggaggcccccttgccaccctccgcgagggcgattttgcactgtgcgggggcccgcctgcaaatgggcggcgagggggcatggaattttgcaggcggcccccttgccgccctgggggagggcgattttgtactgtgctctatattttttttatataaatatcaatagttatcaaatctttttatattgaaaactatacaagattaaaatctccaagattggtaaaatacaattttattattttttagggcatatttggaatgttaccgtacaaatattttgttaatgccaaaatataagcaagttttggcactaccaaatatttggtaaggtaaaattgcatttgatcatatttggtttgctgccaaaatgtaaaattgtagtgaagaatgttgtacataatctcaattctagattacgtattaccaattaataggcttccattttcgtgtgtggtgtggtagtgggaaagaagatatgaagaggttgccttcagattgtcaattatatagcgtcgttttcactgcaatatatgtgaactcaatgagatacattattcattagatgtgacaagacgatcacgcgtgggcgtgattcactttatgtcaacaggcagcgccgaaagttgatagtgataactcgagctgccgcttttcatgtgtgctgttgtggactgtgcgcgctactggatatggcactaccgtgaagcgccgaaagtgtgttgttgtgagcataagttgttcaagcaccatacgaatgaaaagaactacgtagacgagacaaacacaagtagtactgcagtagtaatagcaaaagtagtactgctttacaagtttgtaagccaaaagaaacggtcacataaggactgaagaggtagaacactactgacgaggcctcttacccctgtccctcctaccctgcgccctaatgtgccccggggagtacgtgagtcggtccgggggtacggcacggccaacccgtcctgcctgtacaggtgtgacctctggctgctcctgagtgtgcgcctctggagctcctccaagctgagaggagcctagtacgtcctggtggtctgcaccgtgcaagtcgtcgtcgtagaactggctagtaggaccagtcctaccggcgtgagacgaagaggccccagtaccgaagatcccggctgcaaatcctgctggacaaggaccatcagtttcgtataggtatttaacagtattaataaaaagtaaagtaccgtgtgggcgagggatcgacgctccgtgagagaaagagctggcgaacgcgcctgaagaggtggcgaacgcccctgcggagctcgcggaagcgccggtcgtgcctgcgaacgcgctcgaaggcatacgaggtcctgcgatgaggaaacgtgcagttaaaacatggtgacacattcgtgcaaaagctgaaataaaaatgaactaatatctgggctgaactgtaccgtgcgaaaccggtgttgtaggtcgcactgctccgaagctaggggcgctcgaagacaaacgaggtcctgctccgacggtaggaccgcgaggccgtgggtgtaccggaccagctggaggtacgacgtccacggcgctgcgacaggagaagacgcgcatgaccgcacgcatcttctcctgcatccggtcgaaagcattgttacaccatggaatcgcctgctgcgcgacgacgccttggccttgcgcgcctgcttgttgttccttcaccaggtggtcgcctaccatcacttgcctgtccagatggactagcatctgcgccgcttggaacttctgcattcttcgggcatgtcttgtaagtatggccgcgcagatcacacttgctgcagcgtaaagtcctcccacctgcttctgactcatccatatcatttctgatgcgtctagtttggcgtcgaccctttttcaccctaaacttagatggatctggaatataaaaaacttgggcactcagcgttgtgtaagatcctgagatcccgaacccatatatctcctcactccatgtatgaaagattgcttctttcctgaaataatttgagacgtacacattgggagatatgccacaatcaccggcagcagcaagaacgtgtgagcaaggaaggtgatgaagcttcggcttcatacaactgtaggtacatccaccatccgccttcaagacacattcctgcacggcttgcttgcgatagataccacgcctgctcctatcaacacacattatttcataccgatgcacttgtgtgccttgagcaacaactctatgtctccgtgcctttttgattttatcttccatgtactttgtcactacgttgccaaacactatgttgttatcggccatggacggaccaattttcttgtatcgatccctaaagtaggcttgcgtgccgtgaaggatgaattcaacaatagcaaccaatggaagtacccgaactcctcgcattacccagttgtacacctctgccaaattggttgtcattatgccataccgagatccatcggtgtcgaacaatagagcccacttctccttaggctcattctcaatccactgagagaaatttctgatggccgaccctgacctccttctcattgttggtgggtcatcatgtaatgcaccaagaggtatgggaggctcgtcaccttcaacttgtggtctgcgagattgctcatctgtttgcttcgttgtcaactcatccaacttgtcccacaactcattaaatttcttctcttggttctgtgcacagagcctcttaaagagctccataagatgcttgttcttgaattgcttgtagaaatttgcacccatgtgacgcatgcaccaccgactccgaacatcaggccacttagctggaagtcccttctcatcccaaccgttctacaagtagtcaatagcccgcaacatacccgcatgacgatcatgtataaggcaaacgttgggcctcatacgcaccactgcaatgtgcactctctctaggaaccagtaccagctttcagtgttctcactctctacaaatgcaaaagccataggtagaacctggttgttcccatcacacccaattgctgtcaatatctgacctcggtatttacctgtcataaaagttccatctatgcatagaacaggtcgacaatgcacaaaagcattgatgcaagcacccaatgagaaaaaggctctttgcagcacactctttgttctatcttcaaccgatgtaaatgtatgtaggtcatagtaagtattattattcctctgggcaatggtggctaacaaacgaggcaaattatcataacaagcttcaaatgtgccatacctcatctcaatgatcttttgtttggctctccaggcctttgcatagcttatggtgtacttgaatttgttctcgatgtgcctaataattgattttggttcaaagccaatgttaccaacaacactgctgtacatctcacttgccacaaaagctgaagtgatgtttcggtgatacttctccaccccttgtaagtagcacttgtgctcggtcacaatgctaactttccaataatcattccatttacccttatatgcatggacacgccacggacaatcttccttcatgcacctcacttcatacacataatttgttgacttgaccaccctaaactctctctgcaatgaaactgcccaatgcttcaccgcctccttcatctcatccttatgagcataccttgcaccctcaattacctcgtactccttatactcccagggtacatgatcaccctctgatataacaagaccagagaagtcctcatttgcccaatcagtggccattacatcaccttcctcatcggatgatgcgtcgtcctccgcttgctcattatccgaatcttccctctccatttcatcaacaattataccgactctctccccctcatccgccatgcccatggcctgctcctcccttggttgattttcctcattttgcatcgatggtccaacaacatcccctgcattgctaggaccctccacatcttcggtttgcattgaaacatttgtatctttctcttgtaccgacacaaatataacgaggggccatgaccgttcaaaagccatttccacataccgtctccaagcagcagtgctgtccatcggcattagttcccaaaaataaccttctattgcacgactcactacaacagatactgacattgtgtagacttcttggtctattctaaatcctctcaacaaccaactataaattgactgaaatgttctctccgcaggcctatcgatgcccttagatgtcattacaaaatctgacagatcaacaccatctggaccaaatctaatatttccttcaccgtgaactatctgaaatgtgaccttacttgacattgtgcctgatgaaaacaataactgcgttaacctcgcatttctgtactacgccctaagttacattctctacaatattgttctctaaatttctaaaagtaggttacattctccagatcaaactaaactacatcttacaattaacactactgtctatgtctcaattcatactattatattctatgctctggatctacacatatgtgctgtgtgctacagatctgctaaaatatatggaactaaaactaaaacgcaacatatgtactcaaacgtaatatattagtacaaatgcaaaagatgtatgggagcatacctgtgatgaagtgagcgaaccagcagggcttcgccgctccccttctgctgccctcccctctctctctctttcgttttttttggatttttagtgaatataatgaaatttcataggggaggggctgggctttataggggggaggcaaaaatcgccctcccccagggcggcaagggggccgcctgcaaaattccatgccccctcgccgcccatttgcaggcggccccccgcacagtgcaaaatcgccctcgcggagggcggcaagggggccgcctgcaaatttcgttaccggccgtcgcccgagagcgaacggccgtctgccacgtcattttcgccgccctctgggagagcgatttttaaaaatcgccctcccagagggcggtaggcgactatttccgtcaattttcaaaatggaaaattatttttgtaaaacttttaataagaaaaattataaataaaaaaaattcgctaaacgcctatatcagcggctttctagggttccactcagatcacggccgttgatttactttcgacggtcgggatttctcggccgtatactaactcaagctttgtacatgggcccggccctcgagataggtggggcccaaggcccatcaccatgtgggcttggcctgcagctaaaacgcctatatcagcggctttctagggttccactcggcgccgccgtgtgggtagacacgcgggcgaggttggttggcttgttctttcgttgatgtgttcttggttttgagttctcttctcggttttctctttagcgttcttgctgggatttgatgcaggcattgagacattgatgaactcatgagtcttagcgtatgatgtttttgtcctgttggaacatggatttccaagcttggatgccgcgagactcgcacagaaaaaagtgttgccatcacctccctctctctgcttgagcacacgagaatggagtcgaataacagcacaacatgtcccataatgccctgaatctgtctcattgtgcgttctgcttaccagccacagtgttcttggtcactgtttaagagctgactcttcataagctaatctctatttagttagtacatactgatatgaactaaggtttccagatgctaaacagttcattttatattttatgatttttgctaaactcttcctctgataaggcgcatgaaaaaacataaatcactagagacatctgtgtgtgagaattttattcaactgcatcttcatgtggagggaacattgatcacaagttttacaatatggagtttacttgaagtacagttctacaagtttcttcagggtgtcaaacacacttgtgaatgggttgaatgcaacaggtgcactcagcttcaggtctgggaactgattcgtcaaagcctcagtcatcccaggcattgacatcatcagaccaagctggtccgtggacatcacctcgcaatcctgtggggtgtccttgatcttgctcggatcataaccgaagttggcagcgtaggacttgtacttctcgatgaattctggtccaggattaggtgttcttgagtatatctgatgcattgccgagagacgacacaatgttatgatatttcagtttacaaaatgcgtcagaataggcatatgaaggtaaggaatattggcttgatttctcagtgttcaagtccttgcttaaccctatgttgtctctatttgacactatatttggttcatggaacagcttacgtaactagattgatctttcaatatgcagaataagcatgcagagggctaagaaatagtggtcatttgcagttcagagatcagtttctgacctggataaagcttgtgtctttagcaccagacacaacggcgtaattgtcataatcggttgcaagcacatcataaggttccttttgngngtaatgaatggtagtgtggggaaacggagaaagcatttccccttgatcatctcctgcctttcaagatctgtctcagcactcgccatgtcctcttcggacaggcattgcacccttccccgaataccggtgatgtaaccatcaggtccaccatgaacacagaatgtgtccacctggattgagcgtgatttctcatccaatgcatacaccccctgcagtaccaacaaatttctgtaacaatcttcttacacattatatggtgcaaatggcatagaaaaaatagcatgcctgtgataacctattccaaatcagtttgatacaaagatgtcagatatcggtgttttcaggaatcaggattcagaggtaacattatttagtttgcccttgggggggggccaattccaatttaaccagctaagaaggaaatttttttttaaaaacctactagtattggggtgaggattctggcactacaatacctgagtacagtgacagtcctcttgtccctgacaagcaaagccacgtttcagcgatgctacttcgaaccatctaccagagtagcgaattgggtcaaagttcttggcagtcatacccttcatcatcaaacctgtgccgccatcatcagaagggctatcgaatttcagaggaaccgcagccttgtcgatggctgctaccacagcaacctggcacaattttggctgtacaaaggtctctgcagggatagcctggtcaactatgagagattaagagtacatcgataccatgttacaagcctgaactggtaatctcactccattttccctcttctcttaattgaaattaacaagttttatgtatccaatcaaaattgcagcagtaaaattctctcaatcctcaacagtaaaaatatcttttcttaaaaaaaactgttcttgcttagtgatcccgaggttatctctttgaattacgccgtgtttagttccaaagtttttcttcaaactaccaacttttccatcacatcaaaactttcctacacacacaaacttccaacttttccgtcacatcgttccaatttcaaccaaacttccaattttggtgtgaactaaacacagccttagtgtatatacatctgacaataagttaacatttataggtacctgacaaggtggagagatgaaaacaagcgaagcagcaaggcatgagagcaattttgtggataatactccatgagcattcagtggcaccttgtcatgcagagagcatctgaaattatttcgtccagcgggtctgcattttctcctaccaataagaagattacttatcagcattttcatccaggtactgtactaacctgactcctcctacgtgccatcactgaatgtggaatatgactttgacatcaagaatgttacccaaaatacatgcctgcttcgaacagtgaatacaatagaacagcacctgatctagccttatacaactttgatccaagaaaaatcaactgcgtgttgctgccactggcgcttgttacctggaagagcaagcagggtgtggcgccgcaagagaagaagaggaggagcccaacagcagagcgagaaccatggcttcctcccgccgccgccgtcgccgtcgtctcccactgtcttaggccgagtaaaccgttttctcgagattacgcggttgcagcttcttgagtggtttttggctttcgatgtctgcaggtgcgggagagagagagaggagccgaattgctggagaccgatgattctgggcagaggcagaagcgcatccagtgccgtccaatgggaggcgcccacgtgggcaatctccctgtatcacctgcgggccgttagctgggccagggccttgcacaaagggaaaaagtacaccgaaggtccctcaacttgtcattgagttacaaaatcgtcccccagctgcaaaaacagatatagaacatccttcaacttacaaaaccgttcactttaggtctttcggttgttttgaccccggttttgtctgacgtggcggctgagtcagcgtgggacgcatgtgggccccacatgtcagggtgtccgccttagcaccctttctctttccccaattctctacctttctcctctctctctcctctcctctctgcagggcaacggcgggtggggaggaggtcattagggtgaggtgggagaggctcgcggcggtggttgcgacactggagaagggaggcggctcgcggcggctgccgacgacatggcggtggcaggagaagggagagcatcatcgcgcgtgcgacctcagggttgcaccgtcgaaaaggctcgagaggcgggcgcggccgatgggggaggagcttggcgcaactagcaggggaggagttgcaattcctgggcgtggtagggatctacggggaggcggcgtccatcctccgcacccaccgcccgcatcgccgccgccttcgtcctcccgctcttcctcctcttcctcgtccacatcgccatctcccacgccctcttctcccacatcgactccgacgactccgccttcgactccgccgccccctgcacccacgcccaacgccatctcctccaccgcctcgccaacgactggttcgccctcctcctcttcaaggctgccaacctcttcgccatcctcttcaaggccgaccatgcaactcgcagaagggtaccgtcgggtttgcatttgaataggataccttttctcttttggatacacaacgagatcggccgcgctggcgaggagctcgccagagcgccactaccgccgccgccgccgatgccttgctcccctgctcccgtgtcgtcgccggccaccggacctcctctcccgcctcgccccatcggtctcctccctacctggtggtcggcctgcccagagcccaagagagaagagtgagagagagagagagaggaggaagggagagaagaggggaaagagagagagagagagagatgaggctaatgtggacgcgctgacatgtggtcaaagcgccacataggataaaaccgggatcaaaactaccgagggacctattgtaaccgattttgattagttaagggacgtcggatatctggttttgcggtttgaggacgatttttaactcgatgacaagttgagggaccttcggtgtactttttccttgcacaaagcatgagctactctgcgcccatagagcccgggctatttcaaaagggaacaaatttactctagattttattttcaaacaaaaataataattctattttcaacaaacttttttaaaaaaactccattttcaacaattttcatatcaaacttatttcttgggtttgtattcttttttttaagaatcactagaattgaaattggaagtgcttgctttaaagttgttttttttaaaaaaaaataaagtgtcaaaaattacctattcttacttaaaaccgacgagcactcgtgaatgcaatgttaattttagtgcatatgcatactagagttaacttctccatctcaaaataaatgtagtttcttttaaaaaaaaaaataatctccttctccaaatcgaaccaactcaaggaagggtgaattcaggggctgtcgttgacagaagtggctatctccgtggtgtcatagtgtgctatccatgatgtacctttgatccgttgcatgataatccttttacacagaactcttggataactattgtcgacttttccattgataaaaattgttgggcatcgtgaagcagggtttctagctgcttcaccggccaaaaaaatggattagatatcgcagctttttttctgctagaaaaataatttccggtagccaatatccaaccccttccattttaataccatcaatatattaaatggtatgatgttagtctattaaacctacatactcattaagcatattgtgcaggttataaaattgtaagcgtgccaatagtcacgctcttctagtaattatatattgcattgttgaagtgtggagttttttttttccaagtgtaccttaaaaaagttctatactgcattgttgttagtatctctgcacgggacctcttcttgagatctgccagcgaggagcgcgcggagagctcatttctgtgggtcaagagctcatttatgtgggtcgaatctgtttccaacctggtaacgtttataaaatctacgtacaaggacactttgtttggactaatgcgtccacgcaggtgaacactttttcggtttgatcgctgcaacctataaatatgaatatgactcctttccggatccatgctaggtttatttttttcataaactaggacggagagagtaaattgacgtgtggtatccacgtgaagacggtctcaatctcacatgttatctgtcctttttttttaacttgacatgttatctcacatgttatctgcaggtgaacacggaggtttattttttatttgatattttaaagcaacttcttaccagaaatttagcactttataaaaatgtggtaacagaaatcgaggtgaaatctgcatcttaattagaaaaaaaaaggacctagattttttttattaagattcagatttttacctcggttttcgttagcacatttttcaaactactaaacggtggtgttccgtgcgaaagtttcaaacaagctgggcaaacccgccgacgaaggaagcgagctcaatgttgtttttcatcctgttaatgtgatgtacctttgttccgcttgtcatctaaatagctactccttccgttccacaaaatgacattttagcttctttatctcttttctaaatttactaaaaactcatatataaatctaaacacatatatagagcatatacatatgtctatgtataaatttatttaaaagcaaaacatctagcattgtgaaaaccgaggaaatatatttttttagaaaaaaagaaaaacagacaaggttagtggagtaatttagcagcctccatccagcatcttccctccggactcccgtctccaaagcaagcgccacaactcgaccctctttgcacggttctctcaagcattcacccccaatacctgagcgctccaccttcgtgcccccgactgccgacgccgcagaagcacgtacgggcttgggtaagtcgtaacgtacgtatccactctcctctaacagcagccacgaatcaacaatagctgaataccactgtcatattactgttcattcgattgcatttgagtgagaattaatggttcgtcttctcgattttgcatgcagcatcttggactgaagcgcaaccgcgcgcatcggatcgatggattcccccgtgagcccggctcggtgggtggtgggcaaggccctcggccccgtctcggacggcttggtggaggcgtgggcggccagccgggagctcggacccaacgtggacgccctcaagatggagctgctctacgcgcagggggtgctcgacaacgcgcagggcaaagacatacgcagccctgcgctcaaggagctcctccagaagctgcgagacctggcgttcgacgctgacgacgtgctggacgagctcgactacttccgcatccaggacgagctcgacggcacctaccacgccgccgatgagcacgccggcggttgcgcccgcaacctcttcctcaatgtcacccacactgccaaagctgccagcaaacggctgggattctctaaatgctcctgtgctgctgctgctgataatggtagtcacacctatccaagatcagaacaaggtgcgcaaggacgtggcctctgctgtggttggtcatacaacgaccatgacagtgaggaggaggaggaggccaccggcggcggcatccgcaagcttgcttccggtgctcgcaacaccatccatgctgtcggtaaacgcctccattgctcatcttttccagctgttgttgatgatgattctagcgtttcaatctgttgtggtgcttgcatgcacaagccaccacaacagagaaaggatgtgatcaaagaaacgccaaagttgaagattgacagagtgggtctgtctataagaatgaaggatgttgtcgaccaactgcagctcgtgtgtgcaaaggtcaccactattcttaatctagagatacaccattctatccgtagcactgattccagtactgcgagcaatcgtcccatcaccacacctacaagtatagagcctaaactgtatgggagggatgatacagcgaagagcataatagattatataacccaaggtacagactgcggcaaggacttgactgtcttgccgattgttggcccaggaggcatagggaagacaactctcatacaatacatatataaaagccttgaagtgcaaaaccatttccaggtcaaggtctggatatgtgtttctcaaaatttcagtgttgataagctcatagaagagatcaaacaatatgtccctaaagtggatggtgaaaaagatggtagaccagaagagctaattgaacaaagattgaagtctaaaagatttttattgatattggatgatatttgcaagtgtcaaagtgatgattggaaaaagcttttacttccactaacaaaaggacagtcaaagggtaacataattctagtcacaactcggtttccggttgtagcagaaatggttaaaacaatggataactcagtagatttggaaggtttggaccctggagcgtttagggatttattcctagcatatgtatttggtgataagctaccaagagacgtccataaagacttacttgtgatcggagataagattgcaggaaaactaaaaggttcccctcttgcagcaaaaacagtaggtcgactattgaggaaccactttgatcaatatcattggaacagagtcctagaaagtagagaatgggaaatggaaaccagcaatcatgacattatgcctgcattgcagcttagttatgattatctaccttttcatctgcaa

SEQ ID NO: 5233 - DNA, 68110 bp, Oryza sativa
cctccgccgccgcctcgcctcgccgcgctcctgccatgccgccgccgtcttggagaagagagagagaatgagagatagaagagatagaagagagagataaactgacaggtggggcccacctattttttaataaataaattgctgactggaccgccagaccaaaaccaccgcggatttgggtcgaggggggtaattcgtccggtttacatagttcagggtgaaaaatgtccggttttgtggttagggggggtaattcagacgactgctatagttcggagggtaattcgtactttttccttatttttttttaatggagtagactttgcaaggcatggaaatgaccgagggttatccatccttttcttgatgctcaatttaatcctttggccatcaggtcagtaggtggttgccctacgtacgtattcttctgatactgacatgcgtatgatcaatacagcttaacgtcatttttcgcgtcagtaatcgatcattagtgctagtaccatgtgtcatcattcgattagtagttagttgcatttattcagcgattagttgcttcttagttagtacttacactgtgacagtaacctagtagttgggaaatcttcttaccacttttatgtacatacactcgttttatgcctgtcactataaaaaattaaaacattttgataagatatatcaactataaacatacaatttaaaattcgacctacatatagaaataaaaaaattataaatatgacaataaaaaattatgtactattagcagtttagatgtgttgtttttctctatttgtatgtcagaactagaattttaatttgaatgtttctagagtgaaatgttatatgttgatatttttttaaaaaaaagagagtgactttttagttgcatgagcgtagttccactcgagtgaggaaaaaaaaacagtttctgaattagtggagtatactgtatacttcagttctgttgggttaattaccattcgcgcgcgtgtgtgcagccaccacaacaacgcgttcttcgcgcgcgtcggcggcgtgagcaacgcggagatgaacaggctggagctggagctcctcgccgtgctggacttcgaggtcatgctcagccaccgcgtctacgagctctaccgcgagcacctcgagaaggaggcgcggagggacggcggcggcggcgacatgctcgccggcgcgtcggccgccgccgccgccaaggcggggagaatggcggccgtctcgccgtccaagctgctggaacgcgcggcggtgaacggcgccgcgcagcacgacgactggaggagcctgggtacggcggcggcggcggaggcggcgaacggcgtgcggcggcacaggtcgtcgtcgtcgtcgcggtattccttcgattgctagtatagccagcgttgccaaagagcgcgttctgtgtgtatatatcaggttatcaacgagagtttttgaggctgtaaaaaaattaaagacggattaattacctgccaaagtgccaattagcaaatgtttgccatacacgaacattactcgttgcctgttcagcaattcagcaatgaaaatgaaaatctggaacaatcgtcgagtcgttgtagagttggttgtttgatggaatttcttttcatgcattaaacaacctaataccggatataacatattctaatattatgaatcatgttgatttttttagaacacggagaaaatatacatgaacacaccaccatcttgtgtaaaacggaaaaagaaactgtttttttccgttctttttccgtgtgtcaatgtgtcgtaaaaacaccatctaataacctcgcagagaaaaaaaccacagtacttcaatagtttgtacagaaaacatgatggatcaggctaagtttgttgaaatcaaggtctcaaagggaaaaaataaagaggaaatcatgtaaagctcataccgaggagtacaaaattagaccaaccatagaagaaaaccaactcatcaaatggccagtttagttccccgccaaaaaaaaattttacacatgtcacatcgaatgtttggacacatgcatagagtattaaatataaataaaaaaacaactaattacacagattgcgtgtaaaatgcgagacgaaacttttaagactaattgcgccatgatttgacaatgtgatgctacaataaacattttctaatgatggattaattaggcttaataaattcgtcttgcggtttatatacggattctttaatttattttgttattagattacgtttaatactttaaatgtgtatccgtatatccgatgtgacacgttcaaattttacgcgtaactaacacacccaaagtcatagttcgagcagttggttggttcaaccatgaagactgtgactgggagtaaaacaaaaaaaaaactgaaagacctattaccaaaaataaagacactcttcaaggacctaactgcaaaataaccgtctcctaccacgccgcaagcaaaaacaacgagcttccctctcctccgccctcattccctccgacatgtcgcagcccgccccctcgtagaagagacggcacaatttacacttcgccccctccaaatcttctcctcctcctcctcctcctcctcgccgtcgccgccgcgagcgggcgcgctagggtttcgggccgccgcggcgtcctcctcctcctcctcctcttgttctggtggtcagcgggggcgcgcgtccgatgtcgtcgggggcagcggcgtcggcggcgggggtggaggcgggggcggcggggggcgggaaggacgacgagctggctgatctggtgcggcgcctagtggacgccctcgcccgctactccgatcgcctcccgttcgacctcgatcgccaggtttgccgctcggatctgtgatcccccccgtgtcgcgcgtgtgttttgcggtgttttgataatctctaggttttcctcgctgtttagggatttgtggtggtccgtggtgtaaaggtggcgcgccttgcttgattgtttgtggggaaggctagtcttttttgtttggaactatattttatactgtggccattctactattgtttagttgttattacatacatatgagttcgaagcatcgatttggtaattcgttcttagcagctgtacaagctagaagctgtagtaaatttttaggcgtggattcgcagttcgctaatgatatgtctcccttttgggaaatgtggtcgtatttgggtcattgtgatagttgagattttgatgtatcctttaggttagtaataggctaatagtgctgcgagaaatagttactatgtagaagtgttggttggccagaaagatgcaaacttttatgatggcttgctttatgtgatatcatcgaatgatctacttacctctatagtcagttaatgaatcactaaataattcgttaatggcatgttgtcgttttgtaagttctcttgactgtagtgttttacaacgctatttccaagaactcggtagtaatacaacgtgcagatcctaggctagtaatggatgcaagcacaggcatacacatgcgaacatgacatgtgcatgcacggcgaggtaaaccgatttctatgctcagaaatctgcgctacaacgtcattaaaacgactttaggtatcaaatcacgtgaaagcacttaaaagtgccgtagcgctcgaaaatcgaccttctgggccctatgttgcaacttgcaacagcatgagcattcatattattccacaaaagattgtacttggtgtcaatttttaatcccttgtatcagtcgttgttgtggtttggatgagtgaattggtgccattttttgtgatttctcacacacaaagtccgttttattaattcttgctacaagaattattgaattacttcaatcttctattttagaaacttcgctcatttactacacttgccgcaattacaatcacacttatctttgcctggaaactgttgagagctcctcaagagcaacctcggaggccacgtagacgcgttgctccatcacctagcaacaccagcagtagatcacggccaggtgctttgacctcaacggatgcttgttcatcttcagcagattcaagagcacaggaagcaatcaaccagcttttccagccagtaaacgtattgcctgtttccttttctgaatactgaaatgatgtatctgcttttaggatccttggactgatagtttgcttatattcttctccagctgactcttgagcagcttgttaggcataaactgagcgaaggacgaagggtattttgcaagcaactgctttcacacctttttttttcacgaaatttaaagttttgttataccaatgcatgtttctttcccatgtgtgaattataatgtttaggttacatgccggttacttggtgtgattttggaggaaacaactccagaggagctccaggtgagcaaaagcgctgctgcaaaaaaaatttcctgttttttgttaacgaatttaatttagcggaattatacttttttttcagaaccatgtcacagtgagaccttctgtcctggaggttcttctagaaattgcaaaattctgtgatgtctatctgatggagcgcattcttgacgatgaaagcggagtaagtaataaggaccatgcattttttctgttgcatttatgttttacgctttacaagtatgctcaagacttgatatgtcaatatatactgatatcggcatatgcacgcggaataaacagtaatcaatttaccattgatatcggaataatacgatgaatgaacaactacctggtctgctattttatttcattatgttcaggggttctttttttttttaaaaaaagaaaagcagaagagtatttttggaatcatcactatagacacactgcctagtacggaatttgaatgagctattatagcttgacatcagcacaactgaataatgttgcaggaaaaggtgttatctgccctgagtgaagctggactttttacgaacagtggattgataaaggacaaggtaagccgcatgatgaggtcacttcagaaatataactgcttaatcgttttttttttcatttgggtatagccattggatgttcgcaatggaccttatgtaacatttcttcaaatggcaggttctcttctgtagtacagaaaatggccgcacctcttttgtgcggcaactggaacctgattggcacattgatactagtccagaaattgttcatcagctagctgtaagtcacaattttaacaatcaagtatcatacttatagaagcaggttttgagttgctatgctcccttgcagaggtttatcaaatatcaactacatatttctccacaacgagcagaaagagtagcatccaatgttttcagctctacaagcttggaacaattctttggaggccttgatcagagatgataatatgaggtagagcaggagagaatttattatttgacatgtgcatcggcgtgtttctcatgaaattgatagcagcacctgtatatcatcaccaaatttgacataaaacctgtatgctcaaccgaccggaagacatgacggactgaatatatgtactgcacaattctacacgccgttcctctaatttatactgtctatctctctgcaggtgagctccagcaaacaatggcatagcgagaactgagacgaacatcattgttcattttttttccttgaatgatggaactcgtttttcttgtaccatgtgtaaaagtcgtgtcatgttaaactggttctgcaactccccataagctatggaaagagatagcatctgtagcataatccatgtatcaattgtgttcctgtataaccgaaatacttaaaattgtcatccagttatttgttcggccattcatcccagaaatgtgttattttcacaaaaggaaaaatctcaactgaacagaaggaataaaaactttctgcagcatccaacattagcacagcaaaatccagcatccactcaaataagtacgtatcatatcattctttccgcatatcctatcctaacatttttggagttgtcaaaatctcaattgcatatcctagacaaaaaaaataaaataaatggagtcgtcaaaacttcaattgcatattccacaccaaaaaaataaatttcaggaacctccaaactgtggatcttgttcagttgggcttttcttcttggcacctagggcacgtacagatgaatccataatctgcaagctccgcctgcctctcctcgtaggagacatcctcatcgatgtaggatatggtaatctagaattttcacagttagtacttggcaaaacaacgttttcaatgttttcttttttcactggcagcacaagaaaaaaaatatttgagataagcgttaacagctcagtacctcatcgtccttcttgataggctccagagcaattatcactgcattaccatcagtatcctgcaacggtagttcaatggttttgtcggattgctgactggcaatttggtgtgaaaaatgagcgaatcaactggaagaaatatagattacctcatcccttttatatgctttagcatttggacaacatgaatgattcatacagctttgcaaaggaaagaatgccgtccctgccaacgagaaaattcacaagagaatgaacgaatactgctgggtaaatagaaaatgacattactgtggggggagataaacttgggaagaagctccacataccctcacaaggagctgcatagtcttcacctaaagcatctagaaatggccttgtaaccttttcagcttcctcctgggatatgttgcacttcagattaacaatgccacaagaaaagctaaggctaaccagtgaaaataccttctcatcatctggaagatcatcaatatgtatgaaatagtcttccactggagacggaacaaccaaaccactggaataaaagatggaaatatattgaggttattacatcaaatgcagtacagaacttatttctgttgatggaaagaaacaatgacagagtatgtaatgcacatatacaaatgaaaaataattagatttacttacagattgttcagctcaaacatgccaattaaatggccatacacgtcaagtgagaacactaggaaatgtcaaggtgaccgtttttttttacgtgagtcaatgaaacttgattacttgaatgtgaagggaagctacttatttatatatatgaactgatctagtatatgccaaaaaggatacagggtgcacactcagaatcaaaaatagcatccttgagaagctgcaatgactgcgaaacacagaagataatgatctgcccatcaatccattggtatgtgggacacttttcaatcaaaacaataaccacttcttgtgtgccatttttatattttaactgacgagctagtgaataaagcttcgtttcagagcacaatattgtgaatagaatacctatatagtttcaaaagaatgaaatatgtgacagcataattaccgtaagtgctagatccctaatttgctgcctaaatgtatcttcatcacaggaatcaacatcctcaggcaaagcaacagagtcccaccacctgcaacaagattttttttttttgggacatattagggtggaacaacaatgcaaacaactcaaaggatcttgtagagctagagcaaggtagtgaaagccacactgagctgaaaataacatcttgccaacaaatccaaaaaaagagaacaaaatatgcaaccatgcaacagagatcttattgactgttataaatgagaagagtggaaatatactagtaccattgaattattgatatacacttgatgaagaaactatcgattgtgcattaaaataacactgctggtagtgccatacgcgcagctactttatcagaggggatgaatagttgcatgcgaattcatgactttacctctttttgtagcccatcgaaagtggtttccatgcttccataagcaaagaaaagtttgattcatctgtgttattttgaaattcaggctgcgttttgagtttcttgtacctcagcagagtgaaagtgatagcctgacatgtaaaattgtatcgagctcatgcatcatgatcaggagatattaaattgactgcaattggtagcaataaggaaattgcaattgaatcttttgtttggggatgttcttgatatagctactaaaactcgtcttgtgcaatagtctgtcctggtgcattgataagtagattgctgacagccattagtgataacagtaccaactcaagtgtgatgcttgaatgctttttgtattagccatggacaatggcaaagttctagtatccccataaaacttttggagaatattagaatctgagatgagcacataacacgatgtttagtgcttagtacactaaacattaatctatatttctatcacataccttggcagcaacaagaaaaatatcattggaccctgaaaataaagattggtcagtagcagataacagactgacaacctcaatcacaatcatcactaatcaggaacaattgatctaggcatgctgcatttaatgaatagtgaacacaacataaattcgtaatgatggtatataatgatcactgcatactgcacttaccatttgcatgttctatgaatttctgaagagcagatctctgggatggttcagtcttagatccagtacacagcaaagagtgataagtttcccagtcggaatcagcacatgattggctaaacaaaaatgcagaatcaacaagttatgtttttaccccaagattacatttctatctaagacggcaagaacaagttacatgttctgataagataattaggttttaagttttaacacgaccgacaactataacctatgatggagaatgaattgatcaacaaaatatttatgcctcaaacaaaattcctaacatctttgggtgttgcagccaaaagaaagtgtgaactgtaaaatggttagtgactcaaacctgcagtagcgttcttcctcacatccacgacaaggaacaacttgaggcaaactaaaatggtctgtgaaaggcagtgacatgtcaccagtaataagtgatcctaagacctcttctggcaaagtactactgttttcctttgttgcaccagaagaactggcactcgatcccaaatcactctcatggcaatgcctcctattagtgcagtcactgcttgaaccaacgctttgccaatacaatcttcgtccaatctggaactctatagaaccaatgaagcgaaagcaataactgcacacagcgcaatcaatctgaaataaaacacaaaatggacaccacacttcagggaggagcagttcacacaaaaaatagaagggaacaaatacctaggatcacttcaaaagcagacgaaccttgttaagactgtgctgagcaccaaccaatatttgatccttcagaataaggtccccttctgcaaactccttgttcgcacaaacacctgcaagaaccaactggttaagtatcttggcttttacccgacaccaactttatacaagcactccaagtttgccggattgcattgcacaagatatataagtattcagtaaccagtacctttcccatgcttgctgctgaagttcactcttataccatcatgtttcctggactgtatgagcccattgtagtattcctgaaaacaaaagtagcatagctgtgtgtcagatgggagctacagatcgtcagcaatacatgaactaaagtaaccaaggaaggagaaaaaaagccataaaagatttactacaattttactggcttcaaggagacaattgtaactgcaacacagaaagaagccaagaacacaaaagattgtttctattctgtcgaattgatacctccatcgagctacattcactacacactaactgggatacccaaaaaagacaaacttaagattgtacttctgcaaataaaacattaaactacaccgttactgttgtaaactaaacaattcgcctctcatctcaccaatctaaaaaaaaccatccatgcggaccaaaaagaaatcctcctttctcagtaagataactgaaaccaatcatagtaagatatacccatcatagtatcacttccttataacgaaattcccgacaatgattacccaacctttctacagggaaaaacaataatcgcagcacaagcaattcccaagcagatagatttgagacccggaggatggatgggcaagggaaggaaaaagaaaacgtacctgcgcgggttggagaggaggggtggcgaggagctgggcgatttggggcgcgaactccctgtccaggtcacacgggcttgcgctgctcccacccatgccgccgccagcgcgagctgctgcctcttgcggctgcttcttccgccgccgctcgccgccgccgccgtggggtttggggggttttgttctcgagaccttgtctcgtacttgggggagaggtgtggatatgaacatacgtgttcgagctatgaaggcggaaacaagggaagtacgcctccttgttgaaaacggaaactgccatttttggttcaaattgacagccggtgtatgcataactgcacacacataaggaatatgtgaatgttacttgtaaactgcatacatatggtatatgtgaaattgcgattatcaactccagtcaactaacattgtcatcatatccctgatgcttatgcaagaattcccccaaaaagaatgctaaagcaattaaaccaccaccaagtacctaatccgtagtatagaatgtaattcatcctctagtactatgaatctgtatagaagtaggtaggatgtatcatattatattctatattgggttaagggagtatatgtactagcccagttccattccgagtttatgtgttcgtcaccatcaccatgtcaagtcaacatccagccttcaacctttgtaaccaagacgtgcatcgagattgcttgtgatgatcatttcaataatgcaacatacactgctaattactagtaatatttgtgagtgttagatacaccgaatacagcagaaaacaacttcctaggtccccaatgcacaatacataaacaatatacaaactttttcttttctttttgtttttttgagatggaacttaattatctaccacttgctgggtagctagtgagcgccagctcgatcgacaattctcattagatgcatagcagtatagcccatgtatatatatatctatgaatttagatatatcctatttctagatttatagttagaaattggattttttttttggagcgagtataatcgaattgctgaattgataccttgtcaactccttcgatccgatcaatcaaacctgccatagtcatagtgccgtgatcatatatgtatgaactcccccagatatgcgattaatccaactaactattgcctaaattacttgtatattagccatatcattggcataatgctgtcaacctcttagttagttggattgcaaattaaatgggacatggcacgagcaggtaactatacaaaattttcatcgtcatccacgatccaaccaccagctggtgcaaaaccagcagcttgatatataaattcaggcagtagctgcgccattgctggtattagctagcttctctgcagcctcttccattcctagctagcttgtgcaagagctcgcaacaatgtcgtcgtcgtcgtcgtcgttgaaggccttggtggcgttcatggccgtggccaccgtcgccgagctcgccgccggcagcaagacgtgggccatcaagtgggcctccggcgggaactacggcgactggtcgtccaagaacacggtcgccgtcggcgacagcgtcggtgagtgagcttctccattcctcctccgttcttggcatctggcaacaatggcgtctgagctgatcgatcggcgtgtgtaatgtggcgcagtgttcacgtacgggacgccgcacaccgtcgacgagctgtcggcggcggactacacggcgtgcagcttcgccgccccgctctcgtcggacgccggcggcagcaccaccgtcgtcttcgacaagcccgggacgaggtacttcgcctgttcgtccgggtcgcactgcagcatgggccagaaggtggccatcacggtctccaactcgacggcgccgccgtcgtcgtccaagggcggctcgtcgtcgtacggcgcggcggccggcggcggcgccgagctcgcctccaagctggtggtgggcctcgcagtcggcgccggcgccattcttgcgctctgaacatgaactcgatcgtctctgaattattggcagcatttccgtcgtttgagatctttgcgttgcggtgttcctatttgtgtaatgtgcagtggattcccttttgttatgatcttgttttttgtatgcatattttcttgaatgaatttagtagttatgcttgattacacaaaatcagaacttgtctaatgaaaattttacacagcatcgctagcacttcacaaatttgacttctacatattgtaaaaaaaatatcaaatttgaatttgcatgcttgtgcagtgaaatatcacatattaatccatcctgcaatgacagtttttttttacatttttttaataattatttaaataacatcgcaagaaacgaagggcatctccttaaagggcgaaaaagacttccccatcacaatcataggagtaacagtttgtactttgtaatgcattccatcagagaaccaacattaaaattagcatgccatatatatatacacacaaaaaaaggctgcttctgatgtaagacctcctaacatcccattccagcgacggcgaacataatctaattacaaaagctaactaaccctctctgtccaatgatcagagcaattcaaaagacatggcatcacccatggtgaggaacatcgggtgcataaattaatggtgctaaggctttgtcatcagctatagctgataggactatgtcagtcttgctacgacaaaattcaccagctagctccacaaaaggatcatgagctgccctcatattccgaatagatattggagatcatctatggtgagccgagttgcactgccgccaggtttgtcctcaccaaaagcagattggaccatctttctcttcttctcctggcaagagaacataaaagttgtgttgacaaaaatggagagtaaaaaagaaaacatgcacaagcatggtgacactgtctaaaatgaattgatcaccagtctagctccaaagcatgtccaattatttaacaacccttacaatcgagagaatcgaaaaaaaatgcatgaaattgcctacatgatttcagctactttgtaaaaaaggtaaacctcatattagtttcaagaaaaaaatacatgctaaccagtatacgcaagaatggaaaattttcattttgtagaaatgcatctttaactgatgaagttaaatatgttcagttcatatcctacatccagacgactaatgaagtgcataccatctaaaagaagaaaggctcatgcttttgaaatgaaaatgtaacagccaaaatgatacctgtagagctaaaatccgatcttccactgtgtctttgatagttaagcgggaaacggttacaggacgggtctgaccaattctgtgtgctctatcaactgcctggtcctcagcataagggttccaccatggatcaatcataatcacatggcaagcagctaccatgttgagaccaagatttccagccttaagtgacatgagcatcactctcacctgaagaatgaaatttagttatatttgttgaccatctacatgtaacatcaaaaaaaagaagatagagatgaagggcgtcagaaaagtacctctggatcagtgttgaattctctcactgctgcttctcttaagttgagagacattgcaccatcaagccttctgaattttatacggctgctatccagcgaaagctccagcaagtccagcaagccagtccactgggagaatactatcgccttagaaggggctacttcacttggacttgattccatagtatcactccaagttagagcaggtgtattcacgattgagttaagtatgtcagtggttgccctgatcttagaagatatgtaactgctttcacagattgatggagagccatctgcttctacagaactactagttgttgcaccagactccaatttatcagctatacaaaaccttaacactccaggtgaaaaaactgtttgagcgcttaatttcttcccacaagaaggggagggacagacattctcatcacttgttaagctcttatgcacacactgataacagaaaacatgaccacatgttgctacaacaacatcctcaggtgggtcctgcaaaacgcgcagaaatcaaattaccgtagttatcttagtatccatggagtaacaaacagttcagataaaattaaactactgattgtttaatcacacacacatgacagttcagataaaattaaaccactgattgtttaatcacacacacatgacaatcctgttctgatatccttattttgctttttcataaaagaaactattcgaagataatgtaatactatttttttgcatgtacagtatgtgattagattgcttacactgcatctggaacaaattgcatagtctccttccagctgtccaagcaaatttatcactgtttccttaggaagtttgtttgccacttctacagaaccagtatcaatcaaatctttttcctttcccttcaaaagaagaggatggtcacaagcctgccgaagtcgcagcagcaatacaagaatgtttgcaaaattttctcttatcgtcccagcagaagcatattcctgtagtatgaacatggagtataaacattttgcattgaaatttctgaactactgcaaatattttgaaaaagaaaagtaatcacactgaacatggtaaactattgactagcaaacctacttgtgcttacgaagataaatgtaaaaacttggcttctgttcattaaaagtaaaaccttcacaattgctgtgggcacaatacagctaagtgttcatcggataagacaagagtagaaaacaaaatgtatggagtattgatatggtgctattctaagaccttgcagcaacaactgagttaggaataaatcaaaaccgagcatatctaagttcaaataatgagtatctagagaacggacagtatctatctatgcaccataactgccgatcgctttttcatttaagatctaatagttgacatagtaatgcaatattttcgatagaaaaaaaaagaggcaaaattgaagtggccataccttgaacttttccctagaaccttcttcaagcatcatatagaaagttcgctcctcttttgagaagtctattttgctcagctgaatcgtttttggtggcaattttatgattggttctccatcgattagtgtttctgtatttgaacagtccaaaaaatagattaattagacaacatcagaaccagtgaaaacaaaaaaacagccatatgcactgaaactgaaagcacatcttacaaatttaagatatgcaaccaagtattgaagctgaaaacatcaactcaagcaacatataaataaacagaatgttacggggtactcaatatgattccacccaaaaagatagtactctttcaattatgtttcccaccttcacaaattccagattttcagatgtatttcatgacttccataaaatgctagagatccaagataagaggttgcatttttccaagtaaaagttgattttgccatgatatcgtattatcatatatattagctccagcacacacatatataatgaatgaatcaatatcaatatttttaaattttcatagttgtgagtaataccaacgattattgtcaggaattagtaagcatcagaggcaatgggatgtgggtttcatatagcagataactaaaaggtacaaagttgcagacacatatgcagtcatgattttctattttaccttttgtgcgccgcaacagaactatcttcaagacagcttggagtttcttatatccacgagttgcatctctagaaatttggtattttatcatagagcgaaaggaaccatacacagaatatggttcatacttcaagaaacggaaataactatacagatcatcaattgtattttgtataggagttcctgataaacaccatctccgttttgctctcagtccacaacaggctctagccacttgagtattgtgattctttattgtttgagcttcatcaagcacaactctgaaccatcgcactctggcaagtggtccaccatcaaggtcagcatctgaatttttgggtttctttttcttctttggttcgctgtctttctttcttttattgccaatagaaaatgctggacataacccatatgtttcgctgttcttttcctccatatcctcatcaaagttttgtttgggtacctcattggctacaatagtgtatgtggtgacaacaacatcatattttgtcaactcagttggatctttagtccttgaacctccatgataaaccaaaacagacaatttagaactttcagtaaccttggcagccaactcactagcccactgtctaagaacgctggctggacacaccactagtgttcccgcagttgatctattagcagacctcaaagttgacgaaggcgatggtctcactctagccttcttcttgggttcaactttgacagcatttaccattctatcaacagcagaccccggtagactagcccagggcttcagatctgcggcatcacttgctgcttctgatgatggaaacagtgttgaatcctgtagcatattcacagattcacccttcagttgcttcttgtccatgactatcactacttcatcatcctcatcaaggttagctacagatttcatgctgcccacatcagcagacatgaacttagactgctcaaccctctccttttgtataagggcaatagttgatattgtcttcccaagaccctgcgtcacataaagttatgtccctataagataggggatccagtaaaacaagtaacagttatcaaggtagaaaatagaactaacctgatcgtctgccaaaattccacctgaacaatgtgagctattctccctggaaaccatccaagctaatgctattctctttcaataatgaagaacatagcagtgaacaggatcagtagaataaatagaattatcacacaaccaagattttcaaaatataaactttacctggtgcttaaggagtgatactgacataacaccttcaggcaaattttcttccgttgtttcttgactgatttgctgcacaatatatttttttgttttaaaaaggtataatccacagtaagtacaataaaattgaatcaccacacaattatattctataccttcagggcttcatcatacaccaccctctcatcacggccaaaaagcctcttttctatatttaagtggctctgagtgccaaggccattgactccaaaattgttaacagaattgttgtatggcactgatggaggaaagatcctatgtgagtttagacctccatatgcagagacaccacctgcaagtttcaaacagagagaaaaaaattactaatatcgcattttatactagtaaaactatttttatgtgatcacccatcagaatatttgagggaattatggtacatgaacatcatcattatcagttttaacttttcagttgctattaataggtagcttccaacctgttgacattgcagatgtaggcatctcgattccataggcagaacttgtttgaaaaccattgtacttccaagtggattcttcctcgatcttcttgtcacctaaactcgaatgactgaacggaaatggttgatgcagaacctcatagacatcatctgacaggtttcaaaagggaaaaactttagttgtactaatcgcaagttacagcagtatacttttcaagttaatcaaggatagttctactcaccgtcatcatcatcaattgaaacaccctggccataactaacatatggcttgtagccacttgcaatagcaggtgaagggaacccaattccattatagtgcacagtgttaggcttcacagtggggtgtgtactttcaacattgttacctcctgttagagaaagtggacgagacttgtaactgctgctcatgaaggtatgtggaagagtcctgtattgccaagcactattctgacagtcagtgttgacaccgctgctgctttcaataatgtctgatctattctcagcaggtctatgagaggataaagcatgagtgttgtttaaccagttatcgtcatccagcccgactagtagttctgaactattattgccaaatgctgtgttgtgcaaaaccacctggttaacaccatcattgggatcgtcaaaatcaagattgtcttctgtatctgagtacgggctgaagtactcttcactgtctgaacacaagtcaataatatccatattgtgctagcaaacatgggcatcaactctctgttgtcagatatctgcgatgcttagcttcactaatccccaacaagcctggtcagaccacactatctccagcacactgcaaacaaattatcttgatgaacccacttgaatactatcttctgcaaaataatttgtgaattggaagtcagaagtctgaacaaatgatgcattcagtaatttgcagcagtaactgtggtttaattcttcaaggggcactgcaatagcccagataggaaatacaatttcaacttggtgcatacaagggttgcaaataacacctaaaaatatttttttaaaaaaaacacttttttacatcaagaacaatatttgcctaaaccaggcacagtgatgtgcaataaactgatacataaaactatttaaggaagtaaacactaatgcattcctaggctaagtgtattgatcaaaatgcagcaccctattcaaagaaaatcacaaatgaaagattaactattaatccaagggccaaaattttgaaagaaggaagaattgtcacaacatgaactgagtgtgccatcacgcaagcatcgccttcgacaaggaacggcaaagccaactccacaacaatcaaacaattcgactacaggaatgcacaaccctaatcaagcccacgatcgcttaaaacttccccccaaaaccgcccaatccaccaaaaccctacctaagcgaaatccgcccaaagccaccgccttctcctcctcaaaaatgatccgccgcaatcaaaatctcccgcaaatcgcaacaaccctctcacacctccccgaaacaaaacatctcacaaaagcattccatccatttgaaccaaaaccgctaataaccccaaagaaagaaaccagtcttgcaagagagagtagtaaagaagttacctcctccgaatcgtcgtcgtcggcggcgattatccgttggagggatcgaaggcggcggggagcacacgaatcaaatcaaatcaaaatcaaccaaatttctttttgaggggaactgcgtggagattttatctggttcgtgacggccgcgcggcggccgaatcggaaaaactctctctcgcaaagacgagtgggaaacctgggacttatcaaggcgtcgccggtttctccgggggcgcgctcgtgtgtggctgacgcgtggggcccacgtgccgggccccacgtgtcagtgggcgcgggcgagcgggaaagggtggaaatttcgattggttcgcggcttgaaatcgtcgtggaggtgccttgtgttggaaggaaacgggtcgtgtgtgttttaaattgtttttttctcaacgcaaagtatgatgcggtttcggaagaaattcctcggaaattcagatggccccacctgtcagtggctattgggcgttgcaacgggggctgtcaacccctgaaaaatcgactgatattttgaaaggaggaaacgaataagtaattgcaacggtaaaattatcttgttaccgttcaaagaaaaatctcttgttagcaatagcattcggactaaccatcattatcaacgcccatgatcttagttaattgggcattaacatcggacggtcctggtttactgatcgattttttgctgtgctgcaacttgcaactaagcagatataaacagccacgaggattattaaaaacaatataaaacaagagaggattagagtaataagcccttgtttagttctcaactttctcttgaaacttctagcttttccatcacatcaaaaattttctacactcataaactttcaatttttttcttcaatctttcaattttagtcaaacttctaattttgacgtggaaccaaacacaccctaatatacttattttgcacggactactacaggtcttcaaagatgagcactaagggtatgtttagtttttaaacaaaaattttcacgctgacacatcgaatgtttcgacacatgcatggagtattaaatatagacaaaaacaaaaaccaattacacagttcattaggaaaatgcgagatgaatcttttaagcctaattgcgccatgatttgacaatgtggtgctacagtaaacatttactattgactgattaattaggcttaataaatttgtctcgtaatttataatttattttgttattagactacgtttaatacttcaaatgtgtatttgtataaccgatgtgacatgcatggataaaattttttgccaactaaacaagccctaaacacatgaaccgaagaacacttggaatcaaaatcgttatttatatccaaccaaaatgatcatcaacggcacagaaggctagaccagcttaaaatgcagaaactcaaaactgtagaaataattcacagccatcatagtatttcaaattcagaagaagaaaaatacaacagaaaaaaaaaagaagaaaaaaaatatactccgaagcgacttgctttcacccatgggccggggcgaggcccactgcgaacgggctgggcggcccaaggtacggcatgctcgccgtcggcggcgcggccgacgaagcagaggcgacgccggggaacgcggccacggccggctccgtcagcgggacgccgggcggcgtgtcgccggcgccggaggtggccgggagagggtcgccgccgccgccgccgccgccgtaggccggctggagctggcagtcgggccaccggcagtccggctggaccttccgctcgccccacgtccggtgggccagcccgaagcccaggacgaggcccactacgatgagcgccgccgcgaggcacaggaagatcttggtcgccttccccacgtagcagcacattgcaaagctaagctcgtcgtcttcttcttcttcctcctctccggcgagctcgtccggccaccgctctctcacccacaattcacaaagagcatgcgatgcaacgccgcagccgcactcgcagcagagagcacgagaggggaagagaatgaggctggagagagagagcaatggcgagagggatccagctccaactccaactcgcctcgcgtttttggcggtggtgctggctgtcggctttgcactcgtgcgaggcttcacgtgaaggagagagagagatggagatatagagaggttcgttagtatcacgacctaatcatcatattattaaagtgaaatgatcaccatcggtgactgcatgtttctgaacattttaatctcttttgcagtcagtgcagctcactgttcagttagtcagtgttgtatatatgaacagcagaaaacatactacagtaaagttagaaattcagattatggcaagtctcgtttctgcagtttattccagtaagtcagctctgcatcgatctaactaactcaggtacaaacaatagttgctatcatatcacacctaaacttgtctgctgttagtgataggagatgcactactctgccgacacatctagtaaaaaggtagtaattgattgaaggtaattaactggagtctgggacaagatgataaatgaagtgtacaagttcagaataatgctacagtgggtcttcagagaattggatggtgcaggttatgtggtgagggtccatggtgttggtccaataattctcttacttttatttctcttttgcccttttttccccttagcttttaatactctcattttggatgattgaatagtggagcacaaagatgaaggaaggcctcaagacaaccagtggcatgtccatagttggtcacatgttgcactgggccaaagaccagcttgcattttttgttcattcctaggtgtggttaggtatgcagctttaggttagagccttttatgatgcaaattcttttgattgaaatgcagagcttttgctaagctaatcattaattagtagtaccctgcaacagcaagataacggtacaacctactaacatgatctgcagattttacaatgaataaatcagctgctcgtgacacttgcttacacctggggatgtgcactttctgcggtggctgcagagatcatggcaatttttatagctcatcgtcagagtacgctttggaactacaccatccatcatcatgtgaagtgaaaaggcaaagcactactaggcatgccagatactgtcaacaaatctttttagtctaaactctgaagtctgaaccacatatttttcaactggaaacacatgtaagtaaatttcatagagcatggtaaagccacagctgcagcctgcagaacaaactaccgcaaggcacaagcctatcagttcaaagggacaccattcagagtcacaggagcaaagctagaatgtacacatggacgcatttttccggacctgaccaagaagcacccacggtcacagagaagtttctgaagataaaggcaacatctatatatctattccaccactatatcaggaggagcagtaactccaaaggactcagcagaagcgtccaccatcttcttgacctcatctgggttggcaccaacaatcttgttcaccacctccttgtccttgatgagaaaaaatgtcggcatggccttcactccaagcttggacgaaacactctgcatgcacacggtatatgatatagcagcttggctcagtaaactaatttaatgagcatatatgcatagcagttttgtaacaaatggttatgccatgatattcagtagaaacaattgaacatcaaagatgaaagctccgaagtctaaggacattttctagacaactctatgtgaaattatcagtttaggcatccactttctctactttctattcctcaaaagacacttcgctttcagaattcagaacaactcagagaaaatacgaccatgggatgtattccaaaaatacatgcataaacaacacgtcatgagaccaaaaataggagaatggtttccttctttaaaaaaaaaacagagagaatggttacctggacatcatcaacatccacatagaggaacagtatctcagggtgtgtctgagctagctcctcaaacttgtagttcatggacagcgaagtcacacaccatgaagccccaaagtgggcaacaacctacacaaagtcgaggggtcaataaccaagttaacttctgagtgagtaaaaagaaatttctggtgcaactgcagcggataattatcatcaggaaaattttcaatttggaactcagtttgtcaattacagttacagtgaaagaaaaacgagaaagacccagaaagaacgaaaagaacatgattacagaaatcaggttgcatgaagcatccatccccacaaactattatacatatatcgttctaacaaaattataatctacaaacagcaattacaaaaatcgtgggccgaccaaaatatgacttgagaataaacaacatcaatattcatcatgagagacaaagcaggaaagatgtgggggaagcccggcgaaaaaaaaagaggtgggggaagaacaaggcaaggaagaaaaaacccacagggtggccttcgttgcttgcttgattgacgaacagatcccatgactcctccttctcaaccttcacaactttggaattgccaacccccttctgctgctggatctccatatggcctaagaagcaagaacagaaccctctccctttcactccgtgttcttggtctcctcctcctccttgctcctttccccaagaccccaacaagaagagaacaaaattatcacagactgtctacaggaaagagaagtggcaatcctcctgaagattagataagcatggggatttatattctaaagctggtgggtcctgccttattttggctggtagtttcttctggagtcagtatcctatgcagtacttcaaaagctatgagcttatatcaaccacataaaagatatgcccaacgggaataagggccgtgatgcagaaagggtagcaaattaatagagagcttatctcctagtggaaaaggaatgcttatcaggtgggtactagctctgaaatggtaacgtattctacatgagctggtcaatttattagcaatacaacaaattgtggatgttagaacatattggagatggtaaattacaaagcgatgtttttgtgttcctagctccttgaaatcggatatatcataaagtatcatcattttgcagagcgcacctactgcaatttccatatatttcttattgcaataatcgaataacaaagaacaataagtttgtattctcccgctctagagtaataagttttgcatgtggcaaccttgcaataacatccagtttaaagctaccaagtgaacaaattaggagatccatacggaagggaaaacgtagcttgttttacttaaggtagcacacatgtcacagaatcacctcaaaaacatggactgcctgaggttagaagattagtttgctgccattcctagaattcctgcaaagcaagtaataactgtgaattgtcattttctgcgttaactaaaagtagagacgagaccaagaaatttacaagtctggatgtgttcaaatttgatggacatcatagtaacttcatataaaatatctcttactcagaaaaataaataaaaaataaaaaatctcaagttcagtgttacggtttagttgaagactttgatactgaacagaaccatgagaaattaatccagtctctaggagagctttggcaagtttaatcgtttcaacaagatttggggtttaactgctctcacttatgaaaaaaaaaacagctttttgagagaggaaaccctctagaagttcccttgttccttcaagcaggccacgagtccagaatacttgaaaaagaaagataacatgatgatttgatatggtgcgagtttaataccaacaaccctatccattggtggtcctaattaaaaaaaaaaggtgatggcaaacagacatgccaaaatcaatcatacaaaaaaagaactaccaaaaagagatttatattccaatcccccattagcttgccaaccatggtgactgtagacggtagatacacaaaacctagaaagaaagggggaaaaaagcaccgatgaattgcaaaaccacacgcaatttctcacagcagtgaaacagaccactgatctacaaagattgaagcgtgcgagctgtgaatcaattggaagtacacgatgtagcatagcgtagcatagcatagcatagcgccattctactcaaaactactacacacgatttacttcgattcgagcatgtgggaagtggtaaaaggagatggaaactacagagggttttaacctgaacccgacaaccaaactccacgcacaccacgcacgcatacggaagaaggatccgaccactccgcgggctggggggcagcaaaaccggggattccggtagggaaggggagcgccgcagtcgcagatgagaagactggtggcggaacgccggaaaaagccgcgtccgaaggcctctgatcttcttgtgatgggctagctggcaatcgcatagtgggggcacctctctcattctcgcttttccttttttttttatttaagaaaatagatttactacttcctccgttctaaaatataatcatttttagaattcatagctaaaagttactgtattttgagacggatatagtcattgaacggattatgcaacggataggagcatatacttgcatataggaataaattaaatattttaaaaaataaatttaataatgacttcctctgtcctaacatggaggatacttccaaatgaatcctagtaatattttgagatagatgaagtagtttaaaataagtgatccggaagaaaatgatctgacacatatattaaatatcttaaaggtgctggattagctatcttaggcctcctccaacaaggatgagtcagctagctcataaatctccacatcagcttttgtatgatgtagaagagagagaagataaggagagagagtgcactatctcttcttcaagagctaagctcctaaacaaaatatgagaggggttgtggaacccaaagcattttgaacaatgtgctatgagacaacctattaaaaaggtaggctttttgctatctcttgtatgaggtggacaagcatgagctagtgcactagctcaaccattgaaggaggccttaaaggtgctagattagctgctctcctagcgatttggagaggcgcatccaatacggtgtggacacgttgtttcgttacagtggtcctgctaccatgggccagctgattgtttggcccagcgaccgacggccttttactggccatcgtggcatcggtggcgcggccttgcgtcgtcgtggtttggctgtatgctcagccatccgcgagccaccgctaccgtcttgacgcgtgcccattctccaacccatgtccggctaggattgagcgaaggctgtgtttctcgtccgctccgcttcagcgaatcggcaccgccgcgtgtcggccatcagcgagacagcgacacctccaaggctccaatgcccagcagcccctctctcatccatggtagtgctctgtcatggtgtacgggaatgacagggttggctgctccactaaaaatacgcgcggagacccccatgaggagcagatcgagggtacctgcatcgctcctttctttctttcattcgaagctggttctgttccttacttcttcctcttagttcctgttttttgtggagacggtactttccctagtcgcatcatcccgtatgctttgatctttttcagttgtgcttcgctctggatttcaccattgtgatgtcgatgttcttctgaccatgcctatgctcattgattttgatttttgttttctgccttctaggttgcgcggccaacccttaccgagacgtggttttactgctcgccgagccatccgcgttgcccccttccacttctcggcatccgctcgtcgtcgtcctctccgcatccgcatctcttcccaatttgtttgttcccctttatgttcttcactgtggctgcacgtacaacaagcttgaatagcatcacatactccccatcccgtcctcagcatcggcgtgccgcatggcatcgcagcgtcgccttcttcttcggcatcaaggtcgactcggtggctcactgctagcacagatggcgggcggggagtggatctttcaattcttcctcagcgacttgcccgacggtgttgctagctgacacaaccatttcctcaatggcagaaatcggcgtacggtctacctgtcctcctccggtacggtttcccttctcttatctctcatctagcataaattgaagataatgttctgaatttaggctaaatttatcagatgtttgtttgggaagttcgttcaaagattcagatagaacccagcacatttccgaatattggtgcctccagatttctctctctatttcttttttaaatgttgccttctgataattcgaactctgcgccaattcctcttatggaaagagagtcgatgtgatgtcatgaggcaaaacatgaactggtgagcttccctgaaacctgttgattccctggcaacattgatgttttattaggatgaattctcacattaatagcttccttccattagggctttcaatgttctaaacttttttttagagaaatcatgttctaaacttttgattggtgaaagaagttacaattactaaggagctctcatcctctcctgcgaatgagattctattcatttttctgttcctgtactttaagcatgtcagtatgccactacttcattgtccaaaactgagctccaaagaaaggtcaaagtggccagcttaggattaaaacaagtttagcagaatcttcttacacaaattatttggtgtttttcagcatacaggtaaacagacggctagacttcatgatacatgctaatgttgggaggggcaagccactatgctcagctcatggatcttcaggaacggagctgccagcatattactgacaaacaaatacaaggtaaataggcagaagagatccttcatgtgctttgctctccgatgttctccgtagagaaaagaaaagttaatcatttcaattatttatttttattcattaattatatgtaattagtaaattgttgtgttgtatatgtgttaccattttgacaaaaaaaagagcactccgattgatcattttctgaaccatacaggaaaaatactccatgcttttgtatgagctgttcttagtctcttatagaatgtgctgtggtcttaatctctgaaggctgagctgtgttagattggagcactccgatccaactcttttgcccaccaaatcaacttaccaatgcctgttagatagatctctctccccttgagcccaacggctcaagggggccttgaccgcgccctgatcgggggcgcccagcccaatggctggtgggcccccgtcacactgcgccatataaaagaggggtggaggccggcacggcacatggtacgagattcaccgccgccgccaactccaccctacaaaccctaatccgatcgagagggggcgcagccagtgacgggaagcgccaccgccgcgccagacctcatcgccgggacatctacgaccgtcactcccgcagccgtcatcgccgtcgacctcaccggcgccgcatccacgacaaccgagcgccaacgacgacgatggccggcacttcttcatcctccaacacctcaaccggtcggtctatctaaaccctctcccgttttcaatctctatagttcaaacatcaaacccaaatagaaccacccgactagatctaacctaggtgatcctagtgcaaagtttaacaatggtatcagagcaaccctagtgtttagatcgtttcggggaaagaaatccaaagaaagaaaagcacaagatccgcacggatcaaaagaaccaaaaaccctaaccctaattcttacctcgtcgccggccgtcgtcgacgccggcaacggagggggggaggggcaaagaggcgccgcctaggagccactcgacggccgcgcgcgcacctgcacgcgcgtgccggcgagggggcccgcggcggcgccgccatctccgtcgtcgccatctctctctcacacggtgggggttagagacggtggggggagcggagaagagaaaagaaaggagcgccggccatggcgcggcggcgcgagggccgccggcgtcggcgacgccgctcggcgcgaccgcgcccgcccgagagagagaaagagaggagaagctagggttttcggcggccggccgggagaggggggtttttgatcctccgatctcggcgcccggccgtccgatcgcaaaccctagctgatcggacggccggcggcggccggaccgaaatcggcccaagtggggagcgcgcggcggcggctttcccggcccaggcccaggttgcggcctgggggaggggagggggcgcttgcccgcgcgcaaagtggccataggccgaccggcaaaggccggaacaaagtccatataaggtccctccggggccgaaaatgaataaaagagaacagtagcaatttttccattttattttgtcgatttttcatgcaaatttcaatagaattttgaatagatttttgcatgttttacctctgtttaaatttgaaccaacgggagaattttcacagagagagaattacagagattttgctactgttcatatgattttatatagtcttccgctgcaaatagatgaaattgatgaaaattagtgtttctaaaattaaatttcgaaccaacgggagaatttaattttaggaacattaattatgtgctatgatgttgtaattttctgaccaacgttgttaattgcaatattatagttatggttatatgtgttatgtctaattctgcccaacggtgatgtaggcttaatgcataatattttaatgttaattttgttctcaccgcacatgattatttcaggtggctactccttgatgggttgcattaaagatattccgaccctaaaaggagataactacgcagaatggaaaagaaaactcgaccttgcttttatcttgggagaggtggactgggtattgactaccccatgtcctatagaacctgctgaccttgtcagaggtgaaaatgagtcagatgctgactggcaaaagagacagagggacaatgctcctctcgtcatgtcgtatgacattgaacaaaagaaatggtccttagccaacaagaaatgtttggctgtggtaaagaatacgattgagcctaccatattgggctcgatcccagagtgtgacgctgtctcagagtaccttgaaagaataaagagtcagtttactggctcttcaaagacttatgctacacagctgatcaagcagcttgtgacagaaaggtacaatggaggtggtgttagagaccacatacttagaatgagcaacatggcttccaagttgaagccaatggatttgggcataacagatgactttctggtccatctggttatggcctcattgccaaagcagtttgacaattttattgtcaactacaacataagtccagagaaatggaactttgagaagctcattgctaattgtgtgcaagaggaggagagaatcaaagaatcaaatggtggttcaataaactatgttaaagataagaaaaagaaccacaagtctcccacctcaaaaggtaaacagtctcagcatctgcctcagcaacaacagttcgctgttgagaaagatcaatgtctccactgcaagaagacaggacactacaagaaagattgtcctgattttttgaaaatgatcatggcaaagaaaggtgagaacattattacatttgtaaatgaatctcattatgttggttactctagatccacatggtggattgattctggagcaactattcatgcttgtaattgtttaaaggcattccgttcgacgaggactacgcaaagaagagaaagcaccattagagttgccaatggagttgaagaaaaagttgaagctgttggagatcttcctctagagctcgcgaatggcttcatacttttacttcgagatgtcttttatgttccttctttgcaaagaaacttaataagtgtatcaaagttggattttgatggatatgattgccgctttggaagtggcaaatgtgaactatggcataataatgcatgtattggtcttgctgtgttgcgagacgagctttatttgttatctctttctgagaatgtgaatgttgtgtcctcgttgacaaaagaaaacaagaaaagaaagcgaactcccgatgtctcatcgaaattatggcactgtcgtttgggccatatttcgagggggagaattgagagactagttaagaatgaaattcttcctccattggagttctcagacttagaacaatgcatagaatgcattaaaggaaaatttgtaaagagcatcaaaaagggtgcaaaacgaagcgcaggaattttagagatcattcatacagatatttgtggtccatttcctgtgaaaagtgtggatggctatgactcgttcataacattcacagatgattactcccgctatggttatatttatccaattaaagagcgatcagaagcattggataaatttaagatattcaaagctgaagttgaaaatcagcatgatataaagattaaagtagtaagatctgaccgtgggggggagtactatggtcgacatacgccttatgggcaagtccctggaccttttgcaaggttcttgctagagaatggaatagtagcccagtattcaacaccgggcgaacctcaacagaatggggtagctgaaaggcgcaaccgtacccttatggatatggcgcgcagcatgatgagctactccacactaccactcggtttatggatggaggcgttaaaaaccgccattcatattctcaacagagttccaagcaaatcggtgcccaaaacaccgtatgagctatggacagggagagtaccctcgctaactcacctccgtgtgtgggggagtcctgcagaggccaaagtatttaacccaaatattgggaagttggaccccaaaacagtcagttgccattttattggctatcctgaaagatcaaaaggctatcgtttctactgtccaaacagttatacaaagtttgtagaaacgagacacgccgtcttcttggaagacgaaatgattagggggagctcggtagttcgagaaattgatcttgaggagaggcgggtgtctgtacccgctccgtcgactcaggaacctttcttctctctacctgctgatgttgtgcctgcaatgcctgtcattgaggtaccagcacctgttgttacccctcctgtggcaacaatgaatgagagtgaggaacctgttatacaggattcaacagaaatggttgccacgccagaggaggagctacaacagcctcaaatagataatgtgccagtacaggagactcatcaagagcctcaggtacaggatgtgccaaatgtgcaggcccctagaaggtctgaaagagtcagaagatcggctatccgtgatgactataaagtttataatatagaagagtcgcatatggaggatgatcccacctcatatgaagaggccatgagaagcgctcgctcatctgaatggttggaagccatgaaagatgaaatgaaatcaatgaaactaaacgatgtttgggatttagaagaaattcctaaaggagccaaaacagtaggctgtaaatgggtctacaaaaccaaatatgactccagagggaatatagaaaagtttaaagcgcgacttgtggcaaaaggcttcacgcaacgagaagggattgattacaatgagacattttctccagtctcttgtaaagattccttcaggattataatggcactagtggcacattatgatttggaattacatcagatggatgtaaaaacggcatttctaaatggagatttggaggaaaaagtatacatggcgcaaccaaaaggttttgtcatgaaaggaaacgaaaatatgggatgtcgtctaaagagatccatttatggattaaagcaagcttcgagacagtggtacttgaagtttgatgggacaataaagaaatttgggtttcaagagaatgtcgaggacaactgtatttattcaaagtttaagaatgggagatttattttcctaattctgtatgtggatgacattctactggctagtagtgatgtcagtctactgcaggaaacaaagaaattcttgtcctcaaactttgacatgaaagacctcggtgaggcttcatatgttttgggcatagagattcaccgagatagaacaaagtatgcattgggactttctcaaaagacatatatagaaaaggtgttgaagaaattcaacatgtacagatgcagtgctacacctgctcctataatgaaaggcgaaaagtatggggcatcgcaatgtcccagaaatcagtatgagctcaatgaaatgaaaacaaagccatatgcgtcagctgtaggaagcctacagtacgcgcaagtgtgcacacgacctgacttggcatttgttaccgggttacttggcagatttcagagtaatccaggcctagagcactggaaattggtaaagaaagtcttgcgttatttgcaaggaacaaaaggcctcatgctgtcttacagaagatcagaatcactccagatagtggggtactcagattctgactttgcaaaagataatacaaagtcaacatcgggatacgtgtttaccctggcaggaggagctatttcatggaaaagctcaaaacagactatcactgcagggtctactatgtatgccgagtttatagcatgctatgaggcaacggggcaggtgaactggctaaagaagttcatacccggtttaaaggtggttgacagtattgagaaaccactaaagttatactgcgacaacgaacccgcagtaatgtacactcacaacaatcagtcaagtggtgctgccaaacacattgacataaagtactatgttgtgaaggacaaagtccgggatcaaacaatcagtctcgagcacattaaaacagaaaggatgctcgcggatccgctcacgaaaggcctaccacccaacgtgttcaaggaacatgtagccggcatgggtttaagggaagccttatgaatcctggactacagggcccaaaagtaaagtatctgtttctgaatagagatgtgtatagtggctgtcgaatccatcggcgattgaccgtgacgatgaaacatgctctatttacaaatctgtgatggaatagaaaaagctaaaagaaaaagtgagatcaagggggagaatgttagatagatctctctccccttgagcccaacggctcaagagggccttgaccgcgccctgatcgggggcgcccagcccaatggctggtgggcccccgtcacactgcgccatataaaagaggggtggaggccggcacggcacatggtacgagattcaccgccgccgccaactccaccctacaaaccctaatccgatcgagagggggcgcagccagtgacgggaagcgccaccgccgcgccagacctcatcgccgggacatctacgaccgtcactcccgcagccgtcatcgccgtcgacctcaccggcgccgcatccacgacaaccgagcgccaacgacgacgatggccggcacttcttcatcctccaacacctcaaccggtcggtctatctaaaccctctcccgttttcaatctctatagttcaaacatcaaacccaaatagaaccacccgactagatctaacctaggtgatcctagtgcaaagtttaacaatgccaagccaattgagtgcagcaaagcacaaacaatatggtctttatagcctgtgcagatatagctcttccattggtgtgttctgccaccacatcacttccaaagttgtttccaagctaaaaatcatgctgcagtggtggttcaatcccacacttgaataattggtgtttcctgcactgatgtagtagtgactgccttttctcacttgcataattgatgtacttcgctcacttttttatcttaacatatttcataatatcatatagattctcctcaaggactgcgacaagattgaagctcatgcttagcaggaaaaccattttttttttacggaaagcaggaaaaccatttgaaatacctatggaaatatccctacacatgtgttaaccatgatgatctttttcttttcgaaatactgtaaggcaggtatatccatcatctttgtcatctacaactgccttagctatacaaatattcaactctcaaagtagtttggtagctaattaatcagacaggtgatgtaaatgtatacatcgtccattgattcacagtggatactcagttgttgcatttaaatgtctcttttcaggaaccataagttcatttacatggctattttaagagtccactgctctgattagtaacataacactgactgaaatgaggatctgttcattaatttgagtttcttctactgactcagtaacatctctccatgtgctgacttaattctccaaactttgagttctactgacttagtaacatctctcaatatgctaagttaattctccaaactattaacttaggaatgatttaacttggcacatattttcttagtgttcaagaaatgattttagcagatgcttgccattgcacctggtgatctaagttgactgaattgctgaggcggatatgtttcttgaacagaaagttctcatagtgaagtgtcaagtctcttcttaaaactaatgaatctgaaatatgtagtcggtctttcataccatagttgataaatgcaatactattgtctcatctgactgggtttttggccagttctagagtttacagatattatcttaatactgcagtcctcgcaaacaaaactacgagaaatttaaccatgttccattttcagttagttgacataacgaactgcatcttgtgcccattgatattggatgagtcatactatgcttgccacccctgctatgtattgtgaaattattgtttaaattattaactatcaggaactgtttctggcgacttcagttattaaaaaaaaaactatacaggttaaataatgttcttagtaggtacacaaggaattgactgttgttgttaggtaatcctcttagacaaaccttgcaatcgtacatttctttctgtgcgttacagtcttacatgctacaataccgcgcagcgtagcgcgcgagctcactctagtaatctaaaaagagtatggcctagtccgttaaccatagtgcatcttgaaatcgattggaagaaggaaaaaaaaaaggcatagtccgttcatttctcattgtgatacagtgatactgattttacctcatttttattagcatgtttttcaaactactagacagtgcattttgtgcaactttcttatatagaagttgttttaaattattagataaattattttttaatatttgaagtaataaacctcaattaatcatgtacctgcagttaatcttcgtccaccgcaagttctgtggttctgtggaatatattccaagtttgcaactgaaaaacttcatgagcactgactgcatttgcactgcagttcagtggatgcatcgacggagaatgaatacgcattccatgacagaactaaaacgcagggaaatacagagttacaaatcatatggcacgaaccgatacacatttcgtggcataaccatcattttgatgcaggagccagcagcgaagttctgccgggcaaaagtagtacaccattttggaacccacggttgcatacaaagttactccagaaaatacattgcaatgcagttaatattgctcaaatcagctacaacagaaagaaaacacatgatgcatgcgtgttctcttctgctcacagcgcactagcgcagtgccactctccttcctactgtacaagttacaagaagcaagcggcctcatcagcttcagccaaatgatatccccaatgctgatcgattatcatcacatcatgatggccacagcaacttcagccatagctcagcctggaatcgaaggaccgggcttgtgtgtgccgtcttggtattccgatctcgcaagcatttacccttgaagcgaacctcagtgaacaaatcgtctccccaacggatgatgcctccggagaaatgttgacaaacatcagcgttttggaatcacctccaaggcaaggctgcaatagaaagttgatataagaaatatgtttcaaataaattcagggattgcaggtttttgtattaccatccatttgcacaagtcactcacctgcaaaaggtatgtaagttttgagttcctgaagggcacatgatcgtctcctttcgcaattgcaaagataacatcgctaagagctgacaagcttttattgattgcctgaaacataaagaaaacaaacagataagacaatgtgattatcaaataagaatattgtaaatttgtgatgaacacactcacctgagtttccttcaaacgatcacccgtggagccacttttagcaaggcgttcactgccagctaaatcaatcaagttaaggacaccttggacttgttgcccagtgttctgcattaagatcaaaagaaaattagtgacatacatttgctcaagtttcagtggttctgtttagttagcatgaaaatgaaaaaaaaaatattgtgaccagtttgtaaagtttcagcactgtgattaatattctaaaatatgggtgaagcgagtacctcatttgatccagatatcttcagtgtgaaaacaaaatggctccgggaagattgttcattcatttgggtcctacccacagacctggttcaatgtggtgaaaaaaaatttagactcactgttgatatgtagactaggtggctaacagacacatgtgaattcagataataagtgctagcttgtataaaaggtaaaccctcttatgtttctgctctctctaatatatttgagtgatagatgagagaatcatctagacatatccaaagcattgctatttcaaatataacattaaactgataatggtcaatacccttagagcaaacagttacaaggcacaagtgaatgattaaaaatgaataaagcgtatttacctgctttgggatgctttcgctagaagagaagttacgtcggcgctactaaaaacatcagcaacagtaaggtcagtgacggttgtgttcccttgtggatcatgctttatggtgtattgtttactggtagacagatcaaagttattagaccgaccaggtgctaacaaatcacgaattgtctcattgtatatttccaacattgatgcctgcacataggaaaaactctcagcaacactacatagaatgtacacttcagaatctgcattgcactatggatactaacctgcatactgtacttccatccttgagattcaagagactgacttgtcttaaaaatttgctccaaagaacgaggtatgatgcctttctgatcacgccctggtggacccatcattgtataagttttaccagaccctgtttgaccataagcaaatatgcaaacctgcatcatgcaaaaataacttaagcataccaaattgacaagtacttcaaaactgaaataaactagaaacatcagtcagagtttcaagataatggtgattatacaaatgcagaatgcaggtgatatatactagaaacatcaatgtaagatgttcacggcttttagcatgtatttgtgcttatgtggtggtgctgaagagataaaatttggggtgccaccatatcaattaaaacaactttcatttgttcttgaaataaaaaaaataaagttaggatatttgagttattagagacaggaacctcatgaacagattattcaccaatacttcattgttgtagtgaaatattcataccttgtacccatcaagtgcactttgaactagttgtgacatttccacaaacacatcttcttgtgaagcaccgtgatcgaaaactttgtcatatgagaaggaaaatctctgacctacatcaacacaaaacaataaaatgaagtctccgattaactttaccactgaaaacttagtgggggaaacatagtttctgtttagcttcaacaatgaatatgattttaccttggttcatcaaatcaataccacgcccggcagattcaactgatgttggatatgaaataagggcttcttctgcaccactagaatcgttgtcttgcaaaagtggtcggaccctacaaaacactctgatgtttcctttaagctcctgcaaatagaaaggctaatcagtaacaagtagcaatagcaagatgaaaaaatttcagtatttactcaaaaatttcttctgtcagtaaaatagagaaattgtttttagtaagaagtgctagtatgctgaaacaattaccaatattgtattgtgcagtttctttcgtagcttgtcagcttcaacaatttgaaattctgcggatgccaaacgttcttccagatcttttattatcaccttttgttcttcatatcctgtcatcgcctcaattgcagtaacatcagcaagctgcaaaagtaaacaattagatcaaatgtcatataatcatatctcacatgtaaatcagcactgacaaaatattatttctaaccttcagtttatttgttgcaactgcaagttgtttctgcaaagtttgaatctgttcttgttgcatactacatgtttcctgagcagaagcataatggtgagccaaatagttgcgcacagaaagtattgatttggttaatctgaaaccactaacctcaaaggctgacacttttacactcaagctttcacagtcttttgtagacttgcctgctagttccttgtaattagcaagctcagcactcaaggtatttacttgagaaacagactgatcacggtcttctctaatttggtgtagctcaattctaaggcaatccacttctttcataagttgttctttcattctaatggcctcttgttgagaagtctaacagaaatcaaaacaattaaatgtttaagtgaaacaagaactatactgcccaaaaaaattatcaattcacgaaaaaacacaactcaccctagaagaatccaaatggttcttcattgaattgtttaaatctttcagagaagccattgtttccatcatggcactcttctctttttgcagttttgagatgatgtccccactcttagaggcatcagcttgaagattactgttgtattgctgcaagctggtgttgtactcctgcagtcttttgttcgtgtcttggaccattttcagctagttcacaatttccatccatcagaaaggaacattatatatgactcaaattcatgtaagactaatagaacatttctgaacacgtacttgctcactaaaccgttttgcttcatggctgactctttccaggtccaccgacagcaagtcgagggacgcctcagccgattccctttgctgcctctccttctcgtaggactccacagcaagctgccagtttaaaggtcaacaagtgtaagccgtggctgaaaccaatcacacaggcacacagcaacagtacataactatgcagcttattatgcgatagatgagttctaaccatcctgtcggccttctccttgttgaagctttcctccaacgaatcgcactgccgcgtcaagttcaggtgtgcagctttcagctcttccagatcactgctaagctgggcctctggaagtacagtaccccaagaacataaatgaccagaataaactcagtcactacgatgagatggtactctgatgaccaaacagcacacatgaatgctcaaaacccaaaagagtaccatcttgttctcttggtgtgatcaaataaatacaaaaaaaagagaagtgcattcgaattcattacccaacttggcgtgctgggcattctctgcatccatcgtactacggagcttctcctgctcgaccaagtagccgtcctccaactcaatgtaccagcggatgcaagctctcagcttcttgatgtactcactcatctgctcagttctcccctgcacaggtccaaccaaattcaggaaacccgccccccaaaaattctcaaacagaacgaacgccaagaaatcccccaaaagaacccaccttgtagtcggtcttgctcttccccttcatcttctcggcgagcagccgctccacatcctccctcccggtgaactcgatcacaggcgccgccggcccagccccgccctcgccgccgtccaccgacgccgtgtcgctgttcgtgccaccgccattgttgattgccgagaggacattgcggcgcgggccaggcttgacccccatcccccgccgcgcgttgcccaagttctccttcttctgcaacaacaacaacaacaaccacaccccacaaatcgcaagaactaagctcccatgaatcaaccctcccccaaaataggcgatttctttccacaaaagagagaaaattaccgggtaagggctacggggcgtgagggaggaggccatgaactgggattagtggcaggattaggggttatagttagggttctctcctcctcagtggtggcggtgggtgggaggaggggagctttcttggggccggatggagtgagctcgaaggcacaagaatctctctctctcgtggcttacaagcgccgacaaagccgcgctttagatccgaaaaacctcgagaaaaaaactgcggagccgatgaaattggggaaggattcgaagtttttgaagccaccgagcggagattaccctcgatttttcatggatttctcgcctcgctcggatctgagcgagagatgtgtgggagaagagagagagagaggaaggagaagaagaggacgaggcggccgagctatttcgaaatattttgaacgctgacgcatcaggggtacccaccccacccctccgatttcgatttatttacacccaatgccactggtgttagtttaaagcccaagccggcggtgaccaggtctaagtggctggccggctcgggcagggtcattcgcgtaatatgattggttagtcaggggtattttcggtatttctgttgaacggtcaacttcgatgttgtgggcttcgagattcgcgtcgccttgggccttgctgataatgggccgggccgggccggggcatgttgcgacgttgctctcctcgttttctttgtccttttcgggaatcaacagcttagaggtgccacgtcttgttattaagcttttgacagctttttcttcctgaaatctcaacgaatagttaagctagcttgtcagtcacctcgcgcactggaacctgagaatgatcggacaatcgacgcgatgctaattagaaatttgctgtttgttagtattagtaaattggtgtctcgtctcgtcaagttgcgagattaggtcttaattgccttgtgccttaccggtttaggttgcgttcggtagagcgtattcaaatcttatttgtcttacgcaatacgagaagatcattagtttataattaattaaatacttaattattatagtttctttaaaagactattttaaaaatatatatagagaagttttttacaaacagtataaaaagcgtgtcatcataagccaacagacagtaactgaaaagagcttaggctcccattggttcctctatatagaattaaccgctgtcaaaatttaaattttagagtttattttaatttttttcattgaacatatctctactattataaaaatttaagatgtttttatcggtattttggtacgtcatatgtgtatacgtcagtttttaagtttgtttgcttttaaaaatatgtatccgtatttgattcggtttttaaaatcgtccacttttggtaatacagaagaaatcatataagaaatttgttttaaaaaacttgcatgctaacttgagatgattagactcctaaatatagctcatgattttctaaaaatatataaagcgaactctcacagtgaatttcattttaactaaaacatataacaataataagattaaaatcgacttcacccgttgtaacgtacgggcatttttttctagtatatagaaaaatttaacctataaactattcttttctaacgcgccgtacgacgtattttcgacaattggcccacagacgagggccttaaagatggatttgtgaagggggtttggtgtaatgatgcttggcgtacgttgtcagctagccatttactatttctggtgctttattagttgggggaaaagagcatgaccgctgctgtcccctctcaaagctcctgagttttttcgccttaaaaccacgtttcgtccttgccaaacgtggtccactgaagtgccagtgctttgttgtttgagtaatcgagttataattggtacagtatctgcgagcttaatacagatgtcaccgctgttctggattgcaatcctgttttgattagggagtgtattgattaccttgtactcctacataatggcaccgatagtggcctagcgatgcccagtgatgcgttctcttgcagttcacgcaaaacgtgacaatggtatagtcgatgttagaccggtgtacctcttgccaagatgtatgtacagtagaacgccgtaccagactaccagtttctgctagctaagcgtacgtttctgattaatgatagattctagaaaaagaaaacaggtcccatatcgatcaagcgggctgatttaatactccctccttctcaaaatgtttccgttgacttttttaaatatgtttgtacatgactccatagaacgatgacgacgacgtctgtgctgcaaccagaaaaatacaagagaagaaacagaggaaaataatggccttcgttttctttttcagaaagcggctcgtagtactgtattttagtataatgtatgtacatgtcccagccgacactgctgcgtatacacggtagcggaagattgacggatcgatcggtcgcgggaaggtgacgcggcgcgcgcatgtaagctcgggcgtcgctagctgccgatcgatcggtcgccgtcgatcgccggagcgggggcagacacagggcgctgctgcgtgacggcgacccggggcatgatcgagtcactcgttcgctcgccaccaaacctggctttgtcacggacgggggcgtcggaaaggaccacgcgaccgtgggggaagagcagaatgaattatgtgcgcgcgcagggcgtgccgccgaaaacgaccgcgcagccgtcgcgcgtcgccgcttgccggtgccgcgcgtggcgggtgggtggggaggagacgctgcgtgatgtcgcgcttgcgccccccgtcgcacggttgaggtcgtgattttcgcgcgatctcacggagaagtcgtcgtgtcgtctcctacgtacgcgcgacgccggcgggggaagcgctggtccggtgggccggctagccgcgaacgattactagccaactgggcctcgtggttcgcgagaggaagaaggccttctttgtttaggcctatgagctggaaagtctaagctcttaaggtgtgtttagttgagctctggctttgaaaaaaatatctgtgggctgtagttttcttaaacgattttgctatatctcactcgaaaatttttttcttatctctcactcgattttctcattcaaatttacagtgcattttcttgtaagttacagtgtaatttatgaaacttacactgtaacttttgtaagttacactgtaatttttgaatcttcacatgtaaattttaaattttgtattggatttggtctttttcttgaggatatggtaatttaatgttcattatggtgtttcttaattgctttttgctttttattatatctatcggattttaatataaagattaaaaatctgtgtgatacgattataaaaatctttcgaaagatgtataggtactcccttcttaaaagtagctggggaatatgtacggtggcttttggaaaagctcatttggttcaatagctgtggcttttgaaataactagtcccgctgacagcgacccccacatgtcatacacacgttgaaataaaagaagagggagagatggatatggcaacggcggtgtcgtcggcctcagcggtggcagcggcgtctcggcgaggaggagcggtagcggcggttcagcgacgaagaggacgcacggtggtgaggagcggtggcgccaggaggatgaggcagtggtgacgccaccgctgtcggccacctcaccaccttcgtctcccacctccatggccgacgagcgaaggggcggcggcgtcgggaggaggaggcgtcggtcggggaagggcgggagcggcgctggcgtcgcgttgaccggcgtctgttgaggaagggcgggggcggcatcgatcagggaaggacgggagctgcgccggcgtcgggttgggcgtcgtcggttggggaagggcgggggctgcgccgacatcaggttgggcggcgtcggttggggaagggcgggggcggcgccgatggcggacacccaatgcgcccgatggccgacgctcgccccatgaagtcacgactcgcgagaaggaggagacgaggaaaagaatatcggaccgttttttcataatggcagaggtgggtaatttttccctcaaaagcacttggagcaaaagcacttatgcttttgggtcctttggttgactcttgacttttgcaaaaggaaaagcaggttgaaaagtccaaccaaacacacccctagtgtatatttatagttaactattgtataaattaactattagattgactatagattatttgaagcttatagtaggctcttaaccttatgagctggaaagtctaagcttaacaaatatgcagttctttcgtttgtactcatcatcaaaaattatgttgaagaagtttttttttcttacgctagatagagttatgaccctactattaaacttagtacttcaatccattagcctataaatcatataaactaaaaaggcgacttaaaaatccaagaaaaaattccctaaataaagaggctctaagtatatttttcttccctcatctcttgcttctaattgaattgtctccttcaatagtaaaattcggatataataagtttgatcacggttaatttaacacatcagtagaaaatcgattttcaaaccatcaaaggagtcgatttataccggtttttgaagttggagagtgcgatatacccggttttgcggttgattgatgcaatttgaccgaggtctttcaaattagacttattttctttgctagagggaggaaaaatgggccttactggtccaaatttagctagattaatgggccggacgtgtactgtaactggccagcccagtcactcgcatcgtcgactacctcttgccatcggttctcccgggaagttttgcggcggcctagggttttagcattctcacctcagcggcggcggcggcgggggacaccggattttccgctccgatgcctcgtcagcacgcgccggcgttcacgccggaggcggcgtcggcgtcggccaccggcggggccggggagcggcagagcctcccggcgctgcaggcgaagatgaagcgcgacccggaggggtacgaggaggagctccgccagctgcggcgccacttcgagtcatcggtgttcctcttccggcagcaggcggcactggcctccacgtcctcgtccggcggcggaggggaggtggccaaggagctcggcgacctcgcgctgttcctcgcccacgtcgcgcccttctacccggacgacctcgctgacttgcccgaccagattggtggcctgcttgacaccaacgcgcgcgcgctgccgtccgggctccgtgtgcacctcgtgcaggcgctgatactactggtgaatcggaaggtgacgcctgtttagttcatctgttcatttcacattaagttaaattttgttcaaatcgtgtggattggaacgggattatcgtatgactgtagagtaaattctcctcgtatacattgctttttgatgtttagattgttgatctggaggacacaatggagttatttatggagcttcaagttataggggaccgggctgtcaaaaaactagcattctcacatattgtacacagtatcaggagaatgaatcagacccacaagaatgaagccaggaatcgtaaactgcaaaacatccttttcacattcctacaggtttgtgacataccactataccacacttgcactgattagtattatcgggtttaacatagtggcaagaatacattcatgattctcttcctacctcgtttagttatgcatcttgcttcgctgtttcccagggcgaggaagagtcgagagcaaagagggcctttactattctatgtgatcttcaccgtcggagggtctggtttgatgaccgcacagcaaatgctatatgcaatgcttgtttccatggttcttctaggtacatactgccagcatctttgtgtttattaataggtgttgatctaaaatatatcttttacatgcagaattatgatagccgctatttcattccttcttgggtatgaaaacgttgagcaagaagatgatagtgatgcatccagcagtgaagatgaagctcaaaaccctcaaattattcttagtaaagaggatgtttacaaggttatttgaatttttaccattatttcgatttatagtgttttacatcttttttctgttacgtgccttctgatataatgtattttattgtcatattactttctcaggcaaatcacaagggcactgctgctactaagaaaaagaagaaagctaaattgcagcgtgtgattcgtagtatgaaaaggcaacaacgtaaatccactgaggacactggctccaattattattcaccactgacgtatttaaaggatcctcaggtgggaaatggtgtaatcccataattgttcagagtgttatcatttacatattgactgttatattgaagctttcgttttttggctgacagggttttgctgagaagctcttctctcggctccagaaatgcaatgagcggtttgaggttggccccattccttgttctgaagattccttgttctgtaaagatttaaaaagttatatataattgtcagaactatcattacttagtacttttagctttctgctgaagttttatacatgagtgtatatagttggaaccagcattcaagtaggagaattggaacccagatgtgcaatagtttattttttaaacacaatgtctgttgtgagttccatccgatggttaaacgaaaataaacgttaattcaaatttagagaatgttggttgggtgcttgcaggtaaggatgatgatgttaaaggttatagcgaggactattgggctgcatcacttggttttgttgaacttctatccatatcttcaaagatacgttcaggtatgttcttaacttggcatgtgttcttcttgtagcaaccttatggtagatataatgtttatctatactctatactaatataaaagatggtagtggtggtggacccacggactgtgagttgcgtatctcttagcccccacatgccatagatcccgtcgaaaggaaaatatgacaatagaatattatgaaaattttcatctttacgaaatgacagcaaaattagcataatgataatataatagacaattagaaaaaaaaaccgttgcacctcacgtgcattatactagttcatactagttttgataataagttttctacctttctgtgatgcagcctcatcaacgagatgtaacaactttacttgctgcagcagtacaggcttgccatgatatggttgaaacacttttgctcttctcctatatttcactacttatatcatttcttttgctttgtccaaattcagctaaattaatatgcttcaatttcaggtgcctcctgatgcagttgaaccactgtttaagcagatagtaaatcaatttgtgcatgatcgttctcgcccagaggtttgcataacactcatcacatatctaatatatttaagtattttccaactaacatggcatatttctaaccaatctcattttaggctattgctgttggcttgaatgttgtgcgagagatctgcatgagaatacctttggtacttaccttgctcaaatctgtactcttgctttctagtgctactgacctctgaccagacaccccttaaatttgtgtgatggattcattaaatttttatggtggtcatgttttgttgtacctaattcctgtgccctggacatgctctagtagaaattgtgatttcatttttttactagtcttaaatgactggttgcgtagtccaaactccaaaaggatgtgatagtcgattgctacaggttttaagcatataagtgtaacttaatgaagaattgaaaaggtataaacatggttttaccaggccacatttagtcttgtgtagcctgacacgttagtcacttatgcatgagaagttgagaacacacatgcaggtttgtatactacattaccacctgaggtactgtgcgggttgtaagatatttaggaagatattcttggtctatttattttattcatctagcaggcctctgttaatccttctgttatacctgcagttgatgaatgaagatctactccaggaccttgttttatacaaaaagtcccatgaaaaagctgtttccattgccgctcgttctctaattactttattccgggaggtcagttcttatccttttgcatattctgtgatttctttttgttcacttcagctaaaccttcttttggtttgggttcagatctgtccttctctgctagtcaagaaagatcgtgggcgtcctgctgatccgaaggctcgaccaaaagcattcggcgaagcaactatcgcttctgatgtgcctggagctgagttgctagatgaagatttttcatcagaaggggaaggctcagacgatgagtctgatgcttttgattctaatgatgagaaagagttgcaatctgctcgtggtactaaacaaaatttggatggttcgtctgaagcaaacaagcttgacacagatgaaggtatgaaagaggaagatcaactatctggggatgaagatgatacagaggaactagatgaggatcaagacatctctgacaatgatagtgaagaaaatgatgatgagctagaattggactctgatatggatgaggagaatgatgtatctgaatctgatgatgatgaggaactcagtgagaaattggatgattctgatgaaggctctgatcaggatgatgacagtgaccaggatgataagtcaaaaaacagcagtcgcaaggcaaataagagaaagttgagtgattatatagggcaacttaatgctgcagatgcaagccttcgagctctgaagaagttggcaggagccaagaaggctgaagcttcgtgcgatgaagctggtaaaatcttatctgatgaagattttaagcgtattaaggagctaaaggtatgggagttttttccagctgtagttcatgctgtggagctttcttttgggaaagaaagtgaagttgtgtatatctgacattgttatgagtttcaggcaaaaaaagaagcaaaactggctctggcacaacatggactcggcaagggccatgacacaaaatcagtaacctttaaaatgccttcttctgatcagcttagtctgaaacgggttgacccatccaagcttgaggtgcattttctctcttcccctcccgcattgcactcgtgccagcgcgctcatgcacacacatccacactttgcttatatgaacatcttcctttatgtaggctcacataaagagaaagcttacgaaagaggagagattagaaatggtgaaggctggaagagaggatagaggaaaataccaagcaagaacagctgtgaaacagaaaaaggtattcgtttatatgatcctcctttttggtgcttattttgacctatgttggctatatggcacaaccttgtgaaatctgatcatgaattgttctttcgtagttgcttttattccttctctacttatatgcttctcattgcgttttagaccggtggcttgagcaataggcagaaacaacacaagaagaaaatgcccctcgctgcaagcagagcgaaggcagcgcgttctcgacaggagaagaaaaaactgcaaaagcgctcgggaaagcaattcagaggacggaaggcgtggaaatgagggattttttgtacttgcgtttgccaattcttgtggtctactggccaaaattttgactccttcagttaatgattttcgtatacaaatatggtttcacaaaccgtgtatcatcgatttttcaagtgctggtgtattcttttgtgagtggagagaatgaagccggtatatcatcgctcacagtggttgctctatgaatttggacagtactcgtatccagaaggttcagcatcacgtgtcctcctggcccagtgtctatacgttgcagtgactccagcgagagccacaattacgatatgataaatgctgtctctgtttctgctttgatgagactgtttcgattaggccagcaacctcacctctcctatataggctgtgtttatttcagcgtaaattttggattttggttaaaattagagatgatgtggctgaaaagttatgtgtatgacaggttgacgtgatgaaaaagaattgaagtttagatccaaactttggatctatacacacagacggattcagatcatgcgcagttatagctattactgcaacttatattctgtgctacagtatttatgctacagtacgatgaatagtgcacctcgctgatctggaccgttccatctacatccgttgatgaaaactggtaccgcctaaattgcagtcccagtagcgactgcagctgatccggattcaacacggacatagtacaccctcttgttgcttcgatgagactggtccttagcacaatcatcaaaccactaccattatatcagtgcttggtgttctattgggttaaggaattctcgatcgttctctgctagtaggaaatcgagccgactgaccagcgatgtcggcggttgagaggaagacggcgtgcgtcaccggcggcaacgggtacatcgcttcggcgctcatcaagatgctgctgcagaagggatgtgctgtcaacacgacagtcagaaaccccggtgagattcttcttcttcagttcataatttcgtgcatactcgtgcatagatttgcagtagcatcagtggttttaacctcgtttttcttttctttttttttttaaaaaggaatttggttttagcctctgaaactgctgctacacattgcaattttgagtcgcagaaaacatggagaagaactcccacttcaaggacttgcacgcacttggtcccctggcggtcttccgcgccgacttggaggaggaaggcagcttcgacgaggcggtcgccggctgtgattacgccttcctcgtcgctgctccggtgaacctcaagtcagagaaccctcaggtattacatagccgtctacaacaatttgattaagtttatagaaaatttaataatatttataacatcaaattagtttcattaaaaataactttgaatgtatttagatggtatgtttgttatatgtgagaaatgttctgtattttttttatgaacttatcataataaaacataattagaaaagagttaaatcatcttatagtataaaacggaggaaggggaaacatattttaagattatctttatggatttagctagatggtggttgccactcctcaagtctcttatggttgccaggccattaatgatactaagtattcctccataaaaatgtctctttgcacttcactcttcattgttggcttatgcttacatttacaagctaacatttaaaatttagaacttaattttaagtttgatctttttctcatcatagtttatttttatttactaataagcgatttaaataagcgaaacaatgctactttctgttgcgatgacacagacacatacacagaatcacatacacgcactccttctgtctcatagaaaccaatcagtactagatgtgacatatcctaatactatgaatctgaatatatctctatccagattcgttatactaaatgtatcataatcagttatagattttttttttgtacgaagggagtagttttgttttttacttggtcagcctgatggtaatgacagaaagaactggtggaagccggtgtacgaggcactctgaacgtgatgaggtcgtgcgtgagagccggcacggtgaggcgcgtggtcctcacatcgtcggcggccgccgtctccggcaggccgctgcaaggcgacggccatgtcctcgacgagtcgtcatggtccgacgtcgactacctcagctcaccagccaacaagacatctcccggaaaggtacacacaaaattacagattttatttaacacaggtcagtcaatcagaggctcagagcccattaaatcggccacatgagaacagctccgtgtgctgatgcaatcagcgtttacaatttcggttcgaaatttccggcaagcatttacttcatccaaatatttcatattttttttaatttagaaaaaaatatttaaattcggtcaagatttgtttaaatttcaaacttttttgggtccctgatagatttgtgcatatcgaaaatattaagacatggatgcaatgcaggcgtactcgctttcgaaggttctttcagagaaggaagcgagcagggtcgcggaggagaacggcatcagcctggtgaccgtttgcccggtggtcaccgttggcccggcgccggcagcggaggccaaaccgtgcgtcgccgccgtcctctccttgctctccggtgataactaatcgaatcaagaaccggccggtccatggcaaatgcggcaacgaaaagcaattcctgtgaaatttatttgttcatctcttgattttctttcaggcgaccaggagatgatcagcaccgtgaagctcatggagaaggccaccggcgggctaatgctggtccacgtcgacgacctctgccgcgccgagatattcctcgccgagaagccgccgccggcggcggcggcggcggcggcggagaggtacatctgctgcggcctcagcgccaccatgctgcagctcgcccgcttcctggcggccaaatacccggagtacaatgtcgacgtcgccgcgtaagatcgagctgatctcactgagtaataattccccatgcgtctccatgatcttatcgagagctctgacgatggtgaactttcatgcagcctcggcgacctcccggagaagccgaggatccgcctctcgtcggagaagctcgccggagaagggttcgagttcaagaacaggacgctggacgagatgtacgatgatgccttcttggagtacggtagagccctcgggattctgccatactgataacgatgttgttcccctcgtatatcatctgtttctctggtggtgattgttagactttgctctaggatcacctaggttagatctagtcgggtggttctatttgggtttgatgaacgacattgtagatgaaagggagagggtttagataccgaccggttgaggagttcgtggaggaagaggcgccggacatcgtcgttgtcgtcgcggcttgacgtggatgcggcgccggtgaggtcgacggtgatgacggctgcggcagtggtggtcgtagacgtcccggcgatgaggcgtggcgcggcggtggcgtttcccgtcactggctgcgccccctctcgatcggattagggttttgtggggtggagttggcggcggcggtgaatctcgtaccatgtgccgtgccggcctccacccctcttttatatggcgcagtgtgacgggggcccaccagccattgggctgggcgcccccgatcagggcgcggtcaaggcccccttgagccgttgggctcaaggggagagagatctatctaacattctcccccttgatctcactttttcttttagctttttctattccatcacagatttgtaaatagagcatgtttcatcgtcacggtcaatcgccgatggattcgacagccactatacacatctctattcagaaacagatactttacttttgggccctgtagtccaggattcataaggcttcccttaaacccatgccggctacatgttccttgaacacgttgggtggtaggcctttcgtgagcggatccgcgagcatcctttctgttttaatgtgctcgagactgattgtttgatcccggactttgtccttcacaacatagtactttatgtcaatgtgtttggcagcaccacttgactgattgttgtgagcgtacattactgcgggttcgttgtcgcagtataactttagtggtttctcaatactgtcaaccacctttaaaccgggtatgaacttctttagccagttcacctgccccgttgcctcatagcatgctataaactcggcatacatagtagaccctgcagtgatagtctgttttgagcttttccatgaaatagctcctcctgccagggtaaacacgtatcccgatgttgactttgtattatcttttgcaaagtcagaatctgagtaccccactatctggagtgattctgatcttctgtaagacagcatgaggccttttgttccttgcaaataacgcaagactttctttaccaatttccagtgctctaggcctggattactctgaaatctgccaagtaacccggtaacaaatgccaagtcaggtcgtgtgcacacttgcgcgtactgtaggcttcctacagctgacgcatatggctttgttttcatttcattgagctcatactgatttctgggacattgcgatgccccatacttttcgcctttcattataggagcaggtgtagcactgcatctgtacatgttgaatttcttcaacaccttttctatatatgtcttttgagaaagtcccaatgcatactttgttctatctcggtgaatctctatgcccaaaacatatgaagcctcaccgaggtctttcatgtcaaagtttgaggacaagaatttctttgtttcctgcagtagactgacatcactactagccagtagaatgtcatccacatacagaattaggaaaataaatctcccattcttaaactttgaataaatacagttgtcctcgacattctcttgaaacccaaatttatttattgtcccatcaaacttcaagtaccactgtctcgaagcttgctttaatccataaatggatctctttagacgacatcccatattttcgtttcctttcatgacaaaacctttcggttgtgccatgtatactttttcctccaaatctccatttagaaatgccgtttttacatccatctgatgtaattccaaatcataatgtgccactagtgccattataatcctgaaggaatctttacaagagactggagaaaatgtctcattgtaatcaatcccttctcgttgcgtgaagccttttgccacaagtcgcgctttaaacttttctatattccctctggagtcatatttggttttgtagacccatttacagcctactgttttggctcctttaggaatttcttctaaatcccaaacatcgtttagtttcattgattccatttcatctttcatggcttccaaccattcagatgagcgagcgcttctcatggcctcttcatatgaggtgggatcatcctccatatgcgactcttctatattataaactttatagtcatcacggatagccgatcttctgactctttcagaccttctaggggcctgcacatttggcacatcctgtacctgaggctcttgatgagtctcctgtactggcacattatctatttgaggttgttgtagctcctcctctggtgtggcaaccatttctgttgaatcctgtataacaggttcctcactctcattcattgttgccacaggaggggtaacaacaggtgctggtacctcaatgacaggcattgcaggcacaacatcagcaggtagagagaagaaaggttcctgagtcgacggagcgggtacagacacccgcctctcctcaagatcaatttctcgaactaccgagctccccctaatcatttcgtcttccaagaagacggcgtgtctcgtttctacaaactttgtataactgtttggacagtagaaacgatagccttttgatctttcaggatagccaataaaatggcagctgactgttttggggtccaacttcccaatatttgggttaaatactttggcctctgcaggactcccccacacacggaggtgagttagcgagggtactcttcctgtccatagctcatacggtgttttgggcaccgatttgcttggaactctgttgagaatatgaatggcggtttttaacgcctccatccataaaccgagtggtagtgtggagtagctcatcatgctgcgcaccatatccataagggtacggttgcgcctttcagctaccccattctgttgaggttcgcccggtgttgaatactgggctactattccattctctagcaagaaccttgcaaaaggtccagggacttgcccataaggcgtatgtcgaccatagtactcccccccacggtcagatcttactactttaatctttatatcatgctgattttcaacttcagctttgaatatcttaaatttatccaatgcttctgatcgctctttaattggataaatataaccatagcgggagtaatcatctgtgaatgttatgaacgagtcatagccatccacacttttcacaggaaatggaccacaaatatctgtatgaatgatctctaaaattcccgcgcttcgttttgcaccctttttgatgctctttacaaattttcctttaatgcattctatgcattgttctaagtctgagaactccaatggaggaagaatttcattcttaactagtctctcaattctccccctcgaaatatggcccaaacgacagtgccataatttcgatgagacatcgggagttcgctttcttttcttgttttcttttgtcaacgaggacacaacattcacattctcagaaagagataacaaataaagctcgtctcgcaacacagcaagaccaatacatgcattattatgccatagttcacatttgccacttccaaagcggcaatcatatccatcaaaatccaactttgatacacttattaagtttctttgcaaagaaggaacataaaagacatctcgaagtaaaagtatgaagccattcgcgagctctagaggaagatctccaacagcttcaactttttcttcaactccattggcaactctaatggtgctttctcttctttgcgtagtcctcgtcgaacggaatgcctttaaacaattacaagcatgaatagttgctccagaatcaatccaccatgtggatctagagtaaccaacataatgagattcatttacaaatgtaataatgttctcacctttctttgccatgatcattttcaaaaagtcaggacaatctttcttgtagtgtcctgtcttcttgcagtggagacattgatctttctcaacagcgaactgttgttgttgaggcagatgctgagactgtttaccttttgaggtgggagacttgtggttctttttcttatctttaacatagtttattgaaccaccatttgattctttgattctctcctcctcttgcacacaattagcaatgagcttctcaaagttccatttctctggacttatgttgtagttgacaataaaattgtcaaactgctttggcaatgaggccataaccagatggaccagaaagtcatctgttatgcccaaatccattggcttcaatttggaagccatgttgctcattctaagtatgtggtctctaacaccacctccatggtacctttctgtcacaagctgcttgatcagctgtgtagcataagtctttgaagagccagtaaactgactctttattctttcaaggtactctgagacagcgtcacactctgggatcgagcccaatatggtaggctcaatcgtattctttaccacagccaaacatttcttgttggctaaggaccatttcttttgttcaatgtcatacgacatgacgagaggagcattgtccctctgtctcttttgccagtcagcatctgactcattttcacctctgacaaggtcagcaggttctataggacatggggtagtcaatacccagtccacctctcccaagataaaagcaaggtcgagttttcttttccattctgcgtagttatctccttttagggtcggaatatctttaatgcaacccatcaaggagtagccacctgaaataatcatgtgcggtgagaacaaaattaacattaaaatattatgcattaagcctacatcaccgttgggcagaattagacataacacatataaccataactataatattgcaattaacaacgttggtcagaaaattacaacatcatagcacataattaatgttcctaaaattaaattctcccgttggttcgaaatttaattttagaaacactaattttcatcaatttcatctatttgcagcggaagactatataaaatcatatgaacagtagcaaaatctctgtaattctctctctgtgaaaattctcccgttggttcaaatttaaacagaggtaaaacatgcaaaaatctattcaaaattctattgaaatttgcatgaaaaatcgacaaaataaaatggaaaaattgctactgttctcttttattcattttcggccccgagggacctaaattgaacttttccggcctttgccggtcggcctatggccactttgcgcgcgggcaagcgccccctcccctcccccaggccgcaacctgggcctgggccgggaaagccgccgccgcgcgctccccacttgggccgatttcggtccggccgccgccggccgtccgatcagctagggtttcgatcggacggccgggcgccgagatcggaggatcaaaaacccccctctcccggccggccgccgaaaaccctagcttctcttctcttctctctctcacgcgaccgcgtggacggcgtcgccatcgccggcgaccttcgcgccgccgcgccatggccggcgctcctttcttttctcttctccgctccccccaccgtctctaacccccaccgtgtgagagagagatggcgacgacggagatggcggcgccgccgcgggccccctcgccggcacgcgcgtgcaggtgcgcgcgcggccgtcgagtggctcctaggcggcgcctctttgcccctccccccctccgttgccggcgtcaacgacggccggcgacgaggtaagaattagggttagggtttttggttcttttgatccgtgcggatcttgtgcttttctttctttggatttctttccccgaaacgatctaaacactagggttgctctgataccattgttaaactttgcactaggatcacctaggttagatctagtcgggtggttctatttgggtttgatgtttgaactatagagattgaaaacgggagagggtttagatagaccgaccggttgaggtgttggaggatgaagaagtgccggccatcgtcgtcgttggcgctcggttgtcgtggatgcggcgccggtgaggtcgacggcgatgacggctgcgggagtgacggtcgtagatgtcccggcgatgaggtctggcgcggcggtggcgcttcccgtcactggctgcgccccctctcgatcggattagggtttgtagggtggagttggcggcggcggtgaatctcgtaccatgtgccgtgccggcctccacccctcttttatatggcgcagtgtgacgggggcccaccagccattgggctgggcgcccccgatcagggcgcggtcaaggcccccttgagccgttgggctcaaggggagagagatctatctaacaggcattggtaagttgatttggtgggcaaaagagttggatcggagtgctccaatctaacacagctcagccttcagagattaagaccacagcacattctataagagactaagaacagctcatacaaaagcatggagtatttttcctgtatggttcagaaaatgatcaatcggagtgctcttttttttgtcaaaatggtaacacatatacaacacaacaatttactaattacatataattaatgaataaaaataaataattgaaatgattaacttttcttttctctacggagaacatcggagagcaaagcacatgaaggatctcttctgcctatttaccttgtatttgtttgtcagtaatatgctggcagctccgttcctgaagatccatgagctgagcatagtggcttgcccctcccaacattagcatgtatcatgaagtctagccgtctgtttacctgtatgctgaaaaacaccaaataatttgtgtaagaagattctgctaaacttgttttaatcctaagctggccactttgacctttctttggagctcagttttggacaatgaagtagtggcatactgacatgcttaaagtacaggaacagaaaaatgaatagaatctcattcgcaggagaggatgagagctccttagtaattgtaacttctttcaccaatcaaaagtttagaacatgatttctctaaaaaaaagtttagaacattgaaagccctaatggaaggaagctattaatgtgagaattcatcctaataaaacatcaatgttgccagggaatcaacaggtttcagggaagctcaccagttcatgttttgcctcatgacatcacatcgactctctttccataagaggaattggcgcagagttcgaattatcagaaggcaacatttaaaaaagaaatagagagagaaatctggaggcaccaatattcggaaatgtgctgggttctatctgaatctttgaacgaacttcccaaacaaacatctgataaatttagcctaaattcagaacattatcttcaatttatgctagatgagagataagagaagggaaaccgtaccggaggaggacaggtagaccgtacgccgatttctgccattgaggaaatggttgtgtcagctagcaacaccgtcgggcaagtcgctgaggaagaattgaaagatccactccccgcccgccatctgtgctagcagtgagccaccgagtcgaccttgatgccgaagaagaaggcgacgctgcgatgccatgcggcacgccgatgctgaggacgggatggggagtatgtgatgctattcaagcttgttgtacgtgcagccacagtgaagaacataaaggggaacaaacaaattgggaagagatgcggatgcggagaggacgacgacgagcggatgccgagaagtggaagggggcaacgcggatggctcggcgagcagtaaaaccacgtctcggtaagggttggccgcgcaacctagaaggcagaaaacaaaaatcaaaatcaatgagcataggcatggtcagaagaacatcgacatcacaatggtgaaatccagagcgaagcacaactgaaaaagatcaaagcatacgggatgatgcgactagggaaagtaccgtctccacaaaaaacaggaactaagaggaagaagtaaggaacagaaccagcttcgaatgaaagaaagaaaggagcgatgcaggtaccctcgatctgctcctcatgggggtctccgcgcgtatttttagtggagcagccaaccctgtcattcccgtacaccatgacagagcactaccatggatgagagaggggctgctgggcattggagccttggaggtgtcgctgtctcgctgatggccgacacgcggcggtgccgattcgctgaagcggagcggacgagaaacacagccttcgctcaatcctagccggacatgggttggagaatgggcacgcgtcaagacggtagcggtggctcgcggatggctgagcatacagccaaaccacgacgacgcaaggccgcgccaccgatgccacgatggccagtaaaaggccgtcggtcgctgggccaaacaatcagctggcccatggtagcaggaccactgtaacgaaacaacgtgtccacaccgtattggatgcgcctctccaaatcgctaggagagcagctaatctagcacctttaaggcctccttcaatggttgagctagtgcactagctcatgcttgtccacctcatacaagagatagcaaaaagcctacctttttaataggttgtctcatagcacattgttcaaaatgctttgggttccacaacccctctcatattttgtttaggagcttagctcttgaagaagagatagtgcactctctctccttatcttctctctcttctacatcatacaaaagctgatgtggagatttatgagctagctgactcatccttgttggaggaggcctaagatagctaatccagcacctttaagatatttaatatatgtgtcagatcattttcttccggatcacttattttaaactacttcatctatctcaaaatattactaggattcatttggaagtatcctccatgttaggacagaggaagtcattattaaatttattttttaaaatatttaatttattcctatatgcaagtatatgctcctatccgttgcataatccgttcaatgactatatccgtctcaaaatacagtaacttttagctatgaattctaaaaatgattatattttagaacggaggaagtagtaaatctattttcttaaataaaaaaaaaaggaaaagcgagaatgagagaggtgcccccactatgcgattgccagctagcccatcacaagaagatcagaggccttcggacgcggctttttccggcgttccgccaccagtcttctcatctgcgactgcggcgctccccttccctaccggaatccccggttttgctgccccccagcccgcggagtggtcggatccttcttccgtatgcgtgcgtggtgtgcgtggagtttggttgtcgggttcaggttaaaaccctctgtagtttccatctccttttaccacttcccacatgctcgaatcgaagtaaatcgtgtgtagtagttttgagtagaatggcgctatgctatgctatgctacgctatgctacatcgtgtacttccaattgattcacagctcgcacgcttcaatctttgtagatcagtggtctgtttcactgctgtgagaaattgcgtgtggttttgcaattcatcggtgcttttttcccccttcttctaggttttgtgtatctaccgtctacagtcaccatggttggcagctaatgggggattggaatataaatctctttttggtagttctttttttgtatgattgattttggcatgtctgtttgccatcaccttttttttttaattaggaccaccaatggatagggttgttggtattaaactcgcaccatatcaaatcatcatgttatctttctttttcaagtattctggactcgtggcctgcttgaaggaacaagggaacttctagagggtttcctctctcaaaaagctgttttttttttcataagtgagagcagttaaaccccaaatcttgttgaaacgattaaacttgccaaagctctcctagagactggattaatttctcatggttctgttcagtatcaaagtcttcaactaaaccgtaacactgaacttgagattttttattttttatttatttttctgagtaagagatattttatatgaagttactatgatgtccatcaaatttgaacacatccagacttgtaaatttcttggtctcgtctctacttttagttaacgcagaaaatgacaattcacagttattacttgctttgcaggaattctaggaatggcagcaaactaatcttctaacctcaggcagtccatgtttttgaggtgattctgtgacatgtgtgctaccttaagtaaaacaagctacgttttcccttccgtatggatctcctaatttgttcacttggtagctttaaactggatgttattgcaaggttgccacatgcaaaacttattactctagagcgggagaatacaaacttattgttctttgttattcgattattgcaataagaaatatatggaaattgcagtaggtgcgctctgcaaaatgatgatactttatgatatatccgatttcaaggagctaggaacacaaaaacatcgctttgtaatttaccatctccaatatgttctaacatccacaatttgttgtattgctaataaattgaccagctcatgtagaatacgttaccatttcagagctagtacccacctgataagcattccttttccactaggagataagctctctattaatttgctaccctttctgcatcacggcccttattcccgttgggcatatcttttatgtggttgatataagctcatagcttttgaagtactgcataggatactgactccagaagaaactaccagccaaaataaggcaggacccaccagctttagaatataaatccccatgcttatctaatcttcaggaggattgccacttctctttcctgtagacagtctgtgataattttgttctcttcttgttggggtcttggggaaaggagcaaggaggaggaggagaccaagaacacggagtgaaagggagagggttctgttcttgcttcttaggccatatggagatccagcagcagaagggggttggcaattccaaagttgtgaaggttgagaaggaggagtcatgggatctgttcgtcaatcaagcaagcaacgaaggccaccctgtgggttttttcttccttgccttgttcttcccccacctctttttttttcgccgggcttcccccacatctttcctgctttgtctctcatgatgaatattgatgttgtttattctcaagtcatattttggtcggcccacgatttttgtaattgctgtttgtagattataattttgttagaacgatatatgtataatagtttgtggggatggatgcttcatgcaacctgatttctgtaatcatgttcttttcgttctttctgggtctttctcgtttttctttcactgtaactgtaattgacaaactgagttccaaattgaaaattttcctgatgataattatccgctgcagttgcaccagaaatttctttttactcactcagaagttaacttggttattgacccctcgactttgtgtaggttgttgcccactttggggcttcatggtgtgtgacttcgctgtccatgaactacaagtttgaggagctagctcagacacaccctgagatactgttcctctatgtggatgttgatgatgtccaggtaaccattctctctgttttttttttaaagaaggaaaccattctcctatttttggtctcatgacgtgttgtttatgcatgtatttttggaatacatcccatggtcgtattttctctgagttgttctgaattctgaaagcgaagtgtcttttgaggaatagaaagtagagaaagtggatgcctaaactgataatttcacatagagttgtctagaaaatgtccttagacttcggagctttcatctttgatgttcaattgtttctactgaatatcatggcataaccatttgttacaaaactgctatgcatatatgctcattaaattagtttactgagccaagctgctatatcatataccgtgtgcatgcagagtgtttcgtccaagcttggagtgaaggccatgccgacattttttctcatcaaggacaaggaggtggtgaacaagattgttggtgccaacccagatgaggtcaagaagatggtggacgcttctgctgagtcctttggagttactgctcctcctgatatagtggtggaatagatatatagatgttgcctttatcttcagaaacttctctgtgaccgtgggtgcttcttggtcaggtccggaaaaatgcgtccatgtgtacattctagctttgctcctgtgactctgaatggtgtccctttgaactgataggcttgtgccttgcggtagtttgttctgcaggctgcagctgtggctttaccatgctctatgaaatttacttacatgtgtttccagttgaaaaatatgtggttcagacttcagagtttagactaaaaagatttgttgacagtatctggcatgcctagtagtgctttgccttttcacttcacatgatgatggatggtgtagttccaaagcgtactctgacgatgagctataaaaattgccatgatctctgcagccaccgcagaaagtgcacatccccaggtgtaagcaagtgtcacgagcagctgatttattcattgtaaaatctgcagatcatgttagtaggttgtaccgttatcttgctgttgcagggtactactaattaatgattagcttagcaaaagctctgcatttcaatcaaaagaatttgcatcataaaaggctctaacctaaagctgcatacctaaccacacctaggaatgaacaaaaaatgcaagctggtctttggcccagtgcaacatgtgaccaactatggacatgccactggttgtcttgaggccttccttcatctttgtgctccactattcaatcatccaaaatgagagtattaaaagctaaggggaaaaaagggcaaaagagaaataaaagtaagagaattattggaccaacaccatggaccctcaccacataacctgcaccatccaattctctgaagacccactgtagcattattctgaacttgtacacttcatttatcatcttgtcccagactccagttaattaccttcaatcaattactacctttttactagatgtgtcg

SEQ ID NO: 5234 - DNA, 116249 bp, Oryza sativa
cgcgttaattacgctcgccaaccgaagcgacgttaccatatcttcagatgaaacgaatcgccatgtccagattcgtgtgctactcgagtaatgtggcagtcttgaagagaccgctcattgttgacagccgaattaccactgccgatgtgcgtgatttgtgaccgtttggttttctgcccaattgtggagaccggtcccacctgtcaccaggccttaggagtggcgtcacgcccgaccgcttcccttaaggagggcgatcgccctggcataacgccgggggctactgtcggtgacatgggatcgggagtatcatgactagaggtttgaggcagacacaatcgcccacgtggcctggcaccctcgggggacgtcgggcccgagggtgatgtgttcgccctcctcttagtccccccgagggggtcgggctgcacccccctcggccccgagggccgaggcgccctgacccctcgtgggttttcgctccgcgtgtatgggttaggtgagcacagtggggctcacctaaccacattaattgcggtttggctgagcgtgtcacaccgcatgtagcgcagtgcagtgcactcgtttatccggtctgtgaccagtcacagaccggtcagatcgcgggttaggtggcggcaggcggtctgacgcacgcctcgccccatcccgtcaggtcgagggcttctaggcgctcgtccccagctggagctagcgtgttacctcccagagatggcacgttagccctgatcagatatatgccaggcttcatcctaaccattacaggcaaaatgtagtgtgaaggagagccaacgtgcagatagctaagctgacgcgtggtggacaagaatgaccgatttgtgaccattctgacaccggtcatgtcgccagcagacagccatgattctacgtcgcgcctgctcccggcgaaagtggaggtaggtgcgggccgttccatcagaaggtgactcgaacggcaaccatgcaaatctccgtctatttctgagaaggtgggggaaatccccacagaaaaaagagggaaatggtgcatgtggtatccccttaagatataaaaggaggaccttgaccactgagagaagggggagctttttcttggattgattttttccagattcggaacctagaacaagggagaggttggctcacactttgtagctgcttcatacacagatccaccaaaacacaggagtagggtattacgcttctcagcggcccgaacctgtatacatcgccggtgtcttctgtgcttccggtctcgcgaaccttccacatacagattgggagcttagagtctcacccagggtccccggccgaaccggcaaaggggggccagcgcggtctcccggtgaggagccccacgctccgtcatctggcgcgccaggtaggggactctgcgagtgatcttctgagctcttgcgctctttcgtgtgcaccaagcttttcctgttcagcctcatggctgagcaagcaaaggcgcacgacctctctccgagtgtgagtggcgacgacggggagccgaacccacgccgtcgagctcgtactccaccgccccctccacgccaaagtcctaagcggggggaggcgctcgagagggtcgaaagatccgcgacttcaccgatcgcgggcgatggaaaagaacggcgagatggggagcgtcgcctcctcgtctacggcgacggcagcacgccccagggcgcgctccaagctacgggcgcgctcttacgccacccgcctgtcgtccctgacccggagtctccagcccaacgatggctggacgacgtggccaaattggtcatgacggcgcggcagcgcctagatgctggtgggcggtcctccgccaccaaggcctctggtgctgctaccaccggctccgcgtcgtcaagacggagggcacgacgagcggcagccgctgttcgccgttcggccgtcactccttcgtcgactccttcgacccgggaagatctgcgtggggagcaggacgcccgcaccagcatcgagcgccggcgtaatgaccgaagtgctgcccacgcaacggagggcgcttcctcgtccagagtgtcacctcgacacggacgtgggaatcagccctccgtgcccccggttggtggtgtcggctgtagagcctttgtggcgagtcttcggaatgtccgttggcccccaaggttccggcccaccatcgccgaaaaatatgacggcagcatcaaccccgccgagtttctccaggtctacacgaccgggattgaggccgccgggggtgacgacagggtcatggcgaatttctttcccatggccctgaaggggcaggcgcggggttggctaatgaacttgccacctgcatctgtccactcttgggaggatttgtgccaacagttcaccatgaacttccaaggcacatatccgcgccccggtgaggaagcggacttgcacgcagtacagcgaagggacgatgagtcacttcgatcgtacattcagcggttctgtcaagtccgcaataccataccatgcatccctgcacacgcggtaatctacgcgttcagggggggcgtgcggcacaaccgcatgctcgaaaagatcgcctccaaagagccccagactaccgcggagctttttcagctcgcggaccgagtggctcgtaaggaggaggcatggacctggaacccctccggttccggagtggcagcttcggccgcccccggatccgccgctcagacagggcggcgtgacaggaggaggaagaagaggtcagtccattccgacgacgagggtcatgtcctcgccgtcgagggcgcttcgcgggccacccaaaaggggaggccagcgagcgacaaaaagaaaaaggccggcgctcccagcagggagcgcccagccggcaagtggtgcaccgtccacaacacttcccttcacgacctcgcggactgccgtgcagtcaaaagtttggctgagcggacgaggaagtgggaggaagagaggaggcaggagcgccgagagggcaagtccccggcggttccttccggcaatcggcgaagtgaggccaagaagaaggcccccgccgaggacatcgacgacggcgatgatgacctaggtttccaagagcctggggccaccattgccactgtcgatggaggagcgtgtgctcacatttctcgccggagcctcaaggccatgaagcgagagcttctggccgcggcccctactcatgaggcgacgcgccgggcgcggtggtcggaggttgccctaactttcgaccagaccgaccacccaccgtgcgttgcccggggagggcagattgcgatggtggtttctcccaccgtttgcaacgtgaagttggggcgtgtcctcattgatggaggagcagccctcaacatcctttcccccgcagcctttgatgccatcaaggccccggggatgatgctccggccgtcccagccaatcatcggtgtgacgccggggcacacttggccgctaggtcatatcgacctcccggtcaccttcggtggacccgccaatttccgcacggagcgagtgaacttcgatgtggcggacctcagtctgccctacaacgcggtcctggggaggcccgcgttggtgaagttcatggcggcggtccactacgcctacctccagatgaagatgccgggccccgatggccccatctctgtccatggcgacctcaaagtcgcgctcgcttgtatggagcagcgcgcggaccgcctcgccgtcgtgtccaagcccgagggtggcgacgagaggcttggcacatccgcccccgccgccccgaggcagcggatagtcacgtgcgatgaggtcccagtcaaggaggttgtcctgggcgacggcccgtccaagaccacacggatcggtggtctcttggatggcaaataggaagacgcgctcgtctctttcctgcgggcaaacgctgacgtcttcgcatggagaccggcggatatgcccggggtccccagggaggtgattgagcaccgtctcgccgtacggccgggcgcaaggccggtccggcagaaagtgcggcgccaggccccggaacgtcaagccttcatccgcgaggaggtggcgtgacttctggaggccggattcatccgcgaggtcatccatccggagtggctggcgaacccggtggtcgttcccaaggcgaacggcaagcttcgaatgtgcatcgactacaccgaccttaacaaggcatgtcctaaggatccttaccccctgcctcgcatagatcagattgtcgactccacagcggggtgcgaccttttgtgttttctagatgcatactctggttatcatcaaattcgcatggctagggaggatgaggaaaaaactgcgttcattacccccataggaacttattgttatacgacaatgcccttcgggttaaagaatgcaggtcctacttttcaacgtactactcgaatttctttgggtagccaattaggacgtaatgttgaggcttatgtcgatgacttggttgtaaagacgcgcaaccaggaaacgttactttcagatctagcggaaacttttgagagcctccgctccgcccgcataaaactgaaccccgataagtgcgtgttcggtgtacctacgggcaagcttctcgggttcttggtctctgcccgaggcatcgaggccaaccccgagaagatacgagctatagagcggatgcgcccccccagcaagcttagggatgtgcaatgcgtcaccggttgcatggtcgccctaagtcggttcatatcgaggctgggagagaaggcgttacccttatttaagctcctcaaacgctccgggccgtttacttggacggaggaggctgaacgtgccctcactcagttgaaggtgtatctcagctctcccccagttctggtcgccccagagccaaatgaacccttgctactctacttagcggcgaccccgcaagtggttagtgcggcgttggtcgtggaacgcgatgaggacaatcctcattccgcgcacccccaccttgtgccgacttggcccgggagagagcagggaggagaggcccccgagccgaacggtggcccaaggcccccgacgaccggagatggccctctgcccgcttgtcagacggtgctaggagcccccgacccccaggaaggccccgaggccactgcgggaaggccgcacctatcgccctctgaccccgaggctaaccctgtgccgatttggcccgggagagagcagggaggagaggcccccgagcagaacggtggcccaaggctcccgacgaccggagatggccctctgcccgcttgtccgacgacgccaggggcccccgacccccaggacggccccgaagccactgtgggaaggccgcccccgtcgtcctccgaccccgaggtcgtcggcacagaagacgagtgcgccccgcgaggccgctcgggtgaagagcgccccagggatgcggcccctagcgaaaaggatcggccccaccgaaaggtgcagcggcccgtctactttgttagtgaggccctccgggatgccaagacccgataccctcaggcccagaaaatgctttacgctgttctgatggcctcgaggaaactgcgccattatttccaggcgcatcgggtcactgtggttacgtcttaccccctcggtcaaatcttgcataatcgagagggtactggacgggtggtgaaatgggcaatcgaactttctgagtttgatttgcactttgaaccacgccacgctatcaagagccaggccctcgccgactttgtggcagaatggaccccggctcccgagctcgtctcggtccccgaaaccggctcgggtccctcgcagctgcctcacaccgcccactgggtgatgcagttcgacggctccctgtctcttcagggcgccggtgcgggggtcacgttgacctctccgagtggagacgtcctcaaatacttggtccgcctcgactttcgagcgaccaataatatggcagagtacgagggactccttgccggactcagagtggcagctggactggggatccgccgcctcctggtgttaggcgattcccagctggtcgttaaccaagtctgtaaggagtaccggtgctctgactcgcagatggacgcctacgtgcgccaagtacggcgtatggagcgccattttgacgggattgagcttcggcacgttcccagacgggataacatgatggccgacgagctctcacggctcgcgtcctcgcgagcccagaccccaccgggcgcctttgaagaaaggcttgcccagccgtcggcgcgacccgaccccttaggggagacggatgcgcctaaccggcccccgaggcccgtcggagtccaggcctcgggacccgaggggagtgctcccagctcccttagattgattgcttggatcgccgagatccaagcatacctcacagataagactctacccgaggaccgcgaagggagtgaacgcgtccatcgcatctccaaacgctacgtgctggtagaagggaccctctatcggcgcgcggctaatggaatcctcctgaagtgcactcctcgggaacaaggcgttgtgcttcttgccgatatccatgaaggcgaatgcggagcacactccgcctcgcgcaccttggttggtaaagcttttcgccaaggtttctattggccgacagctctcaatgatgcggtcgacctggtccaccgatgtagagcgtgtcaattccacgccaagcaaatccatcagccggcccaggccctgcagaccataccactttcgtggccatttgctgtctggggactcgatatcctgggaccgtttaggcgggccccgggcgggtttgagtatctgtatgtcgcgatcgacaagttcactaagtggcccgaggcttatccggtcgtcaagatcgataagcactccgcacttaaattcattaagggcatcacggcccggtttggagtgcctaaccgtattattacggataatggcacccaattcactagtgaactcttcggcgactactgcgaagacatgggcatcaagctctgcttcgcctcacctgcccaccccagaagcaatggccaagtggagcgcgccaatgcagaaatcctcaaaggccttaaaaccaagaccttcaatattctcaagaaacacggcgattcatggatcgaggagttgccagcggtgctctaggcgaaccgaaccacaccaagccgagcaaccggggaaacgcctttcttcctcgtctacggcgcagaagcggttctcccatccgagctcaccctgaggtctcctcgggccaccatgtactgcgaggctgatcaagatcagctttgtagagatgacctcgactacttggaagaacgaaggcggcgtgcggccctccgagccgcacgctaccagcagagcctgcggcgctaccatcagcgccacgtccgggcccgatcactctgcgtcgacgacctcgtcttacgccgcgtccaaacgcgtgctagattgagcaagctctcaccaatgtgggagggtccgtatcgagtgatcggcgtcccccggccgggctccatacggctggccatgggcgacggcactgagttgcctaacccatggaacatcgagcaccttcgtcgcttctacccctgaggggggggtcgggtgtcaggtttcgggctcgggccaaccccgtaccccccccctcgggtgtgcatggttggccgggggctaccacacatgcacattctcttttctcttatttcagtatttcaataaaagcagtttcaatttcctaagggctgtatctgtgccgttttttcctttttgaagaattttgacttgaaataagatcactcgtgctcaaccttgccctcgggggctcggttcggtcagctaaaatcgccaaacggggcccagaaccgagccgtgccctggggcgtggtgaactccgggggggggaatcggcaaaaacccacaatcgggtcacccataaccctcggtcaccacgttcccggcctggccagcctcgacatgtggatctccccaggcactagccccgacccgcgcctttcgaggactgggacttgggcacgagtccttaaatcaagctaagacacaaaaggaccacggcacagatcatcctcatctcatttgtatagcaaagtaaaattaacacaaaaattttcatcatttttgattgcagattaagttgatctatacaaaaaagaggcctgaaggccttagaagaaagaaaaagaaaaaactagagattagcgggggcctgggggctcaatccgatgcgcccgggtcgccggcctcgtcgtcactgtcgtctgcaccgctggcgtcgccctcctcgtcggagttgggggcgaacgcgagccgaggggccgagccctcgaagctgtggacgatgtggtcggcggcatcccggacctgcgcgcgcgcgctgtcttcagtcccaggagggaactcatccagcgccatccacggagagaagttggggtccctggcctggtagctcgccaggacgagctccaccgctccttgggcgaggtccctcgaggatgacttgacggtcttctcgagctcctcggggagctgctggagagccccggccatcttcgagaggtgctgagcgaggcctccctggttggtggagtacttcattgtctggcctttccagaggcccgcctgccgaccggcgcgatccagatgggagactgcatcccaaagcatgccgggccctatctcgcccgccaagcggagggcctcggcttccccggcggatgagtctagcgcgcgctgcatgtcggcgatggtgagttcggtagctgcgaggcgggtggctaagtcactttcgcccgcagccgccccgccgctgcgtgccctcgagtccagctccttctcccgcgcctcgaggtcagcggcccgctggtccagtgcggccctctcggcgcggacacattctagattgcggcgtgcctgctccgccagcgctgcctcacggagggacaggctgtccgtcaaccgttgcgccgcggcctcggcctcttcgagagctcgctcccgctcggtaagcgcgtcctcgcggaggcggagtgcagactcctcttcggcgcaggcagactcgtgcgccgccagcgttgcctcccggatggcgacggcggcctcgcggtccgccaggtccttctccacgacgcaggcgcgctcttccagcgccatggcacgcgcctcaagggcctcttcacgccgccggagcgccgtttcggtctccgttgctcgctgctctcgggcagcggcggcatcaaggaccccctgggcggcgtcgagctttttctttagctccgcctcccagctcccgtattgaaggcggagggtgtcctgcgcctcgttcatcacggtggtggcgatgagggcagccccccgctcctcctccacctcttgagcgatctccgccagcgccgtcttacgggcttcaagatctgagacgtgccggcggtgtgccttgcggcccgcttccaccatggcctccaccgatcgccgcccctcctcgacacgcgcccatgcggcgtcgagctccgcacgctccgcctgcagggcctccacctgggcacttaacccatccaacaccgcggtgtttgcggcggctaaggcctgcagaaggggctctgcgctcagcggggcgacggaaggcgtggggaagagctgccttggagaagatgtcgcgcggctcggcccgccaatggacgtgccggactcggggatgttccccggacctgtttggtcctgggcgtcgcccgaaggagtgggcccaggcgacgcgcccgcagcctcgtcgccagctgccccggaagttgtcgcctgagcgtcgcccgagggagtgggcccaagcgatgcgcccgcgacctcgtcgcgagctgcctcggaagaaaccattgcctcgtcctggcgaaatccggctttctcccgagcggcttcctcggcctggtgggctcgggcggcctcctcccgagcggtatcctcagcctggcgagcccgggcggcctcccgggcggcctcttcagcttcccgtaggcgatctgcggcctctcgccggtcagattctcgcctccgtgcctctgcggccgccggatcctcggcctcagattggccagacttggaatgacgggagggacgcgacgggatctcgctaaaacagaagaaaagaccagaagacgaacaaagacgggtgagtgaaaactcgcgttgaagagaatggatacagccacgatgagtgagagatgaacctgcgagggggtcggttgaacgaccactttggaggggagatgaggtttccccgagatggttctgtctcccccatcttgcggagccgtttcttcttgcgctccccctcgggctgtgatgttggcgcggccccctccgggcgcctgctgctggcacgcactgccccgccccctcggggaggagatgggggaggtgttcgtcccagcttcctcttcccccggtcgtcgatagggcggttgctccccgagcccctgacgcggggcccagaagcacgaccccctcctggggtagattgatcccccttgcggctcccgcctgcgccgtcgtggccctttggagctccctcctctgaggccccgactgccgtcataatggtcaagatggaggcgcggtctggatcgctgcagagggggaggattccttggggaatgagggccgcctccacggagttgagattcagcacccgttggaccaatatcttgaagtcctcaggagcccagtcccatctcactccctggtgggtcctcatgtagtcttcggacccggtgtactcccaggcgccccgagcgcgccgctggagcggcgcaatccgacgacggaggtagtcgccatacaccatggcccctgtgagcccctgggatcgcaggcccgccaggcggtcgaggacagcgtcatagccatcccccagatctaccggcgcccgccaactggaggcctgcgccgggggctggctcggaagtcggaggcgcgcttcgtcggcgaggggagtgtagaaccaatcgctcttccagtcgtcccacttcttgcggagggcgcaggggatgtagcggttcagcgccggcccccgtggctggaagtagcagccaccgactaccgatggcggcgacaccgactgcacggtaaagaaccaccggaacagccgaagagatgggcgcaccccaatgaacatctcgcacagatgcgcgaagatggccaatgtcatcaccgcgttgggggtgaggtgcgccatctggagatcgtagaactccagaacatccatgaagaaagaagaaaatagcggaaccagccctgccattgcaaaagggagaaagaagacggaccgccccgggtagtctgtgtcgcgaccgggaaaattgccttttcccgaacgccagtgtattaatccccgtcccaggaaaagccggggtacaccacacaaacatggtataaaagacacatctttattatatcgataatatttacattattacaaaggcacttcaggcctgacaaacaaaaataaacagcagcggactagcgggcctacggctccatcttcacaggcgctcaactggggtataagccaggactccacctaagacttcttctccaaagcttctcttactgaaggggggaaaagattgagcaagaatgagtacaaccacagtactcagcaggccacaccggagatgcacaattaatgcaaaggagtacaaggggataataagataggggttaagttttgcagtaaacggcatttaaaagtcacttagttgcccaaagccattttataaagacgatcctagagctacacagtattattaatcaaggccgtgaacccacacgaacctgccttaacccaaggcctacgatgattcagaccgaactggcaacccgaccctgggtcccagctcgtcccaagccaacccaggccaaccattccacattttagttgttgagcaaattttaagaattaaaacactgacttgggtacattgctcggcttgcccataaccgagggcgcggctattcgaatagattatactctgatcagaggtgtacatctttacccacaagacacatcttcctcacgtgtaaccacgtgccacataccaccacggtatacggacggaagacgtgacatagttcccaacccatcctagccataaacaagagtaccgacccaatcctgcctacggccggaacccccgggacaggcaggcaggactgagccccaagcagcagggcaccaaccctctgccacgacatctcgactaccgggccgcagctcgtgtagccttcatttgccctggagaatgtccatcgacccccgacttcatccatctccaatccgtgtacttttgtttataaccagactgagccacaaactaagccttacccactagacatgtggaagtacggtagtgctttgcaacagaggcccgagcttaatccttatagtggccggggtgctacttcccacaactggcatgcacccaaaccccaccgaaaacaggttttaggggttttgaaaggggaagagaggtgtatgtccaattccaccataaaccaacaattccaaagtgtccaaatgatatgagaattcccaaagtctaaagttataaaatcacctaatgttgcctaattaaccagcgaagcatctacctaagttcatactagtggaaccataaatagagtacccactagttggggttttattttcctagggtgaacaaggtaataataacaatagcaataataatgtcttaacaacgataaataggcatggctaaataaaacagtgataacgcgggaatttaaataaagcggtaatgcaataatttaaatcaaaataattttataaactgtgattcaatatgctcaaggatgatgtgacttgccttgctcgctttcccaaacaccggcttcaacttccacgaagagcggatcttccgaagctgcagcgtctacacgactaacggaaaagaaacggcttttactctaataaactccacataacagcagaaacaaagcacaaaaatgggttcttgacttcttaaggaaaaattagagacttgaacggtccaattccgagttcaaatggccaagatatagccatttgaagtttatatgctctttaaatggatatttacgaatttcttcatttaaattttaattaaaaactcatttattgcgtcagccgggagagagggcgcgcggaccgggtccacgggagtggggcccacgcgtcagcctctcggtccacggtggaccgggtgcacgcggctgacggcggccggcgccgtgggtcccacgcgtcagccgcacccgcgggcgcgggcggctgacggccgggccccacctggcagccgcggggcgcgcccgaaggcggcctcgccggcacggccgacgggagacggcgcgcccgcgccccgatggtcaccgccggcgaccaccggcgcggcggagcggcgcccgagagagcggagaagagagggaagcgaaaggggcggtccacggttcaccccgggacgacgaggacggcggaaacgacgaccggagtggaggaaagcggcggcgcggttcgggacggcgaggacgacggtgctccggcggtcggcgggcgaaacggaggagcggacgaggtcgacgacgacgcggcgaagccgatggaggtgacgccgagacgggaggaagtccggggcgacgacggcggcgaaccggagctcggcggcgacggcggagagagaggaggacggcgcgagcacgaatccgacggggagagcgagcggcgagcggcggaaacggaggagagaggcacggggaacaattatatagcgccgggagggagagagagaggccggaggggaaggaaacggccgcggcgatctcgggcgccattgatgccggcgaggtttaggggaaagattccgagcgaatccgagggagagagagagggaaaagcggggggaaacggagagggaatcacggggagtgatttccccctctttaatgcgcgcggggatggcgggatgcggcggaatccgcggcggcggcggcgctagggcacgggcgggcggcgggagcggcgcgaggaaggcgatgacaggtgggccccacccgtcagcgagggtggcgggcgggcccgcctgtcagcggcgtgcgcgcgggggaggggccgagtgggccgcggggaggagagagagggaaagagcgaggtgggccgagccggcccaagagaggaagggggggaagaagacttcttttagggtttttctttttataaacctttttaactttgtttatttcttaataattattatttgtgctctgaaaattccactaaaatttgagggctctttttagaccaaggagaatttaacaaaaattctccgggccacatttgaatttttcttgtacgtattttagtgtttgccaatttcttttcgaattttaattaattctattattccttttagcgaatgatttttaattcgggatgaatttatcaggacgtgacagtctggcgccgggcgtccctcgcccagcgtgactatctcccggccggtggccgattccggcatgaagcggcgcggcagcccagcctgcctctcgctcacgatgcgggagggcggcagcacgctaccatcgagcagagcggagccccgtgccatggcgccggaggaagagaagattaagagcgagcgcgtgtggcgagggtagggcgcaggaaaggaggagttagggcgcaagcagcaaagacaaggggaataatggcgaaaggaaggaaacaagtcccttcctcagtgcctttatacccttgccaacgctatgcccggctcctcgtttctcgcgcccactatttcgccccctcgtttctcgcgcccacgcttccactaatcccattcgcccgcttgcggcgcatgaggtggatatgcggttgtggcggtcgaggtagatcatatcgtgcgcgcgttaattacgctcgccaaccgaagcgacgttaccatatcttcagatgaaacgaatcgccatgtccagattcgtgtgctactcgagtaatgtggcagtcttgaagagaccgctcattgttgacagccgaattaccactgccgatgtgcgtgatttgtgaccgtttggttttctgcccaattgtggagaccggtcccacctgtcaccaggccttaggagtggcgtcacgcccgaccgcttcccttaaggagggcgatcgccctggcataacgccgggggctactgtcggtgacatgggatcgggagtatcatgactagaggtttgaggcagacacaatcgcccacgtggcctggcaccctcgggggacgtcgggcccgagggtgatgtgttcgccctcctcttagtccccccgagggggtcgggctgcacccccctcggccccgagggccgaggcgccctgacccctcgtgggttttcgctccgcgtgtatgggttaggtgagcacagtggggctcacctaaccacattaattgcggtttggctgagcgtgtcacaccgcatgtagcgcagtgcagtgcactcgtttatccggtctgtgaccagtcacagaccggtcagatcgcgggttaggtggcggcaggcggtctgacgcacgcctcgccccatcccgtcaggacgagggcttctaggcgctcgtccccagctggagctagcgtgttacctcccagagatggcacgttagccctgatcagatatatgccaggcttcatcctaaccattacaagcaaaatgtagtgtgaaggagagccaacgtgcagatagctaagctgacgcgtggtggacaagaatgaccgatttgtgaccattctgacaccggtcatgtcgccagcagacagccatgattctacgtcgcgcctgctcccggcgaaagtggaggtaggtgcgggccgttccatcagaaggtgactcgaacggcaaccatgcaaatctccgtctatttctgagaaggtgggggaaatccccacagaaaaaagagggaaatggtgcatgtggtatccccttaagatataaaaggaggaccttgaccactgagagaagggggagctttttcttggattgattttttccagattcggaacctagaacaagggagaggttggctcacactttgtagctgcttcatacacagatccaccaaaacacaggagtagggtattacgcttctcagcggcccgaacctgtatacatcgccggtgtcttctgtgcttccggtctcgcgaaccttccacatacagattgggagcttagagtctcacctagggtccccggccgaaccggcaaaggggggccagcgcggtctcccggtgaggagccccatgctccgtcacaggtgattgggatagatcggtcatcatgccgagaccgtataaatcacttagatcgaaatatacatctataacaggactatatatgtttatagcgtagccgatcagatagatctagcgtgtatcggctaatactccgatactactctatattaagatattgaagcaataataatatatcaaacaagagtttaacatatttagttatggcagtatcttaacataaatggcagatttaacatattaatgaagcaaataggataactgtagttaaatcagatacgatcggctgaaactccgatgctattctaatcaacaactaggtggcaggctagagatcaatattctaagcacgacttaatagatcaaactcgattgatgcagcattaagtatgaaaagaagaacaatatctagacaatcaagccgctagaagattcatagaatggtagatatcttatataatctaaatcaacgttgagatctaacctaatcggctgtcttttgcgtgcaaatgtctgccgaagatagattagacaatgatactgctatagattatgtaaaatatatgataacttgacgaattatataaatgagatacgagtgtcatgaagatggaagcgctaatccctaagaacataattcgtcataacgagttttacctcttgtcgaagatcgaaaccgatgcagctcaacccgaaagcaagaactcgtcgaaataaaactaaagcaaaaggtggcgatgcgccggaattatattgaatgtgtctgtctaaattacatagggctcggggtctatttatacccgaggattacaagatatgcccataccggacacgactattatctctaacaaactctaaactatcacaagtctttgcggcagactcttgcccacacttatctataaggaatttacataaataatcctaattaatagatacaattgatttcccaggactctatccatgcgtggcaatcatcttgaagcacatcaacctgagccggacgtcgcgcacaagttcttttgtcagaatcgactgtatcggcttatttagcttaacccgacattaggcgatcctagccatagccgatcctaaccgtagccgattcagactccagccgattcttgctctgttccagaactcgatctccgcctccaactcttcttgaccaaatcccctttactgatacgaatacttaccaaattctgttgttaacagtggcgcatacaactatacgatacgggggctgctagctggcgcgtgcgcgccaacagcgagcactccctcctcccctttagtcttaaccactatattagttaatatagttaacactaatggtggtaactaggaaagattctggagattttttgggagatttttttactaacagattgaaaatattttaggttagatttgaaaactttcgatttaagttttaaattttaaagtcaaattttgaaaactttcaactcagatttgaaaactttcaactcgagaatcgagattcaaaaactttcaagtccagatttgaaaattttgaaaactttcaatttgagatttgaaaactttcaactcgagattcgaaaactttcaactcgagatttgaaaactttcaactcgagatttgaaaattttgaaaactttcaaatcgagatatgtaaactttctagtcgagatttgaaaactttcaagtttaggtttgaaaattttcaactcaaaatttataaactttcaaactcaaaacatgataaagataaaaaaaatcagaaaaaagtaggaaagaaaaggaaaaaaaggttaaaaaaacgaaaaaaagcgcggagaagtcgcgcgtgcgccgacgcagcggcgctgggccttctgggcctgaaacgcgcgccgccggcagcacgcgcgctaactagcattagcgcggacttaccgggggttcctaggaggcgcgtgcgcgccgactgcttaattcgcgcagccgcgcgcgtctcctcgacgtcttgtccgcgcgcttccgccgctaattatggcaattagtgttaattactgtcattagtattatttttaaaacagtaacaacgtaaataattcagttaccagttttttttagaaaagtaatggaaagttttaaatttgtagtcaaaagattttgaaatttgagctgaaaattttaaattttgatttcaactttttaaattttgatatagaagttttcaagttgagttgaaagttttcaaaattgaagttgaaagtttttaaatttgagtaaaaagtttcaaaaattgagttgaaagttttgaaatttgacttgaaagtttgtaatttgatttgaaagtttcgaatttttagttgaaagtttttgaattgagatgaaaattctaaaattgtgagttgaaaactttcaaatttgaatcgaaagtttttgaattttgagatgaaaattctaaaattgtgagttgaaaactttcaaatttaaatcgaaagttttcaaatgctgagtggaaagttttcaaattttgagttgaaagttttcaaaattttcaatttaaaaatttaatcttctgttaaaaagtttagttaaatgttctaatcactgcgtgcatgtatgtacgtggattgtccaattacaattaggagatactattactaattgagtgtgttactcaacgtgcatatggggcatatatacgtacatgactgaatcatcgttaatcaccgttgaaaagtcactaggcccagcaggcccatgtcagacgcgaagctgaggcgctgccgtcgcgaaacgctcgctgacttgcgggaactagcaatcttgatacgggcgtcctgcactgctcgagccatgcgcgtacaaccagacgtgtataaacacatggtggacgtactttgacctgaaaaagaaatatacatggtgcacagtggagaaggggtggacaggacagaggacacacgggactagtttgtggatgcaagactctttcggtaatgaattacaaacaacgccttgcatgattgcatcatcgccctaaattgaaacagcgatgatatgataccatctctggttgttgcatttagcgacaggcgatcagatcagaggaacgccggtaataactgaactatcgtcgtcctagctagttctcaggcggactgggaggggtcgaagtaggcggcgtgtcctcccgacgagatgtcagcggttgagatgaagacggcgtgcgtgaccggcgggaacgggtatatcgcttcggcgctcatcaagatgctgcttcagaagggatatgctgtcaacacgacggtcagaaacccaggtggtattatttcccgttttaatcttctgttcatacgtattcagcccttgttaagttccaaacatttttatcaaacttccaacttttccatcacatcaaaacttttctacacacaaacttccaacttttccatattctaatttcaagcaaacctccaattttgacgtgaactaagcacagttaaagttttccttcctttcagattcaggggtggaatctttggtccgcagtagcatattttctgaattgtcgtcatgaacaacagaaagaaagtcctactttgtgataaaaaagattctagaaaaataataagatatataccaatccagagatatattcaaatttcaacttatacaattattagaacaaaaataacaaatttggttgcaaattacacgttttatttgagtcaaatttgtcgttttcatttctacttatgtaagctgattttgaacttgtattgtttgtgaaataatatatcacatattgatcaatcttgttaattttttaagaaaaataatgattttttttggcgaaatgcaaaataacgagagaacattcccgaggatgaatatttttttcgcgaacgcgcaaaaagattgcacttcaatatatattagaagaaaatgagtttttgttacacaacacaatcagccagactggcttatgccaaggaaagaggaaaaaagcaaaaaaaaaaaaaagtaaactaaagcttaggaagtactacggcggctaaacgcaactcctaacagcgggaaggggcatagccacgctacactcccaaaaaatccccaaaagtggcaccacagatgaccctccgagaggatggattccaggaccacagggactgaagagagcaccgagtcaaaaacccagaagttccgttccttccacggctgccaagagaccagagcaccagggtcctgaggatgaatagaattttcccttctacttagcaaatgccaaatgccactcttacctgcaccatgtagaaaatattttttttagataatgtagaaaatatttacatgttcaaaccgatagtcgcacctaattcatatagtgaaatatgctggaaaggatgcaaatcgttatgatctcaattctcaagacgacgctactacgagtttccagagttcagttctgcctctgaagatcctactcttgtgtattcagatgacatgaagaagacttcccatctcaaggacttggaagcactaggccccttggaggtcttccgcgctgacatggacgaagaaggcagcttcgacgatgccgttgccggctgcgattacgccttcctcgtcgccgctccggtgaatttccagtcacagaatcctgaggtgaacagctagctaattagcgcgctttctctaatcgacaccactgcatgttgtgttgtctcatctctgatgatatatatatatatatatatatatatatgctctctaagtctccagttctgaaattaatttgctcttgatttctacgatgacaaagctgcatttgtacgttaatttatggcagaaagagcttattgaagccggcgtccaaggaaccatgaatgtgatgaggtcgtgcgtgagagccggcacggtgaagcgcgtgatcctcacatcgtcggcgcccgccgtctccggcaggccgctgcaaggcgacggccatgtcctggacgaggattcctggtccgacgtcgagtacctgacgaaagagaagccaccagcttgggtcacgttctaccttttttgagcctccatctcatccctacaatttttttgataatgcatagaaatccatctctatatccactcaaacaaacgttacgaatagaagtacttaaactctaaaaagaagaaacaatgctactactagaagactagtatactccataaagatgatgacgccctaatgcttatagatggccatatggctcgagacccgcggcccagcccaaggcatgccaatttagcccggcccaagcacgtcacagcccaaccggggtcgtgctcgtgccggcctgacccgacagccgggctgtgcttgggccactcccttggcacggtggaccggtccggcacggcatgatcgaacaaaaatagtggagggatgtaaaatagacttatgctagcccaaagacaagaggaatacaaaatagatttatttttcagccatatgaacacagcccacagagtttaggtaggaaaaatagacttattctgtagagaagcacgataggttgtcgtgccttcgggctagcccagcacggcttgagtcttactgggccgtgtgtgtagcccgtgagctggcacggcacgtcccggtgtgtagggccaggccggcccgactgacctcaccctaggcatggctgtgccgggcgatctatttggcatctatactaacgttagcataccccattattgtttttcgcaggcgtatagtgtctcaaaggtgctcatggagaaggcagcatgcaaattagcggaggagaacaacatcagcctcatcaccgtgttcccggtgttcactttgggtgcagcgccgacgccgacggccgcaacaagcgtctcagctatgctctccttgctatctagtgagaacctgatcgagagacatgcgccaaattagtttaagaagatcagcgagcacaaattcgactgatcgatgctagctgttttctgttttttcaggtgatgagacgcagctaaaaaccctgaaaggcctggcagcaaccggccccattccgacagttcacgtggacgacctctgccgcgccgaggtattcgtcgccgagaaggagtcggcgtcggggaggtacatctgcagcagcctcagcaccaccgtcgtggcattcgcccgtttcgtggcaggaaagcaccctcggtacaacgtcaaaactgacgggtacgtacttacgtacgaactggcaatctggcactctcagtttcgagttatagcgacacaaacttctactacattcgttttaaaaaaaatccaattctaaatttgaatctggacataaattcaggattgggtttttttttacggaggtagtacggtgaatcagggaagagaactgacggtgaatcggtgatcgtctcttgtatgcgtatattggcagcttccaagggttccctgagaagccgagagtgtgctattcgtcggagaagctggtgagggaagggttcgagttcaagtggacggatctggacgaggtatttgacgacctcatcgagtatggcaaggtcctggggattctaccgcaatgaaccgctgatgatgctccttcactttggagtttggactggtcactcttgtgtgaaatgaagtcattgtcgtggtgtgttagtacttgtcacgacacacggtatggcaagatacgataagtacttctattgttatgggctctactacaaataaggaagcgatggatcggccgcacaaattaggcccatcacaatgcaagcgtcatatcccgcacgattctgaatcacaccacgcgacgcgacgcccgcacgggcaacagcgacaccgcactccgcacgcaggcacccgcgatcgcagcggaaaccgccacataatgctgttcgcgatgagcccccccgcgtaccggtgaatctgcgtgcgccacgcgcgcgcgacgccacgcgacgcgtgcagaatcgatcgcgcgcggccgggatgggatccggacgggacgacgattgatctcggagcgagtgaggtgcggcgttaagatccaacgcaggagtcgtgacatcctgcacgtacgtacacgtgctggacttggactgacgtggtggcagcagctactactgcatgccaaaacccttgagacgtcgcgagcgaatagaacgccactgcccgggcggacaccatgtgggactaaaaaaacgtacacgatcgtacgtgctcgatcgatgacgggagaattggaagggagcgcatggtggacacgaggaaaagagaagatttagaaggaacgtatggtgaagtattagtatataatttattactccttctgttctagattacaagacgttttaactgttttaagtttgaacaattttgtaaaaaaaatactaagacaaatttattaaaaaacatatttaattattgatttgatgaaactaatttagtattataaatattactatattacctataaactttgactttgaccaaagttaaaacgtcttataacctaaaacggagagtaattataaactatcttgaatttaaaaataagttaatatgatttttagaataatttttctatataattttcttaaaaaaatccatcaatagttcgggaaacgtgtgtgcagagaatgagagaaatcttttctcagtgtacaactgcataacacggtcttaaagagaaatcttctctcaatatatagctgccgaactaaataatcatagttctccataaaaatgaaaaaaaaaaaccttatcattagggatgtgtcgggcatggccagctatgggcacttgggcagcagtgcagcactgccccactccgatacatcgatggcaatccttttcttctcagccggataaagccttgtagatataaaaaattgacttctcaaatcatctggttggactatgagtagaccaaatacattacgcacatttctcttgagcatatatacgccactaataaacagctcaagacaaccaaacgcaggcgcccatatcagccacggcatgcattgccatacttaatccatgttagattcaaagtcgccttatcggataggtatttttgtgcagcacggcaacctgtccaaaaagcacacaagtactagtacatgactgtaaaatgcaaagccaatcgcaattacagtcttccaattccaacttgtccaaagatacttcaccttggagtgcgtttagtttacgttaaaattaaaaatttggttgaaattgaaacgatgtgacaaaaaaagttaaaattttatatgtgtaaaaaagttttgacgtgatgaaaaagttgaaagtttgaaaaaaaaaaggtttagaactaaactcagccctaatgcatccaacgatggtaatcaccacgccagatgtgacaaatacgctgtagatccaaatcctggatcggaagagcatgtactagcagtagtccagaaaaatgattttgtcgcaactgttgacagtaagcagagttaagaaactgcgtaaataacttccaaataaaacaaacaaaacacacacaactcacacaaagtacacaactcacaaacacaggcaactcgctctccctacaaatacaacagggcgcaccgtgcaaaaacgcatcgccccccacgccaccgagcgacacgcacgcacgcacacgcgcgcgccgaccgagcggatagccatgtcgacggaggcgctcctcgccggcggaggcggcggtggcggtggaggcgaggtgaagcggcgcgtgagcatcgacgacgcgctggcgtggcacgcgggggagttcgggcggtggcagctgcggcacttcgtgctggtgtcgtcggcgtggctgctggaggcgctgcacaccatggtcatcatcttcgccgaccgggagccggccatggtgtgcgccgccggggacggccggtgcggcgaccgctgcgccggcgccggcgccgccgcggggaccgggtgggagtgggccagcgggcgcgcctcgtcgacggtgtccgagtggggcctcgtctgcggcgagcggtacaaggtcggcctcgtccaggccatcttcttcgccggatgcatgattggtcagtgctccaattctcgtccaaattaccttcgtttccaagtagtttttttttttgacgaattacgcaacggaatgccaaaatgcaaaatactaagattggatgaaacgcttgccttaattgtggcatcgacgtgagaggcaatacgtaatatacgagactaatccgtgaaacaaaaataggctagcatttcaaactagattggacgatggattgcagaccgcgacgttccgggagatttcgtggtggtgcatttttgcagcccggaatcgtacgtgtggctccagctagtttggttgcatacggccgcatcttggagctagctagccagccagccagccagccagccaacatcccagcgtgtgctactgtagttcattgtcccatccgtttaatttttctactagtaacagataaagggtccgatttactactgaacaattgcatatttgcatcacactcgttaacaatttagattggttgtcattacacatgagattagatttgacaggtcaactttatgccatcagccactcagcattagcatcgtcgacataatggatgtaaattactgagcattatctgcacaagcggcgccgtgccaatgcctcccttatctttccgcggctgctggcggctgggagattaattaattaggttccggacagttcggtgttcagcttttgcttgactcctgtaccgtcttaacatcatctttcgctaactttaattccaaaagctgtcgatcgatcgaacccaatatgctgcctggaccctgttagccgtgggttcctgcatgcgtggctgcgctcactgtcgttatttgctttagcccaacctgtcactgttgttaacctactgtcaatataattgatcaggtcactgaattgattacgttatctcacggtgctcgatgaaaagctagccgtctagttcggctgatctgatctaaatcacgtggcaataggccggatgcagattgtgtctcgcagaaatttccttccttgtttctcagcgcatgtttaaatagctgttattttcaagctttttgtttggattggccagaacaagatatactttcgaatcttttgactggtactagcatctccctgcctgacaccggtatctttggaattttggatggggactggaagccaagatgtgagatcaataaatcatttgaatcgcattatatcggttactacataatcaccaaaatcaagcttgtcgaatcctggtagtgatcaatagctcctaaccttttttttttagaactactaatagctacttcaccatgtctgtttcggcggtggcattaaccagtcaagatcgccggcgctggtggcccatttgggcctaattttcatcatcaacgtaggctagttattaggctgggccttggcccagtagctgacacagtcgatgggccagttttcctttcctttttgatttggtgacagaagtaattgtagctgagttccacaaagaaaaagaaaaaaaaaagaagtagaaataattttagctgtgttgtcttggcaggcgccggcgtgttcggacacctatcggattcgttcctcggtcggaagggctcgctgcaggtggtctgcgtcctcaatggcgtcttcggcatgctcaccgcgatggcgcccaactactgggcgtacgccgcgctgcgcctcctcaccggcttcagcgccggcagcgtcggcctctgctccttcgtcctcgccaccgagcccgtcggcccctcccgacgcggcgccgcggggatgtccaccttctacttcttctccggcgggatcgccgccctcgccggcatcgcggcgctgttcccgacgtcctggaggatgctctacgtggtcacgtccctgccgtcgctcgtgttcgtcgtcgccgtgctgccgttcgtctcggagtccccgcggtggtacctcgtgcgccgccgcgccgacgacgcgatgcgcgtcgtgcgcgccatcgcgtccagcaatggcaggagcattcctgacgacgtgtccctcaagctcgacgacgagggagacgacgacaacggcgccggcgcaggcaaggtcgtcgactcgtcagcgtcggcgtcgggctccatcatcgacgtgttccggtcgcggacgacgaggttcaggctggtgctctcggtggtgatcaacctgctcgcctcggtggtgtactacggcctcagcctcaacgtcgtcaacctcaagaccaacctctacgtcagcgtcctggtgaactcgctcgccgagatgcccgcctacctcctcaccgcgctgctcctcgaccgcttcggccggaagccgctcgccatcggcaccatgcttctcagcggcatctcctgctccgccggcagcctcatcgccggcgccggcgccatgaggtatacgtaatctccaatcatccaatcaaattcagctacgcgaacaaatttctgatcgatagagggcagggtggcgaggctggcgtgcggggtggtggggatcttcggcatggcggcgacgtacaacctgctgttcatctacacggcggagctgttcccgacggcggtgcggaacgcggcgctggggtgcacgtcgcaggcgtcgcagatgggcgccatcctggcgccgctggtggtggtgctcggggagcgcgtgccgttcgcgctgttcggcgtgtcgggcctcgtcggcgggttcctcgtgttctgcctgccggagacgaagaacaagcccatgtacgacaccatggccggcctggaggaaggggagaagaccctcctaaaatgatcatggaaaacatgcatgtgatgcgagtgattctgctcggaatcggcgggaattggtggattcttctacgtgttggtcgctcgtgcaaccggagacaaattgattttgggccgttttccgctggaaacaccgtgtttgggctgggcttttgtgactacgctcatgagtcgccctggctactaccacagcaagtctactaagcagtacagctacagcaaatttctttcggaatcctgactacacttgctgtgttgctctgttcccgtcttaatttcttcctttctcattcaggagctagtaatgaaaacgctgaaccgatcagcctccatcatgaaacctgcttcgtaccagtaactactactgtgagtacctgatcgaaattcattgtcgtttgaatgggtagttaactgagccactagccgtatttactcgtgaaacaactccaaacactgaaacgagcaggaacagagccgctgttggctgcaccggtacaagactataaagcgccgtctacttcagaatactaactgtgcacttaggctgtgtttagatctaaagtttggattcaaacttcagtccttttctatcatatcaatctgtcatacacacacaacttttcagtcacatctccaatttcaaccaaaatacaaactttggatccaactaaacacagcccttaacccacatcttggatctgcaacggcaacggtagactcagttatatactggggacatcggttagctgaataacctgaaatgtgcatcataatagtttgatcaaatcctacgggacatctgatctctatcacctgcttaccaccctagtatactcctacttctaccttccatgccgatgcgaaatgcgtgaccgcttgagacgcaagtggccatctgaaggaattcagaaatggaagcaacgacatgtccagcttcttccccatgcatccatttcccggccatggccaacaacaacgccattgccgcgggagtagtcactcggtactgtgctcaatgcgatgtgacgcgagctggttcgcaataatttcgcacgcctgacacacagaagcccatcatctcatcacacatcatcaccacacacgccgagccaaccctgtcaagtcactgccaacacgatgctgccaatggccaagggctagccactagccataaccatcacgtgttcttttttttttcatgtagtacaactcatttaggactaattaatcctcctctgagcaccattagcttcacgtactgacagtcttaaaccacacttccaaagttactagagcagttactgtacgtagtactccgtaccgtgggggcagtttactgtgctccgctgaacacaattatcagtagtacaagagatgggagaagcacagtgcgagctgcaggctgaagcgtgcacgaacgacgtttacagccagcctcaggtcgttgtcgagcagcggttgcagctcgtgtggtatactgcatacttgaatcggatgcgtcacgagtgcaacgggacaagccgagcaagtccatatcaacctatccaatgccgcggtgaacagcgacgcaccgtggcgggagcaaattttcaccgggacgacgacgaggtaaaaaatgggctcaaaaactgcagcgtccagagcagagcattcgggtcacgttgattggacggccatttatgctgtgaaatgcacggtgctgtgcggataattgtataatatacggtggccgtatatgtacgtacgagtacattcatttctcgtatacataggcgctgtttaggctgtgtttagatgtaaagtttggatccaaactttttcatcacatcaacctgtcatacacacacaacttttcagtcacatcatcttcaatttcaaccaaaatccaaactttgcgctgaactaaacacagccttagttctaaagttttttttctaaactttcaactttcgatcacatcaaacattttatacacacacaacttttcaatcacatcgtaccaatttcaaccaacttccaaatttcagtgtgaactaaacatagtcttatacagctgttagcacactagtaacagtaccacacaaaatgatattcccccattacattttaagtgcagtcataagtttctgtgttcaactttgatcctctgtcttatttaacctttttttgtaatgagtatgtccatattcatagtcatataatgggtctcatcccatcctatgctgctacattttgggacggagggagtatttttattatttttagatgataaaatataaataatacttttatgtatgacttatgttctttaattttttaaaaagtattttaaataagatatatgatcaaagatgcacacaagaacttatgactacgcttaaaatgggacagagggagcacgtaacaattttagtgcggcagtgctaatgttgacaagagtactccttacattccaaattaaactaatttagaatgagatacgagtatgagatagtatgacacacaattttactactactccccttgtctcaaaataagttaaataagatttgatccattttaatactaaaaaatccaaaggtttcaatttttaaaaggaaaacatttagaaatcctttaaacgccctaaacgttgtctctaccatcaacggtacaatttttaaatttgaaaacaaaaatcaaacacttgagacctgacagctggagagggggtccagcagcaggagaggtttgcggttttcacttcgaaaagttgcggattgaaaagatgagtccaaactcccaaaacttttgcttttccacggacgggacacgggagacggggagagtactcgcgttgtacacgggagaaaagcataattattgcaggttcagtgggtgatgtcactattatccgctgtaaaggaatgtccccacattcagtaaatatctttactggagtacagtaaaggttataaggaaaatactacagaatggtaaaccgttcggacgaaatgagtgtatccaataattatcggttgatattctgtttggacaaaagcttgatacctaatatcagctgctatctctgatgtataattccgtttgaattcgaatggaatactgtaatatgctatctccgtcttaaaatataataatttttacatagctaaaaatacttatattttaaaacgaagagagtatcattttccgaaagctaatcacgattgaaatggacaccaggcaagcacgcattggttatgcgcatcctccataccgtaccataccagcatgagccatatatcacctctttccgactgtatcttccttgaagaacaatgcagatttgcgggggatgaaagccagtaagccactgcccactagtcctactaaaatggaagcttagcgtacgattaaactctgatggcgcggtaaaaactgtaacgttaacacgagcggttttgtgacttttgtgtgaactcgacaaggacaaaagattatgcgcatcggctggggcgtcgcgaaagcgaaaggaggaggaggagagagcccgtggaatgatgcgtcatgagtttcgttctctgcagtaaaaaatcgacggggcaggagaggcatcatcgtcgttctctgcaccaaaactcatgccatcgatcgcatcgcagcatttttttcacaaccgggggggcgcctttgataaagggtggtgatggctccctgctcattcacagctggagcctacgcctccctgctccctcctggggaactgttcctaatcgagtgattagcattaactaaattggctaatcacgtggattgacagccttaaaatagggtgctggtattaggcttcgacgtcaccgcctgatccttgaatgttttttactgcttgtagtatagttgctgcagctgagattccatttctgatctgaacatctagcatttcacatttctaatccaagtaccccgtatagtgatactttgtactgctgtgttagttctacttaatcaaagacttgactataatccacacgggtaagtgggtcaatagatctgcatcaggtttttgaatgctccttccgttgcaagccatcctgcagactccatcaagccgtgctagccgtgcaatgcaagtgcaagcaggctagcaacagagggcgcagcactttatgtatcgctgatcttctacttcccctgcacgactctgtttgggccaagctgtttttactgtcacctttttttctctttaccgtgtcacgtactagtcctacatacgggcccactcgccagctgtaaccaactagtgtactgtttcacgtacggctagctggctagctgtgctgagcaagcaagagcaagcgaggcagaaacaattctttccccgactggtcacagcggctgtggccagtagccgcgtagctcagcgagagaaagaaagaaagaaagggtgtgtttagatggggaaaaggaaatttttgggtgtcatattgaacgtttgaccggatgttggaaggggtttttggacacgaatgaaaaaactaatttcagaactcgcctggaaaccgcgagacgaatcttttgagactaattaagccgtcattagcacatgtggttactgtagcgcttatggctaatcacggactaattaggcttaaaagattcgtctcgcgatttccttcataactgtgcaattagtttttctttttatctatatttaatgcttcatgcatatatccaaagattcgatataatgtttttgggaaaaaaatttggggaactaaagaggcccaagcgtgctgaaagctcgctgtgaacaaagccgcaaaagttggagaaatccacagcagctgagctgtgcacgcagactgtagtagtagtagagcgctagactgaccactggtccctatctcctgacgcgtgggtcccccgttgcccaacggctagcttggcctccgacgtggcgccctcgtgtcacgtgccacccttccaccgtaagccaaacgtctcgcctatataaacatcgcacccagcttcagcttgagattgagcccatcagtcgagtcgatcgaacagcacagcaagtgagcagtgacaatggcgtctctggccgtcgtggtggtggtggtggcggtggtgtgcgccgccggtgtggcggcggcgggcaagttcgacgacgtggtggagccgagctgggccaacgaccacgtcgtgtacgagggcgacctcctcaagctccgcctcgacagctcgtccggtacgtgttcaactgttcatcgtcttcgccgttgaagtttttgtggtgaatgggtgaagatgttctcgatctgcatttgggggacagatgaccagaatgttttgtgttgtggatgcaggcggcgggttcgcgtcgaagagcaagttcctgtacggcaaggcgaccgccgacctgaagctcgtggcgggggattccgccggagttgtcactgctttctatgtgagtgagtgcatcaggctgtgctctgtgcttcgctacgctttcctccatctgcttcgaacctgccattattgattcttcatcctgcattagcttaaacaagattaactggggtaaatgacaccattagtagtatgcactactgtagtaaatacagtacaaacgtttttcgaggcagtgttggggacatgcttgaccatgtctgtcgggggaagctgccaagaatcaatttacaaagaacagcggcacgtgaactcgtgcagcaataggacaacgttctttaaagatggccgcttttcactaatcacccccgattaatccattacttaattaactggagttaaaactaaatttagctgaatttggcttgcagctgtcgtccggcggggacaagcacaacgagttcgacttcgagttcctgggcaacgtcaccggcgagccgtacctggtgcagaccaacctgtacatcgacggcgtcggcaaccgggagcagcgcatcgacctgtggttcgaccccaccgccgacttccacacctacgccgtgctctggaaccccagccaggtcgtcttcctcgtcgacgacacccccatccgcgtctacgagaacaagaacgccaccgccgccgtcaagggccaccaccgccacgccgccgccgccaatggcaccagcaacgccacatcggcggcggcgtccgtgccgccgttcccgtcgccgcagccgatgtcggtgtacagctccatctggaacgcggacgactgggcgacgcagggcgggcgggtgaagacggactggtcgcacgcgccgttcgtggccacgttccgcgacgtccgcgtcgagggttgcgcgtgggcggcgaacgccacggactcggacgccggcgaggtggcgcggtgcacggggagctcgtggggcaaggaggggaggtactggtggaaggagaaggacatggaggagctcaccgtgcaccagaaccaccagctcgtgtgggcgcgcgcgcaccacctcgtctacgactactgcgtcgacaccgaccgcttccccgtccagccgccggagtgcgccggacggtgaccgtcgatctcgtcgccggttaggatggatcgatggatggaactgctggtttctttcttggttagcaaatcaaatggcaggtagtttatctcagatgaacttaggtgatggtagttcatcgtaattctgtgtctctgtgggggtgtatctgtaaaaaattgttactcggcttccactgctgttctgctgctgctgcatttcttcagtcttccgatctggacgatgctcacttttaacttcaaatcgaaatgcaaatgcccaatgccatcattcattcatttggtcctcctcacggtgaaaaatcaatgaatgccatctgaaagatcactgatgtattgatggctttaattcagagatcaaccgagtaataagaagaggtgtaccgagaggtacaataaacctgtggtccatttgatcgactcgtacattattactattacagatctcactgtttggggtgcaggacgagagagtccgaagagataaggcatcgatcagtactagtactaggactgaccaggcttttgccttgcccctcctcatcacgggtcagtagaatcagaatactgaaacagctgagatggtcacgagatgatgctcttgccttcgccttgatccctcttttgcatgctcactttgttctgaagggaccagcctagttttcgctttagccaaactctctcggcttgtctttcttttgccagctacacagctggacaggtcgcagtagtactatacgtatgccggtagagtggtagaccgtagagggaatgcagagcgagtgattgattggcacgttctgtaccaatgtaggactagtgtataccaccgaaaatacagatgcagatgtgccgcaacggcgcaacttggagacgtaataataccttgcttttgcttttgaatgcagcaagtgcgagagagctccaagctaggtgtacacctgtgaacgaggcaacactgtatctacggatgaaaacggccagaaaacgtttcaatcgtatccatcactatattttctcgaagacggaattcaaaacataaatactggaaagaaaacggtatcgaaaatataaaaaaaaacaactgatactacggatgattatcaacggaaaaccggtaagaaatatcagaaacattgaccataaaaatcacaattcaatttgcatagctatatgttctgatgaaataaaatcaaagttacactatgtaaattacaatttgtctttctttcaacaatagattaggggtttgattgatgaattgacgatactatagactatgggttgagtaaagaattagatcatatatatgatggcgcatttagaaacagtaaaatataacagcaaaattgtttccgttttcatttttgtcggtaaccctttccatataactcgaccagtaaaataaaaggaattgctaactggctacctgctgatctaccctataattcaccaacttgttttactcatctttcactcttacactcttacattcatcactcaacggttgagatcatccctgtgaaatccaacgctccatgtcatctccacctcccacctcgcaccataaccccaacccgactcccgtcttccacgcgattcttcctcccctttccttcccgtcttccacgctacagattgcgcctcctcaattcctcattgtctcgcgaatttttgcgcctaggtcgccctcactcgaagcgacgacaccctcgtttccctctctgcccaccatgccacgtgcaagtcctttgccgatgaccatggagagaccgtcaaaatctgttggtcgccgtcaccgatacagccgatagcgcctcctttccctattgatctgttgctagagaatggggcgagggtcaagcgcaatgcccaagcccagactccaacccaacccacaaatcgtttgcacccttctgcaccgatcgccgtaaccggtcggctgccataagcggttctctgtctacccaactcgccggtcaatagatcgcaacgccccaccacatttcgtccctggtcggctgctgcttgctcttccactaatttgatcttgcaatttcaaaatcataatgcttcagcagtggaatttgcggataaggtcaggtacatttatctcaaatttacctgattcttgatgttgcatgcaaaatttcctagccgcccgggttgccatagatgagacttgtggcgttctttttgttgatatgtctgcaaatgggatagcttaaccaaattatggagttgtggcactttactaaagtctgaatgtacatttcatttgtattatggggtataggccaacaacttttaatatgagcttttgctgtaatcttgatttaattcgttgatatgctgagggatcgtggcatccttcccattacatgttcctgatctgttctgtcagtgatgcttggtgtcaaggtacgcccactgggcttccacacgaaccatggcgaggtgctgttccgctgctgggacatggtaaaatcttttagaccaaaccatttgatgtgctagcttatatcgtgcttgtctatacctgctaaaatcacttctacaaaactgtatgatggttccggtaagaaagtcaaatcgatcggtaatgttcagaattgagaaacatgaatattgatctgtgcagtcttcaggaagtgttgagttctgtgtgagtaaatgagtatgtaagtaggggagaagcactgcaagtagtgatttgtctatggcatatatcatcatgatctgctccttgtataaagagcttcagaattcagattaatttttttagagaaataattcagattaatttcacaaactagattgatcagggttttgccgaaccttgtctatcttaacttagtgcaaatatcagtttgtcaaatcactgttcacgtttttttttcccatgtggatatgcatttgcaaataagtacgtagcagtattttggagaccttgatttggatgtaatatatatgtgtttcttgttttataatttaggtcttcttaattcatagattgccttgtacctcttgatgggtggctatcaaagctctattagtctaaaacaatagtattaatcttactttgatactttaatgtttgatatgccctttctgtaagttgttcatgggtccttgcaaaagaaacaaatgctcattgctgtctagattagtttctagaaattcgatttggaccaggtatgtccaacagaatgagattcggattttcttttggcgtactatatatggctgcaagttcgggtgcgatcgtctgaataactgaatgtactgcaaattgcaaaactagctcattaacttggatcatttaccaatttgctaagtcctattcaactgtaagctgacgttgatctacacaccttattcagtataaaagcagcacaacattatcttaacaatgaagaatgagaggctttcaacccggaaaaaaaaaagaatgaggggctttcatatgtttcgagatgcatagtgcactattttctggtctaaaatggagctgattcatatgcttgtctatacttggagcaagcaattcagtccatgaatctcctttctatgtgtattgacaatcatgactccaacacagtatgcactaacctgttttagccttttatatgcccaggcaaccagcagatctcttgcttaattgcataaaaattttaattctatgtctttgtacttaattaaaattatttatttagggaaaacgagttacatatatcgtttgcagataatgttaccatctatgtgtacacgctctactaaatcattttaaaggataaccatagctttttagtccattattaattaatttgggtataacagcgtaaccacaatcgttacttgcaacttttgatgaatgagaatagagcatttcgttatttctgaacaaatatattactgcctccgttttaggttataagattttctagcattgcccacattgatatatatatgttaatgtgtgtctagattcattaacatatatattgtaaagagaataggagagaacaccactctccccaatgaggggggtgaccatatattatagtctttccaatatacaagatccttagaggagtatacaaggaagctaaggatacaaaagaatcctatacatatatggctatacattcctaatgcccgcccgcagtcacaacaggaggatcacgaatgcaaagattggacctgaaatcagtgaacaactgcacaagcagccccttggtcatgatatcggtgaactgatgggacgacggtacatggagcacatggacctgtcttagagccaccttctcccgaacgaagtgaatgtcgatctcaatgtgcttcgtacgacgatgatgcaccggattggccgtcatgtagacagcgctgacgttgtcaccgtaaacaacggttgcagaggcgatgggagcatgaagctcctggagaagctgtcgaagccagcagcattcggcgacggcgtgagcaacagcgcggtactcagcctccgcgctagaccgggagacagtcgtctgacgcttggaagaccaagagatcggattgtcgccgaggaagacgtagtatccggaggtggagcgccgggagtcgggacagctggcccagtcggcattagaataagccgtcagagacttgacagggccggtgctgatgtggagtccggtggagagagcctttgacgtaagcgcagaatgcacttgaccaaggcaaggtggggctcccgtggatcatgcatgaagaggcagacttactgaacagcataggcgagctctggccgagtgagagtgaggtactgcagagtgcctgcaaggctcctgtactcggtcggatccttgacgggggcgccgtcggaggcggaaagcttggcccgagcatcaaccggggtggcggtggggtggcattcagacatgccggctcgctgaagaagatcgacggcgtactgtcgctgggacaggaagaggccaacggaggagcgacggacggaggttctctatcaaatatgatatttccaaaaatagccatacatatttttaaacctttcttaaatgctggatagagaattgtgatacaaatggtgattattgatgaaaaaaatagaaaacctttaattgatatttgtttatgcatgtagaagtagaaaaataatagtgaacagattacttctcttgattgcgacttgaactttcatactgagagctactccggtttgtgataataatatttaaataaatttggacctcgaaatagtaaaataatttttaagtagaaaatttgctagatatcgccgtagcgttagcatgggcaaattactagtttattttggttggttaagaatttctgtaactgtttttaccactaaccatgtttccactttctacggctccatggtgtagccgaaggcctgggttcattttaggaaggaaggcccagcagcccagtacatgacaaccatgtgcacagacctagagtttgagacaatacaaaacaaaacatgggagggcgtcatttgccaaacatagtaccacctcggaagtcttcaagaaatgaatctagcttaaaatgcaaaacctttgaccgctaagcacgaccttacttgaacaggatctgttctataggctcgtaccgttgcatccttgactaataaggaggcaagcactcaagcttggttgatgacgcatgacctgtgggccagagcgtgattgacggcccggatcatttccgtgtgaattgatcccgcggctgtagaggatcgttccttgccgggctttcgcttggtcagggttggcccataggttgtctgacaggcatcattttttttttcagttatcttcaccactccattaattaggccgttttttcaatatttaggagaagcctgaattactaacagtaaaatctttgacaagcccaagtcatccgcatgacaatccaaacagtaatttgtagatttttgtaatcatagtgtgttattatccttcatcaattgatacttctgctgctcacattgatcattcatcaattgatacttctgctgctcacattgatcatttggactacctcgtaataaatggaaatccaagttcatgctacggagcattggactgataattaaggtgttttagtcacatcatgcatatacacaacaaatctgaggtacaagatctcaacaacgtactccctccgtctaaaaaagacaaatcctaactagtgaaattaagtgagcatacatagtggtactactaaggctatgtttagatttgacataccacatcgaatatacggacgcatatttaaagtattaaatgtagtataataacaaaataaattacagaattcgccccgagatgaatttattaagtctaataaatcaatcattagcaaatgtttattgtagcaccacattattaaatcatggcgcgattaggcttaaaagattcgtttcgtaatttacacacaatctatgtgattaattattttttcgtttatatttaatactctaagcatgtatccaaacattcgatgtgacattgtgtaaaattttatcaaagggattgccctgaagactgctatgcaggtccagacttggacgaaattaaattacagcatctttcatgattatgtcaaggccctgatcacatcagctgggtcctcagaaacataaacccccatgttaaattgcattatcatcagtttgggcacggatcagtacgacagtacactattggatacaatttccatctactaatgtttacaggtggagtttttaaccacgtgatggctatgtgaaggagtaagataaactgtaggagaaaagcatttcgtagtgggccatgaagcctttcaggacatgtattgcagtatgggccggcccattacgcaattggaggacaacaaagactagtattagtaccacctcggctatccacatagatcaaagctggtttaaaagagttgtgcagatgatccatggcacgaccttacttgaacaggatctgttctataggctcgtaccgttgcatccttgactaataaggaggcaagcactcaagcttggttgatgacgcatgacctgtgggccagagcgtgattaacggccggatcatgtcactggctgattcgatcccacggctgtagaggatcgttccttgccgggcctcgcttggccaggatggctctcaggttgtctgacaggctcccaattttttttttcgttttgcattgagttttctccgtcgcatgtttgcagcgtgttcaaaaagttcgcagctgtatttcacttatttacggcgccacattttcatgccgtttgtgccaactatcccgagctagtgaatacagcttagcttcacacaacaccggtgacccgctgacctgctcgtacctcgtaccgtcgtacggcacagcattgctggaattaagggtgtgatcgatactgcttgctgctgcagcaaccgtggctgcaagagctaaaaatggctgcagcggcagcagctgaaaaacagccacagccatagcggcagcagcagatagcagttccgatcaggccctaaatccaagtcctagctaaacaggatgctccattgaacagccaaaccggcctcacatggtctatccaaggacctgccagttagccacgaaatatttcgtgaaaagccagctgaaggctgaagccctttttgcactgaaatgagtatgcgtgcgggcctgatgatccgtggcattgttgctgcggggacatccatgcactgcagggtaatggaggagctgattgagccatatgtctcgctgcaaaggcttcctcctttcggtggttagcccagagcctctcccagagatcgacccagaccagcatgcagtaatcgaatcccgttcgatgattcgatctactaaattcgcaaaggctgtagcgcgcacatggcgccaacaggcaacagtccgggccatttcgccatgccccgggggatccctctgacgcctcacttgagattccttgaaagttgcgaacacatttgtggttttatcttcacttgtgaaagaagacgtgtcatcgtatgatctctactttcttttcaagaaagtcttctgggtgatcttatgagcactctgactatctgaacgctgcctaataattcacataaagctcgggcgccagttcacagttttcatacctggactactgctactgtgttagtgcagtagtgctatagctaatgatatggggcatccaattagttgggtcctcacctggtcggtccatacatgaacctgacgcccccgtgctgtgctggcttctacgttttcatcaccgaaaatattgcagtcccacacgctctctaggttaaggagcaactggcggcttggtgcatatacagtagtactcttgatcagtgaagacctaggtaacagggtactatagcaggttcctgtgcacaatgatgtgaagcaaaatataaatgcttaatttgtcaacattgtatacaacgcgcgtcaaaggaatcatttcaagaatgatcccatcttctgatgtagtggtgtccaaggctccatatacagctgccccagtgtataatgcatggaaagtacagaactatgtacatctcattgtgcaggaactcgtcacgaaacgcaatcatatatacagtaaaacatttttttttgtgtgtggaagtgccctttctgtgatcatgctgctggtagtgcccaataagctaagcaccaccaagtatattcccattgtcagtagtcaccagggcattcatcaagtcggttgatatatattgtcaggtagggacatcggagctagctagcagcttggccccggccgccggcgaccatcacggccgggatgatccgacgccatcccggctacttttcacagatcatcgcatgcttgccatggacgacaatgcagagaaaatactcttacctgttgctaattaaacgtctaagtcaaacacagaaactgaaaacgaatgtacactaagttttgcctaattagttcttgttgcgatctacgcaatggtttcgtcagcgacgaggaaagaatgcacacaggaaactgatgcaataatccgaaggtgactcgacaagaaattttttttcgcaggacaaaaggaaaaggagagttgtgaaaacgatcgaagtagccgggggtcaaaaagggtttgacccgcccacccaggctatgaatgcgatagacactggcttgacaggcccatcagctggcccggtatacctaacacaatcacgatggggggttggtgggcccagccggtcagcgagacagatagcgaatccgcgggcctttgggctttcgtcagagcccacctgaactgttggcatgtgcagcagttttcggggtccatcgagtgttgactctgctgaagaaagggtaacaaaacagatggagagttttccttggtttcacatacacagagtgagtacatcattaaagtaagtgaattcacaacatagaaatgcattcaattattcatcacaaaacctgttgttttattgcctttaattatggacaggatagtgtttgtttgtttatgacgtaacgggcgcgcaccagtatatattgtcactagacagtgggttttgttaggtaagtagtactgagaatgtagcctcatcattaagagttcaagatcattaacacggcgtacacttgttttgtctcaatagcatgtgttcccactgtgatgagatcagtctcgtgaacaatcccgtgcatatatgggttattaaaagcatcatcagacgtatggttgacctcttgcttggttgggttatctgtccactgtcctaaccacgtgtgttaggcgcagagatcacaagcttgctagatcgatctcacgtacggccacactacattaccatacagttacgccgaaattaaaacaagatgccagatcactcacccaacttagctaagctccaatcgatccgtgcccaacccaaccgtcccggcagctgtcgggacaaactgagtagactccgagcgtgtcgatctaattctaaagtcagagcacactttgacgaacaggttgacccactgcgacccaggaatcaaacagctagtaggaaactagcatttgtctcagcctaatagcccaaagatgccctcgtgtgtcctactgtccttagcccggccgtgtcaacgcccagcctaaaccggccaacacgtcaacgatccgtgtcgcagagcgtgtgcttttcctgacgcgacggatgccggcgctactgctacttcctacccctccgaaaccgacgccgcggccgggttgggtttgggtcttgggtcagcgtcgacgtcgtcgctggcctcgtcggtttcggaggcacgtgttacaggccgggaaccctcgatcgatcgcgcggccgcgcgcacgcacgcgcgtctggtttgctccgcgatgttgcggtgcgcactagccagcggaggactcgtcgcgtgtacaggttgccgtggcgatcgagcgcgcggcgtgcgtgtccacgtacgtacgccgccccgcgcgcacgcgcacgccgccgtgtttcgcacaccggcagccggaccattctagccggcgcgcgggcgcgagcgagcgagcggcaggtcggtcggtttcgggagacctcgtgccctgggtggcacggcagtggcaggggggacagcgtagcgtagcgtagcttgccatctacgactggacgactccaccaacaaaacattagactctataaattaaaatctgtatatatgtttgtggctagcaaaaatggtaaattcgagtataaagttacaggcaggataagtaagtgttcgcaagaggaaattgattgcacgcttctaacacaaaccatgcacgagcatgataataatactatatatttgtagttatgggtcaagctaccatcccaccttgtgctaataaccaatccttcaacgaaaacgcatccaagagatcgatcgagattactactactactactgctgtcatcatctccaggttctgcaaagtgcgaattaccggtgaagtatcactactactcgatcaagtcaggcaggcaggggaggaggaaagagatcaacctctgaacataaactagtaatttcacctctgaaaaaaacacccccagcactcgataggggaaaaaaaacggaatgaatcgaaagttgacctccattccaaaccccaatcattccgatcgggcggtcaaagcttcgtcgatacgtggcagcgacgtcgctggcccccggccacggggagggagggacacggcgtggtgtgtcgctggacgccgcgattcagatttcagaggaggatgctgtccctgtcccgccttttgactcggcgttccgatcgatcgatcggtcgatcggctaagcgagtagtagcagcagcagtggagtgccgtgcgttgttcagagttgcaggtgcatgcgtgcgtgcgtgtgtgcgcgagagagaatgagaacgggtggcgtttgtggtgtgtggcttggcaaggcgggatggagggtgagtgggcggctggctttttccgggcacgcgtgcgacccaatcgggccccgcgcttttgacgccttcgccgccgcagtcataagcgtgacgtcaacgcccggggtcttcattcttcaatcgcttaaactggctactatggctaactaattgcctaagctgtaccgccggtccgccgcccgccgtgtgttgtagcctaggccggccaccgtctgtctagaaaagattctaagattctgtttgaaacatatatattatcatcttttacaatattccaagattttgtttgaaacagattgtcgagtaaattattacgacagattatctatttaattgtaaacatatgttaagtattttgataaatatgtaatttaaaacatatgggcaaagcaatgcattaaaaaatttattccgtagtaaattacaggggtatcatctaagtaatattagctgattatattgacatcgcatgtctattattatcagtcacaaatcgacgagcctagacgactgcataggatcactggccttagttatggtgtagcagaaagtaacttttctttcgcgaatgctcattgcatgtcaatatattagaagagtttttgttatacaactcaatcagtcagacatgcctatggggggagggagaaaaaaacaaaagctacaaccaggtaaaggaaagaaaaaaaaactactacggaaaaggctactccgatcagcgggagggtggaggcagaaccataccacactcctaataagcccccaaaagcagcaacaccagcagaagaccacatacgagtatacgaccctccgagaggatagactccagaactactgagaccgaggagagcgcagagtcgaataccctagagttccactccttccatagctaccaagagacgagaaggaccggggagtcgaagttggcgcgaagatgcttagataagcagaccctagaagacagccactagacctgaagcgagctgtcacggggggagggcaacctagccagagggcgacaacatgtggtgctagatctgtcgagcgaatacacagttgaagagggtgtggttcgccatctcaagattctgtgtgcaaaaggggcaggctgagtgctatcaatatcacgcttctggagaagatcagccgtccagcaacgctgctaaaatgcaaaccagatgaagaatttacgtttaaggagaaagtacattaattatatatctgctgagtactctaaattaccaactagtactcaattatgacttatgcccttgccttcatttcaaaattttaatagtactagcgccgtgtttagttccgaaatatttcttcaaacttccaattttttcatcacatcaaaacttttctacacacataaacttctaacttttctgtcacatcgtttcaatttcaaccaaactttcaattttggcgtgaactcacagctagaacaataaccagtctcttcattcagaggatctctctatgtactacggcgaatacgatggtttcctgaccataagtagaagaataatgtgttgactatgcatgatgggcggatgcacgcttaatttggccatattgcaccgtgccatgcatctaacgtcctgattggatgtatatgtgtgccaggagcgagcggcgaggaaaaacaaaaacgtcgaagagtacaaatacgcattgactgtcgacctgcaggtctgaactctgagagagaatataatacatggacaaaaatccaaaaaggagaaaggcagaatcataagaatccaagacaaatcgccggccgatgcatgcctaacgcgacatgaggggttcttgttcctctatcacaatctgcttttccaaacgaaactgatatgagtacgtatgagattaatttacttctcattaagtttgtaatttgcgaagttatatgctacgactgtacttgggacagaggtgtattgttctttgatttattttgatctgtcactcttctatcttcacttcttacacacatacgcatgttttcaggcaactaatacactactagagaattaatctttgttggatcgctaaaaaacggttcgaataagaaccgggactaagattatctttatagtccctgttaaaaagctgaagggaattttttgatcttagtcctggttgataacatttttagttccggtttaaaaagtcatcaggccttactatctttagtcccaccaaccggaactaaagattaacatttagtcccggttatttataccaaccaggaccaaagattgaaaaaaaaattcaaccgcacactcctcggtggaagggaggcggtgcccgggcgggcaggtggaagggagggtggcataggcggcggccgagcgggcggaggggtcgtcggcaacgctgatgtcgatgtgcggattgttggttttgtgatgtgtggacttgtgttgtttgttgagcatgtgaattagtaatgtcaatgttctatgaattcgtgtagtcattttgatccgtgaattttgtgatgttggtgagtttagctgtgaatttgtgacgttggtgagttcggcgtgaaatcaatatgctgacaacaaaaatacaatgaaaaaaaaggaaaaaaaactttagttccggtttgtaacaccaataggtactaaagatttatctttaaacccagttatttgaatcgggactaaaaatggacatctttaattccggattgggcatcccggtaacatatccaggattaaaaggtgtttcgaactgggagtgacgtgggtttctccagtagtgataggagataatctcaacttgtatatatggatgtgactctgtgagaagtgcgcgagattcacagtcacattttttatttttaaaacttgtatataaaaattaaatttaaatctatatgttcgtgaatttatatatatatatatatatatatctattttttttaaaaaaaccgctttttaggtgacataaaaaagagggacgtcccataggaaaaatgactttcacacatacccgctttaattaataagtcgtttagtcttacaatataacaatcagtatatgtgcatatcattctgcatgccactcaagtactacatgatttaattagcgcaacatcatatatatactacaatgacagcaggcgtgcaaataaaatataatttgtagaggtcagagggtacgtgtgtaatttgtgtttagattgtgacgttgagtttatcttctagtgtgaaatgctatacaataaactaaagttgatgggaagattaacaataattaccaacgagaaagtaattcgtagagagttagattagagcaattgatgaagactatggtacacacaaacaagacttcttggtacaggccgggaattaggtgccgcagctcattacccctttacggttaggtgatatcatcaaacattccctctaatcgttctaatttttatttgtttctgttgctatcgctaagacttcttttgagaggtcaatgcctttgattacatagaatttattcgctagtctttcactgcttgttttatttgcagaaggataataagacattaatttaaactgattcgacatatttatcctgattctatcgtgaaaagcatgcatgcatattgctatcaattaatcaattattgaagtgatattaatattgtgtaccccccaaaaaaaataaatataagagaatctcaaaattgctgacaaatggcatgtctagctagtactagtgtgtgctaccactactggaacatcgtaaaataaaaaaaagaaagaaatggaggtaggaatttctagacatagcacaacagtatagctagatgtgatatgtttggcacaaataaagggaattttcttttttgtctaatctccttttaattaattccaaaggaataatataatctatattcctatatgagttacactgcacacatccaccccccctacatttcttacagatgctctttctgaggaacgacaattatgatccaactaattaattaccagacaaaaaacaaagctggtacattttttttacagtagtacacaagcagctagggctataggtgtccaaacgggcggcacggcccggcccggcacgggcacggttccggcacggcccgtttcagcacggcccgttaggcacggctgatgaaacgggccgtgccgtgccggcccacgtgccgagccgccggcccaagcacggcccgtggatggccgggccgtgcccgtgccggcacggcacgcccgcggcccacgggccgttcggggcacggcggcccgtgaaggcaggccgccagcccgccagcctgcagtgcacagtgtttttttttaaaaaaaaagcaaaggaaatgtataaggaaaaaaaaattaaaaatggaaataaaatgtttaaaaaaagtaatgatttactaatgttaaaaaatgaaaaaatggtatttaaaaaatggaaataaaagttttttaaaaaagtaatgatttgctaatgttaaaaaaaagaaaaaatggtatttttttgttgtgttgaaaaatttaaaaatatagattgtgattcattattttgaaataatttaaagataaatccacacttgcgaaaatattgcaaaagaatttgttaaaaatagtaatgacctttattgatgtttatatcattacaggatacaatgatacatgctgcctcgttaaaaactttgtcatgtaaaaactcataggggaaaatgagaaaaccatgacaaagaaaagagtacagctcaaaggtcagaactacttctaacaaaattctactggggttggtctggatccaggtagagttgctcgaactgggcggccaattcttggttgtccgcagtgtattgggcatgttgtcgagcaagctcccagtctttaacgcttagtagcatttcgacgtggtcgctgcgcagagtcgtcctccggtcttcgatgattcggccgcatagactgaaggccgattcggaggacaccgtcgacacgggcaccgtcaacacatcccgtgctagttttgaaagcacaggatatgttatcttgtggtcattccaccacccgaggacgttgaaatcttgtgcttcgtggtggatggcgtcgctgtccaaataaccggacaactcttcggccacaacatgcgaagaggcgtctccacttgtagccgacgaactgccaccaccttggattgaacttgaagacgatccaccccaaatcctaccccactgtatcttcttcttacctgtagtggggataggagggggtctctgctggcgaacttcctgaaactttacttcatatcttccaaaaacctcatataatttacatctaacctcagtataaaaagaactataatctacacctatagtatctccaacaagtgataaaatagcagacaatccccttaatttacacctaggatctaaaacaaaagcaagagcatacaacataggtatatttttccaatatttcaaatatttttgtttcatgtgaaagacaggttcagttagaacgtcatcattttcgtattatttaaataaagtagcaatttcaagaaggttgtgcaaaattatattagcagttggataataaacttgtgacaaagttagagtacaatcataaaaagtttctagaaattggtaaaatttttggacaattgcccaaacatgctcgttcagtactgaagacccgtcactgtttcttgggccaccacgtgactgaacaaaatcagaaagtaaactactataaggtaaaacaacttttaacattaaatacgttgcattccaccgatgctctgcatcggtggcaaacttacgagctttcacaccggccgcattgcaaaacctcttccatgcagcaatccgcgggttagaagcagttaaccacgcgattgcttgacgaacagcatcgatgtggtcacctaccctcttcatgccagtcttaacaatcaaattaattatatgacatgcacaacgctgatggagtagaaaagattgagcatacacacaaaataaaggttgcaatatttcaatagccctagaattagcagatgcattatctagggtgacagcaaatattttatcagcaagattaaattcattaattacttccctaattctttcagctatgttttctcctgtatgtgagacatctattaacctaagccctaaaactctcttttgtaattgccaatcatcatcaacaaaatgaacaactacgctaagataatcctctctagctctactactccatatatctgaagtaacactaacagagaaagtacatgtactaaacagttccttaagtgcagttgcttccttgtgataaacattctctaaatctctagttgatgtttgcctactcacagttttaaacctagggttatgagattgctgaatgtaatgttcaaaagcaggggactccccaaagttcaggggtaaatcttgcctggcgattaaccggacaagagattcccgagcaaccatgggatcgtactcccaactgtgtaccgtaccgtctgggtttaccataagttgctgctgccggagttgtattccttgcttcttggcacacgactccgcatggcgcttgaggtgacctgtaccaccagaagaacgagcagataaaatttgcctacatattctacaacgggctttcgatacctcccttccgtcggggcatgtttcctttatctcgtcgaagctttgccacacaccggaggttctcgatctcttcgagccggtgtgtgtcgaaacacttccgctcgcggttccggaaaatccttccgaagctgtctccgcctgaaccggtacctcctcaacgacagccgtatgaaccggtacctcctccacagatggtggagttggagccgatccggaggtaccgtcaaaccccgacatgtagttggggtcgaaatcacccaaggtgaacgacggcgactggtatggaaagttcggatccattctgaaaatttaaaccgacataaacaaattttcgaatatttattgaattcacaaacacaatacaaataatacacaaatttgaatattacttacatctttccaactgcgagctcttcaaacctctgcgatcaaactgttgaactacgaaactaattttgatttttgacaaaatttgagcaaattttgtcaaaataaaaaaaaatgcacacttgagaacaaagagagcacttaaaacacttgagagcacaagatgaggagtgtgggatgaggagaaatggctggggttcatgccctatttatagggcgaaatttgagattttttggaattttttcgaaatttttatgaattttttagcctcccaacggttattttcaaatttgaacggtcaaatagccgttagtgccacgtggcgccttcccattcgaccgccgcccgccctgtccgcgcctgacgggccgccggcgtgccgtgccgtgccgtgccgcgggccgtgccgtgccggcccgctacagtagccgtgccgtgccgtgccggcccacgggctcggccagcggcccaagcacggcacggctactcgtgccgtgccggcacggcccgttactgtagcaggccgtgccgggccgtgcctgctacaggttcggccgtgccccgggccgcccgtttggcccggcccatttggccacctctagctagggcatgtcaaaaccctaagactaccatgcatagactacatttatgcatgcatgcatatactactgacataactaaattaagtacacatatcccaaggggaattaagctcttctaacatccattagtgcagtagtagtactgaactctctgtgggttgttgaacaaccgctggatcatgatcagttgcaccagaataacctgacgcaatgccggacgaccggcaacgacccccggccggtttatccggcgcctcatctccggtgtggtcagacagccaaaattctcctcctcgatctcatctcccctctttccaaacggtttatatatatatacacaagctatacatctttccactacttctcctcagctcgctttccccttcaccactgcaacttgctcatcacccacacaccaagcaagcactcactctctcttgctagctctctccaccacaagaagaaactagctagccaagaaacggaggatcgatcgaggttcaggatagagattattacatcgtcgtggtcgtcgatcatgggggatcatcagatgatgcacgcagctccggcggcgatgtacaacggcggcggtggtacgacgagctctcatggcgtgtggtggagcaacgcggtgggggtaccggcggcggcgacgtgctcgacgacgacggagctcgccgggtacaccgcctggtcgtcggctctggccgctggatacgatggcatggtagctgacaacggcggcaagcaggcgaagagcaccaccacggcgtcgtcggagtcgcccggcaacaacagctcggtgaccttccaagagccggcgagcatccccgacccggccgccgtcgccgccgtgccgcagccggggctcgccggcttcaccgactggacccagcctttcatgtgagttatatatacaagccaattaattaactcgtactagctaccatatcatatggagagctagcttagctgagatcgatcctgacatgtttgcatgcgattttgtgtacgtttcatcaggaacaacggtgctggtctgcatgagtttctgcaagatggccaccatgacatgagcgcgtcgagcttgatgaatcactcatcaaataacctagcactgcagcaagcaggtcaccaccacgagctgctgtccagcttcggctcagacctgctcttgtcgccgacgtcgccgtacggcggattccagtcctcgctgctgaggagcctcatggagccgacggcgaagcagcagcagcagcagccggctttggctggactccagcagtatcatcagtaccagcagcagatgggacacgcaccagcagctgctgccaagttcgcgcaggcagttggggccagggattcactccagttcaccaacgacgcgccgttctggaacccttctgccggattcggcatgccggcggctgtggcggtggcggcggcggcggcgcaagatcaagctagcgttcgctctgccaaacgctcgtcgccggcgccgccgcgtgcggcagcaacccttgcattaaaggtttgtacatagatgatgcatgcatacaagatagctagctagttctgtcattagctactttaattttagggcattgtgattgatgttttgttatgtgtatacgtgtagactgctatggaaggagtaggggactctagctcagtgatcaccaagaaggagacagcgttcaagaaaccgagactcgagacaccgtcgccattgccgaccttcaaggtagatagatactcacagagacatagctagctgctatgcatcatgagttgaactcaatctggtttaattagtataaaacagtctgcattatttgatgtcacaataatatataggtcatgcaatttaagagatcgatatagatgcatctttactaaagttgttcgtatgtgcaaattgcaatatacttcaggttaggaaggagaagctaggggacaggatcacagcgctccaacaactagtctctccttttggaaaggtgagggaggcttttgatggccaatgtgcactatattacaaacaacaagagtgcttggaactatgcatcaacatcttctgtgcaaaagagttcttcctttttgatctcctcctcctttcgagatctatacactatatgcaaaacaacacaatcttattctcttctcgatgtgcgcgcgtgcagacggataccgcatcggtgctccatgagaccatcgagtacatcaagttcctgcacgaccaagttggtgtaagtgtgtgcaagtacaccatgattccccacctttaattatagcatcctggagcacgaactcgcacgtttcttcagatgaatcatgcatcagagattcagagaagagagactgatgatcagtgttacctgaacattgtcttgtgttttgttttctgcaggctcttagtgctccatacttgaagaacggtgcccatcaagtgccccacttgaaggtattgccagtgttggatgctgcatgcttgctctccttttcagcattctgatcgatcactgtacttatgatcgatctgtgtgtgtcatctctgttcaagccagtgctgatgatggcttctgcaattgatttgtttcgtttcagaactcaagtcctgacaagtccaagcacggcgagatatcactgaagggccgggggctttgtctggtgccgatatcgagcacgttcgccgttgccagcgaggtgcccgtcgagctgtggactccatttggtgccaactttattaggtagaagaacaagtcctggaactgaagaacactgatcagaagcgtcaaattaacgatcgagtagctagctgctaatatagtcgcctagctagcacaaatcgagatctgatgtttcttgattgtatctacgtactagttgtatgatgataatttcgtaaccctagtagtactgatgctgtggctgtaatcagcaaagcactgagctagttagctagatgaacctttggaatgagtgcttgaagacttggattcattcttcaggttcatcacagaataaggaatcggctagttgagaggggacagaattatgtactgatcatcatcaggttcttatgattggttgctaggttgcatcgtatcaatgagtagttgcggaagaatttgttatagaattgatggttcgattcaatggtggatcaattaagtaatgtagcaggtttctctctgttgattgtaccaaataaaagtgccatctctttgattaatgataccttttgcttgcttctcttttaaatctgaccgcatgttttgctattaagtagagcttcaagaatttgtgcatgtgtttcttttgcttaattatttccagaactttcaggttaacaattccatttctgtagtgcatatcagcatgccgaacacttctgcttgggcatattctactcatctactgcattttattattatatgaacaaagataggaaaaatgcaaattgatccattgataaaatcatattaggaagatattttgacgtatgctgtcaagttcctataatttcggtgctcagtattatatcaaagaatggttagatttatcatatatggaaatgcaaaccatttaatttggcaagaaaaatattttcacaaatataataattttataattaccattttgtgacttgactactgacttcggtaattccgtatatctcttttacccactgacccccttgttagggacgctaacttcgactggctggtctatatatgccagtatgcttatgctggtagcattgcaccatatccaacccggcaacatatcctatgcacacaggccctcacgtgtacacacgtgcacaccaactaaaaaatatcacaaaaaaatctagaaaaaatcatacacatactttcaattgtattacacctagggttaaaatcttaacgtcaaattcattatattttagccgtaacaaaaaaaacaaaaaatctaacagttttaaggttgcaattttgtcagaattttatcttttttgttattctctatgtagaatgaatttgaagatgcgactttgcacgtagatgtaatactattgaaagtacatgtatgaattttcctagaattttttgtgataatttttagttggtgtacatggtgtgtacacgtgagggcatgtgtgcataggatacgctcccatccaacccttatggtctagttgagtccatacgcgtggattagtgactgcatgagcgaagcctttaccctttttccagagaaaattgaacttttttttatcacaccaatgctcttcaaaagaaattcaacgcaccacatgtccaatacaattctggttctgttgagggtgttgaaatttcaaatagcatgagtaaaaccatagcttttaacccccaaaacgaactttttaccaagattcatggttggtatacagagtcaaaattcaacagaaatgctcttcaaaagaatttcagtgccaaaaagtagagggagatatgtcaaatagttgattttcacccaatccattaatatttgtactgcacgaatacaattctatttgaaccctttatttcttagaactgagtgaaccatcatgtgtatctgtcatggaatttgattcaagtttcacttgtatgagagctacaaccatacatgttattctccttagtgaaatggtaaaccaaatgcgacgaactcctgtaaagctagcagacaagaacaattcaacatcatgcgcaaaaacacaataatagaattcagtccttactgaaccactatgtacatctagaagatatatattataaaaatatataaaagtttggtcaatcaataaggagcattaccctttttctctttatttaccaaaacatttagaaatccatgagctagacatctgcattgcatccaccatctgcctccccggtttgcctttgccctgtattgtcagctcagagactcacatagctgcattggttctctgcatgctcaattctgttagaacatttttacatgactagccaccagaatgcacaatatggccggcttgcgagagtacctgacagtgacaaaagaaggctacactgcaaactcatctcagtctcggccacctgttaactgaacctatcagatccaacaaagatcagcaagacaatgtttttgtagctataatatgatactattgctgaatgccattttctttttctgctgacaaagtgatgaaatgtggatgattgggctgagttaggctgcaatgttgaagaaagcagatctctgaaatcttacaggtcatggtcacttgaaaggggctttcctaccttcctgatactgagagatttgcaagagcctcacttgctgacattgtcatttactggaagtcaagcccttgtacttccaacggtttctatcagctgcatctcaaatccgactgctcacagctgtaaaattattcactttttttctgaatctctgatgaaagtcaagcatgtgcttccatgtcagatctcctcctcgctttgctttgagatctcgacgagttctcgttaacctcgatgggtgatggacacagacgggttggtcgccgtcagttgtagtagatccgacgggattgtccgcggcggcggcgaccgaggtgacggccggcggctgcgaagcgaggtcagggaagcggaggagatggaggacgagccgccggagagcagaccgccggcggcgagggattcggcggtttcggcccatgagaagaggcagatagggtaccgatccaatcttgacccgaatttaactatttgccattttgaggtttgccaattatccaaatattgcacttaataatttgccattggagagaggtaatttcttaactatttgctatttttgcatatgtgacgtgccactgtaccgtgccagcgtggaaagtaacgtgggccccacccgtcagcccctctcctctccttctctatctccggtcggtcgtcgcccacctcccgccagccccgcgccgtcgtcggccgctggccccacgcgacagagacgaagagcaggcgaggagtcctggcagcaggcgcgtggcgcgctccctggcgaccaacaaatggacagcgcatcggcgaggaagcccgcgaggccaaagagaaggcatgcggcggagaaggccggggtggagaggaggcggcgaagcgtggcgcggcgggaggtggttgccgaggagaagaccttcggcgagctcggcatggcttcggcgaactcgccggccgctgtcgcgtggatcggcgaggcacgtcggatcggagtcgggggagacgagaaggagtagtggtggtggacactgtcgacggtgcggggcgagcggggctggcggggggatgggcgagcgcgggctggtggccgacgacggctcagggtcagtgcgggccggtgggaggtgggcggcgaccggagatagagaagaaggtgaggagaggggctgacgggtgaggtccacgttgcttttcacgctggcacgtacggtggcatgacacgtaagcaaaagtggcaaatagttaagaaattacctctacaaattattaaatacaaacataagagggatatttgaataattggcaaacctaaaagtggcaaatagttaaattccgctccaaaggtaggcccgaataactaactatacgggccctttcttcaacttgggtccaaacaaatcggcccgtacccacgagtgggccgatgcagcaggaatgggcttgttcaagttttagattgcagtcaggcaatggacaaatggcatagaagattagaagatggaactatactgatgttttccatccattccattctgagctaacccttacggcatgtttggcgacttaacaaaaagggattggtagtttagaggaggaagttgggagtttcatttttatttctcgtcccttggtagtagagatgagaatcatacaaagtttgagtgggaattaaagttcaagtgatgacatacaattcagatatatcctgacatacttaagaagggaatcccctccaaattaactgttactaaacacatattgaaaagttgagattttgctctcaaactctccttcctaattcattctaaaactccgacacccaccatccaaacaatttcctccaaccaaacgcgcccttaataagatgattgcatttcactgacataactaggatctacaatagatgtcaggacaattgtccgtcgtccatttggcaacggatacaaaatttgttgataatggattatattcgtttcaaaagcagaagcaatgaatcaccattcctacaataacgcatagctgcagaaaatgccgaaatttacagacaaggataaaacaaatataaacattcatctcccctccaaggctgtaatgctcacgccattcacggaattttccatattctctcttgcatattcagttgcgcgttttttgtgcacaaaaaatataggttgctttggttgaggtagcggtgcagtattgttctctaacatgaacacaacagatgacatcagcggcctatcatctggatggtcctgaatgcacaagagcgctatgtggatacatctcaaaacttcatggagtggacaactctccacaacgctcgagtccaccaaatcccttgcatttccatctttccataagctccaagactacaccaacagaatataagaatcagttacaaaagtatgcatcgtttgagctgaagaaattaagcattctgctgctcttacataagctataaggtttgggaagcccattatgagatggggtgagctgatcctgaagccacttatgatctccaaaagtagaataccaaagctatatatgtcagacttgacagaaaagattccttccattgcatattcaggagacatgtacccactgtttgttaagcggtgaggaatgcaccgtttgaatcagtaaacatgtaaatttgatcacattaagcattagataattcatgcatcacttactatgtcccaacaacacgggtggtgtttgcttgttgctggtttccaccaaagatccgtgccatgccgaaatctgatattttgggactcatttcagcgtccagcaagatattgcctgctttgagatctctatgaataattgttaatcttgaatcttggtggagataaagaagccctcttgctacccctttaattattttgaaccggtttggccaatcaagcactgtttttcttgtagcatctcccaatattaacatgaacaaagtgtatcgtcagccatcattcagtatatatttttactaattcactaatcatttaatataaggccggaaatcagaacataccaaaaaggaaggcatccaagcttttgttcggcaagtattcatagatcagtaacttttcatcttcatgaatgcagcaaccaacaagtttaactagatttctgtgctgcaatcttgcaataaggacgacttcattcctaaactcctctattccttgcccagaacccttactgagccttttaacagctacttccttgccaccttccagaattccctatgtgagcaaccaaatgttcaattaaacaagtaaaagccaaatattaactggaaatgtcaagctatgacattaaaaaaaaaagaaatatcaagatatatcttctccttaccttgtaaactttgccaaaacctccttttccaagcatattataactggagaaattgtttgttgcaattacgacctcttcaaacccaatgaatggaaaatccacatcttcagccccaagttcatttgaggcactcaagtattgtaccataattttgttctggatttccttgcttcgctgtttgcctaacaagaacagtattatatagaaattgttttactaacaaaactacatggactgcattttgagaagtgatgtgagtgttgttgtaccccttgatttgcatatccacacaaggcatatgcatgtgaggatcagtaggctagccacaactggaaggacaatcttcactacatcagtctccttcttgactgctgcagaaatatagtccatacaagagaatgggactttcaggttctcttcataagctgcttgcaagtgcatggactagatgcactttactattagtaatgtttcattttaaccatatttgatgctactacagacttcagatgaattgtgaattttacaggcagatttagtgtgtctgcaaacatcagaggaagtggtaaattggcaaatctttacacattgggcaatagagtattgggtcccatagtagcagaagtggcacgccaaaagataggccacaagttgctaatgcagcaggataccaatttgagtcctgtcaatggtacatgaactggactgaccaagaaatgcatcggctagaaaaaacaaattactgaaatcggtgtcaactgaacaattggtcgtaatatactaggctatgtttcgtgaccaccattatctttcctaatataacttcctcaactaaagagtaagagcaacaagtgcctaattcagcaaggtgcccattcagtatgaaatggattagaaagcatagatcagaaagaatgctttataaaacagtttagaaagctctgggtcaagttaaaaagcataaaaaaaaatgcgtaatcaaattaattaatacttaacagtgcataagtggagtaagtatgggcattaatcacaatgtagaggcatatgatgggcagggaatgataaaaagtaccagttgggctcggaagccggaggtacagattctcaccaccaccagtgacctttgccaggtctagaagctcccccatccaaaccaagcacctcgatgtgtcacccatcatgctggcagtgctcaggttcgcgtaagcatatgctgtgcaagagcagttgtgcctgcactcttccatgcactcatcaaggcttctgttcctgatgtacaagaacttgtcaggtgttttcatgccaggcaaggtcaagaaactatctccatagctacatttcatctgctcctttctcacacatcctcttgaaatgttaagaccatcaggcttgaatccatcaaggcacttgcatgttgggaatgcctccgcagcatcacaataaccaaatggtccacaggaggcatatctttcgcaagtataagagggattgctgaataacacagaccatgcaaacaagttgctgttccagatcagcatctttattgttcctgtgtagtcgagcatcaagcgcatgctaggagagtcatcagaaacagagtacatcatgtatatctcattccctttgttgatgattgtctggtatgtcacagagctggtattactctggaacatagcagagaccaacgcaccattccatgccccactacgccagtatggacttgttccattccaaaccaaaacctggaaatccgagttggggtcaccactgagggaaaagttgccggttgatggatcatcagggcccttccaagaaacaatgcgctgagcaacctggccattgtatttcagcaagagcttcatgccagggaggatggtatcagtcaaatgatcaaagctctgccacaagattgtgtggttaggagatcgaaggaccaaattaccagaattaagaagaactaccgtggctccagaacctccagtggtgatgttgttccttgcttcccaaagagtgtggcctcccgattcagacaacacaaggtcagaactgttggagatgaagagcatggcagaagaaggggcagtgattgggttgtcacggttggcaacccacaccacggtgcgattgggaatcttgtggtaccatatgccaacatataaggtagcatttgagtttgttggggagaagaaaccaagagcaaaaacaccaccatccgagattagcatgtcaccagggtagagtggctttgcaggtgttagctgatcatctgatttgcacaaagaaatcaagaacacgagtacgaaaacggtagcgaaagccgtgcccattaggccttctattctgtgtaaggttgagtaagcatggaagcaattcttccctccaattgtaggaagctcttatcagcgaggacacgcaattggtaggaactatgaacaacaagccaaacaagggtcggtctcatccagctgaacaaagttgactcaaatgatttggccatccagcaaatcgtctgcccaacttgagccagcaactacataatgccgtctgagtgaaggttccttgaatttcattaccagggacagtaagtcaaatacatcggcacatctccatccagaaatacaaagtcgaaagttcatcgaacatgtgtgagtatgacagttaaaaggggggaatattgagaaactggctggctcaccaagtcaccatcggttttagctcgcggcggaggcgactgaagcggaccttaggtctccggggaaatctcgccgtagacggccggcggctgtgatgggaggtccctggcggcggaggtaggagtagggcaccgtcgaaggggacatgacgcgagtcccccgacgaggccccggtcgtggccgtcggcgagggaggttgaagcggagggacaaggaggcaccggcgggcgggcatggtgggcaggctgtgcgcgcggcggcggcggcggcggcggcgcgccgccggctgcacaggttgtcggaccgagaagcttcgccggctcgccgccgaaggattcggcccacggacatgaattggatcgtaaaccattgcttccgaatcaatctgggcttgcccatatccatactgagctgcaaagttcatcgtggccgtttcctcaccatgcggcccagtaaatcggcccgtcacatccaccccacttcgctttcgtcagagatcgccgccgtcgccgtcgccgccgtcgccgccgccgccgctggatggaaccggatctgcctgcgcgtgctcgatagcttgcaagaccgatcagttggcgaatcctgaatgccgcagcggcgcagccgcctcggctgcttcccgtcgggcggcgctcccatggaaggatggggattggttccgttaacgcagatggtgcgtatttcttcaggccttagatccatgagagttccagtgcgccattgattaatagggtttatccagatctccactgtggaatgtggattgtgattgagagtattgcttcctggttggtggtggtgtgcaggtttcgccttggcctggggctttccatgaataaggcggcgccggcgtgctttgctgctttggacaacgcagcagcggatgcccttcaaagttcaaactcgtcacctgtaagcagactgcttctttcctatgcaatgctatcaaatgataggatttggccaaacgatttgcatttattagtctgcaaatttcagagcaagccaaggctgcagtagcagaaatagttaagtttctgaaatatggatgtatggaagcattccttttatgcaaccaagcaacaaagaaaatgctggttacaatgtattgctcagaacattttctgtgtataaatttgaattgctaatgtataagtgtacaactacaagctacagaagtttatagactaaacagggaatggtgtaataaacatttaacgtccctctagtgctgtgatactcacgttatttacagatctttccttgttttctctagtgtctttagttccatagaccctagctgtcaaataagcagactcctttggggtaggaagagcagctgtctcgttctctaacatgaacacaatggatgacatgagtggcctggcagttgggtcatcttgaacacatgaaagtgctatttgaatacatcgtaaaacttcgtgaagtagacaactctcccgaattgatgagtccaccaaatccattgcatttccatctttccataaactccacgcctgaaccaagatatacaagaaagttgtggtcaatttattttgcaatgttttactgattaaaatgttgaggattgcagtccacttacgaaggttataagattttggaaatccattatgagatggggcgaactgatctttaagccacttacaagctccaacagtagcaccccaaaactgtaggtgtcagacttgacagaaaaggagccttccaaagcatattcaggagacatgtaaccgctgtttagatcattccaaaaacaatgtaatgtgcagtttgaattagttataatgaaaacatatatcattaggtggtctacaggttacttactatgtcccaactactctggtagtattttcttgttgcttatttccttcaaagatccttgccatcccaaaatctgatattttgggactcatatttgtgtccaacaagatgttgcttgctttgagatccctgtgaattatcgttaaccttgaatcttggtgcaaataaagaagccctctcgctatacctttgattatcatgaaccgggtcgtccaatcgagaactgattttcttttagcatcttccaagattaatgtgaaacaaagttaattgtcattaaccatgaatatcctcaagaatgtttgtattatacgaccacaaataagtgagtaacaacgtaccaaaaaggaaagtatccaagcttttattaggcaagtattcgtagatgagtaacttctcatcttcgtgaatgcaataactgataagcctaactaaatttctatgctgcaatttggcaatcagaactacttcatttctgaactcctccacaccttgctgagaacccttactaagccttttgactgcaatctccttgccaccttccaacactccctgcacaagcacacactctttcaattgaacaagagaatataaaagatatttcttctgaaattgccaaggtaaaaccttttgtaccttgtaaacttttccaaaaccacctttcccaagcatgttgtgatcagaaaaattgttcgttgcagtgacaatgtcttctaagcaaataaatggaagttctagattgtcattctcaagttcactggaatccttcaaatgttgtagtctatgtttcttctgaatttccttgcttcggtgtatgcctggcaggaaagcctttcatataaattgttaccttagaaacaatgcagcctgaaaagcttagttggtgttggcctacctcttgatttgcatatccacgcaagacatatgcacatgagtatcaacaggcttgttataaccggaagtacgatcttcgggatgtcactcttcttcttgttaactgcagaatacggcccaccaagagaacacggattataaaatttgaggttgatatggagtagcacattggatatatgttctttttcctttaacagaaggtatatattccttttttgttttcttcagaagagtcctatcaagtagtgaacatttttttgttcgtggaaaatcttggcctggcaagacctctgcatattcagttcttcagaaattctataccatgccttgcaagtgtatatatggatgttgcttttaattcgatgagcaggctatctaattaagagctttattttcaccgcagggcaagagaaattgggcataccagtagagtcggccaaccggaggtacagattctcaccaatgttggccctcccagtgtcagcaagttcccctgaccaaagcaagcaccttgcctggtcggctccggtcaagttggcgtaagcgtaggccgtgcacgagcagttgcggctgcactcggccgcgcactcatcgaagcttctattccggacatgcaagaacttgtcagggaccttcattccggccatggtcacgaagcgatcatctctgcctcggcatctcaattgctgcttcctccggcatcctctcgaagaagagttggagccatcaggctcaaacccatcgaggcattggcacctcgggatggctgccgttgcgtcgcagtagccgaatggaccacacgaggcgtagggatcgcacacgatggtgggtgatgggcgctggacgacgactgtccatgacgacgcgctgtcgttccaagccaggaacttcaaggtacccgtgtagtccagttgaagacgcttgtaaggtgagccatcagaggttgtgtatatgatgtagaactcatcatccgtgctcaccgatgtttcgtagatgagagaggtactgaatgagaagaccgaagaccacatgctgctaggcccaaatccaataaagcggatatatggtctggtaccgttccaaaggaagatctgaaggtttgagctgggatcaccgctgatggagaagtctccggtggaggggtcatctgggcccttccaagcgatgcaccgcatggcgacttgtgccttgtagctcaccaaaaacctcatgcccatcagaagggtgtcagttgggtgatcaaagctctgccatatggttgtaccattcggcaaccggagaaccaagttccccgagtcgagcagcgccgcgtaagctccgtcgcctccggtggccgtgacgttcgtcgtccaaagggtgtgattgccggaatccgacaggacaaggttagagctgttgctgatggcgagcgttgcgaatgaaggggtggtgattgggttgtcgcggttggcgacccaaacgtacgtgcgctcggactcggagatgttgtggtaccatatgccgaggaagaagctctggttggaggctgttggggagaagaagccgagcgcgaagaccctgcctttggagatgagtacgtcgccgggggagatcagtcgatttgcctgtgtgagctggtcatcgcctttgcaggaagagatgaggaacagcaaggagatgaaaactgggaggcaggccataatctggtaaatctcatatggccttgttcttggctcgcctgtggctatgaagcgtgaacaattggcacctttgatttttgctactaatccatacacgactcttttctgaacagtgaatttagtacggtgggccaacgaagtaacgcctgaccgggacttgtctgcccctctggtgaagacgcagtgtcaaaccgcaaactaattactgtagctacgacatcagggtcagctgattaaactttcgagagagacgcgaccgtgaaaagttggcaagagagcgaaacctcgcggcatgcgcgtgtgtcggccggtcgccgccatggcgcgttacgcaatgccgagaggcagcaggtaggcaggtagtcagtgttgtaatgcaacttgtgcggttgtgcctggcacacgggaagtccgaaacatcttcgctgactctcctgaacaaaaacaacaaagaaaacgaaaatttcagtctcaaaacgttgcgcgtgagcgtgatgacgctgggacacacggggactttgtacactaatcaacacaggagttgatggcgtcaagtcgtcgattttttgaattttatttatttaaatatttacataataattttctagaaaacttttagaaatctacacctaaaaaacgacgtctaggagagagttttattttttttatgacgtggcacacgggtgttggcataccgcgtaaaaagaggccggctattttgcaagcaattgccttgacatcttcccaaaagactataaggaggccacctgcaaaaataaccgagaatgttattttacaggcaaccccttgtcacatcttttgagatgttgtgaaatggccgcttgcaaaatgctctagccatcatttcacatataatcccatataaccttctaataaggcggtaagaatgctacttcagcctctttctatgtgaccgttaacatgcaccaatgaatatgtgccacgtcaaaaaaaaacgttctgctaaaagtggtaggggtgtagattatagaaatttgaaaaaatatttcaataaataaaattaataataaacagaatttgtgtcgtcaacggcttgctgacgtgctccatggcagcgctgggctgtaaacagccggcctggccttatgggcttcatggattaaacatgggccgcgggtgctatatgtgggccaatccatccgtggccgtgtacgcagggccgaatcagacccagttgggccgcaggtacaaaacccttccgcgtggagttcagacgacggagaagagggcaccgaccaccgagccggcagcgggcggcgccaaccgggaaggcggttcgtccgccaccgcgagcgcgcgaggtggcgcggcggcggcgtcagcgccggtgttgccaggcgagagagctagtggttccgcgtgtccggggagcagacgtatcacggattcaccacatcgtggcagggcaggttggttaccacccccttgatccttttgcccccaaatctcttgccgatttgcccatttggaagcgacgaggagacatcatttgcattggaagtaggaaccacaggcgctgaagattcacacaacagcttcttctttttttttcagtccttcggtgctgcgggagcactttggtttggagaccttccgccaaacgaagatggactttcagagacctgaacaagcatagcaggtgatcaaatcacaacaaaactgcctgtgcaagtcattcttttcaacatctcatgagtgaattgcacatggaaccacttatttatttttacccatatgttgcaaatcggattaggggtacatcaatctgcttatgcaatgcattcttttacaagatctataaacctcagctcctactgtagtaatgtacaactgcagaaactgcttgagagtttaatctcttacagtctagcggccttctagcgctgtcaggctcgcgttattaacggaactttccgagccttgtctttcttcttcgtcgtaatgcctttgcacgaaatatataggctgcttcggtattgggcgtgccatgtcctcgttgtccagcatcgacacaactaatgacatatgcggcctggcatttgggctgtcctgaacacacaatagtccaatatggatgcattgcaatacttcattaagcaaacagctctccagaaccattttgtctacgaaagcctctgccattccatctttccacaagttccatgcctgaaagtaataacattagtaaagatttcttaacttgttttaactatattgtgttcgaattgttaacataagtattggtagcagcatgcacttacataagctataaggttcggaaaatccatcacaatatgatgaggggagctgatctttaatccacttacaatctccagtagcaatacgccaaagctataggtgtcagatttgactgaaaaaatgccttccattgcatattcaggtgccatgtagccgctatttaaatcatttgcaagcaagcaggaaaaaagtgaataagttcaagcacatgaatatgttgaactagtcggctagagaacaagtccacttactaggtcccaacgactcgtctagtacttgcttgctgttcactgtttccaaaaatccttgccataccaaaatctgatatttttgggttcatctctgcatccaacaagatgttgcttgtcttgagatctctatgaattatcatcattcttgaatcttgatggagataaagaagtcctctagctacccctttgattatgttaaaccttgtttgccaatcaatcacagacttcattgcgtgatctaccaagaaaatggataatggacaggaatgaaaccattagagaattcgataatgttgactcctccattagagtatgcactttgtcttaatggaaattcaggtggggaacctctcccctccggtgaacattccaaaaaaaaaaaatcaagacttttttttaatgcatccttttctgaaaaacaagcttttcatttaatatctgataaaacttaccaaagaggaatttgtctaagcttttgttgggtaagtattcataaataagcaacttctcatctccatgaatgcaacaaccaagaagtctaactaggttcttatgctgcagttttgcaataagaactacttcattcctaaattgctctaccccttgctcagaatccttgttaagccttttaacagcaacttccatgccatcttccaatgttccctgtggtatttcattaccatggagacatggtgttaaacaagaataaagtgacatgaatgctacactcacattgtgtaatttacaaggtaaaattttataccaccttatatactttgccaaaaccaccttttccaagcatgttagtttcatggaaaccgtttgttgcagaggtgaggtcttcatagctaatatcagggaactctagattttgatcccatgagtcatgaaaagcactcaagtatcctagctccgtttttttaagtacttccttgtttcgtcgtatgcctaatataaatatcaaaacatgtcaacacaacaatattacatttagcagctgcatattgcaagtagctgttatctcttgctttacctcttgactcgcatttacagagtacaacgcatgagcatgctgtcagtatcagcaggcatgctatagctgggagtacaatctttacaatgttcttgttgtttactgcagaatgacatttatcgtcatgttcatggagaatgtggggcaattgctagagaaaacatcatgagacggcgcatacctgcaggagagccggcgagtcgaaggtacaggttctcaccaacggcactggctttctccgagtcgagaagctcccccatccataccaagcaccttgaggggtcacccgtcgtgaggatagttctcaagttggcataagcgtatgccgtgcacgagcagttgcggtcgcactcatcggcacactcctcaaaggttctgttcctgatgtacaagaacttgtccggcaccttcatccctggtaaggtgaagaaatggtcttggccaccgcatctcagctcctcctttcttcggcatcctctggaagagttgaggctaaatccatcggccggctcgaagccatcaaggcacttgcactcctggaagctgccggtgatgtcgcagtagccgaacggcccgcaggcgccgtagtggagacagccatggcctggtcgctcgaatgggctcgtccaagtcgatgatacgttgttccatgcccggaagctcacgttcccggtgtagtccagcttccagtgtgtcaaaatgccatcagctgcgttgtatatcgcgtagatctcctcgccattgtcaacgatctgggaccatatgtacctggtgaggccggtggccgtcgcgccgttccagacaccgctgcgccacgacgggctcgccccatgccagatgacgatatggagcccccactggtcagggtcaccgctgagggagaactcgcaggtggacgggtcgcgacgacccctccaagcaactacgcgcaccgcctcatggttcttgtatgttcgtccatagcttgaagccagggaggccagggaggatcgtgtccgtggggtgatcgggcaaccggagcacgaagttgcccgtgttctgcagcaccgcggtggctccaccacctccgatggtgaccgtgttcgccgtggtccccttggagtcggatagcacaagcccggaggtgttggtaacagccagcctcgccgtatgggtggtgattgggttgtcgcggttggcgacccagacataggtgcgctccgggatgttgttgtaccatatgccaaggtagagcaggcttggggttgagttggtggtggtcagggagaagaagccgacagcaaagacgccgccatccgagatgagcttgtcgccgccggggaagatgagtggctttgccggtgttaggcggtcatcggattggcagaaactaatcaagaacatgaagatgactacatgcagtctggtcatattctcttgtaaattccttggaaagcactacaatcctacatagagacgatagaacagagttgtgagattattgggccaaccttcttgtcggcagtatagagtaactagtgcagctagcttcgtaaaagagtaggattatactatcgtaattgttatatttcccaggccctgaaatagcgcaatagatattctgtattcctgtgttgagagtgagaaaattgggattatactaccgtaaaagagtggtttcgctggaatgctatcccttcaaactgattcattaaaatgctattctaaattgaaggtgttcaccaaaatgctattttcgtttttttaggtaaatagaaatgttttttctcaattataacttttttccggaccaaaatacccctgatgcgggcccacctgtcatactccctctactctctcctcctcttcatctctctcgagggagcgccggtggttggaagcgagcagtggccgacagcgccgttgaagctcggtgtcggcctgtacgacagcgccggcgactcgccaccggcgtacgacggcgcggtgctcggcggctgcgatggcgcgcggaggcgccgctgctcgtggtacagcacctgcaccaccgtctgcaccggccacataagcatttagtggagtgattaacgaaggatttagccattttttagtgatcgatgtgaatggcagcttctaaccttcaagtagatgtcgatggcgtggtacatgccgtcctcgttgaacctggcgtgctccgggatgagctcggcgagggcggtgaactagtcaatggacaggttctcgtcggaggcgatctcggcgaggtagctctccatgagcctgccgacctgggcgacgtcgttgtgcggcggcgacaccgctgagctgaagtcgtcgtcggtggtgcagtccagccgtggcggcgccgccgccgcgtcgccctcatggtcgaggtagccggccaggatcctctgcacggcgtcaatgtcgtaggccgttgtggcggcggcgtcgggcgaggaggacgggatgaggaggtcgtcgagcacgggctagccgagctgcgccgccatcagcttctcgaggtcgagccggcacgccagcgacggcgacgcggcgccggccactgctcgcctcccgccaccggcgctccctcgatagaggggagggggagaaggagagagtggagagtatgacatgtgggcccgtagcaggggtattttggtccagaaaaaagttaaaattgaggaaaaaaatttctatttacccaaaagagtgaaaatagcactttggtgaacacctccagtttaagatagcattttagtgaattagtttgaagagatagcattccagcgaaaccactcttttacgatagtataatcccaattttctcgttgagagtggccagatgatcagaacgacacgctagtagttgtatgtcaccgttaagattgaagacccgatttattgctcaatgacttttattttcagtgcttgatgaagcaagtcagcacgcacagggcatttgctagtcttcaggagaaccacttgcaacggcagtacggcaggcaagctattttaccagcacaactaatcacagatttacaggcaagtgttttgctgtgcatctccacaaatatttcccggtgattcttcccagcgtcctgacttccgagccagtgatgagagtgagacggtggaggtgcttcaccgggcagcggcggagaggcattggcatgggccgcggcgagggaataccagaacaaattcggcccaccagtccgcgaccggaactgtgagattcgtgggccgtgaaagtgctcgtgatgggctattgggcctaggtcgattgatctgtggacgaagacgaacgtgcttcggttacttcgccggcggagtggtggttggcggcggtggggggcggtgagccggcgacggtcggcaccgcacgtcgaagcgcccggcgtccgcggtctgccgctcccggtggagctcggcgaggtggcggaggcgttgcagcctaggagaggaagcgctcggttgaggcggtggacggcggagtagcggcggccgtgggggcaggtgccggcgccaccgccaccgcagccggcttaggcggaagagacggcgggcctaacctgctactgtcccgtccccttacgcggtcacaagccattgacgccaagctggttccccttggcccttgccacttccacgccggcagcaacatccctgctacttgaggccaggtacagcttcttctttttttttttagaggtaaatggatagaaatccggcctctatggaatggaaatcatggccaggcattgctaatttggatatctatttcaataccaaccatagtctttggttattatcttctattaaaagccggcttatgaccttttggctaaaacaaatggtttaattggtttttaaaaatgccattataatttgtgtatttgtaaacatgtcacattcttttaggtttatgattaacttcagataaaagcaaccacatgtggaatagaaatacagtgtttgcaaatttgtaagcaataccttgtctgcaatgtaacattttttatatataaataccaatcaataagattaatattcacaagcattcttcaccacgcagcaaactccactgttttccattaaagatttaaagtcatatatcacatcactgaaattcattatcataagcattaaattgtaaaaacatagaattatctatgctgaaatcatgtatagtaaagcttgacctcttagtctagcgtccctccagtgttgtggtactcattgtattcacagagtacacactttcttctgtcgcttcttgtgttccgtggttcttcatttcaaaatacacaggctgctttggtgcaggaagcagcgtgctttcattttctaacataaaaacaacagatgacatcgatggtctatcattcggatgatcttgaacacacaagagcccaacgtgaatacacctgaaagcttcatgaagtggataactgtcaacaaaaaacttgtccaacaattctgttgcatttccatctttccataatctccatgcctgtagaatgaagttctgaccaaagttactaatgcctgttgctccaaaatactgctgactgctaaagtttaatttggtatcaaaattatcggcattttagagtacttacataggctgtaaggctgaaaaagtttggtgtgagtttagatgaactgattttcaggccactgacaatctccaaaagaagaacaccaaagctgtatgtatctgacttgaccgaaaaggcaccacccaacacatattcaggagacatgtaaccactgtataaaccatttcattagcaatgaatgcacaatcgttggcaaggattaattcacagtttgaatttaactagtcaataaaacctagagtgttgaaaactatctagtgggctaattactagttattacttactatgttccaacaactcgagtggtgtttgcttgctgctgattaccatgaaaaatccttgcaataccaaagtctgatattttggggttcatttctgtgtccaacaagatgttgcttgctttgagatctctatgaattattgtcagtcttgaatcttggtgaagataaagaagcccttttgctatccctttgattattttgaaccttgttggccaatcaagcacatattttcttgtagcatctttcaacaagatcagtatgtacaaaatctaatgttagtcatcataaatatattttagtcaatgtaagaacctttttgcaatgggatagaaagtcataacacaccaaaaaggaaggcgtccaagcttttgttaggcaagtattcatagatcagtaacttctcatcttcatgaatgcagcaaccaagaagtctaactaggttcctgtgctgcagttttgcaattagaaccacttcattcctaaactcttcaatgccttgtccagaaccctcattaagccttttgacagcaacttccgtgcctccctccaatattcccttcatgttgtcatcaatataaatagggaaacgctggggcagtaatattttatatagtttcaaaacgtgttatgatgtagataaatttagtactctttcttaccttgtaaactttgccaaagcctccccttccaagtagattggactcacagaaattatctgttgcagccacaatatctccaaagctaataaatggaaatttcacattttcacctccaagttcattggaggtgcccggatattctagcatcagtctcttttggatttccttgttttgtttccctgataaagttcaacacatgagatttttacaatatacttaagaaggtaccatctggaggcactatacaattttagtgtaaattcccggtatctctatagtgtcgaggcaccagtgctatctcaagaaccgtaagtcattgtcaatgcatttatctttcaaattacgaagtagctttacatttggaagacaaggccttatatcatctacctctgtgcttgcatatccaggtaaggactatgcatgtgagtagcagcatgcatactgttatcggaacaacaatcttcagtaacctgtttttctttccaactgcagaaatgtacacctcagatgttagtgttatggcatggagcataacttggaaagttaagtgttcatataactacatttttttataggaactctcatataatatcatgagcattgccactatctgaaaacgaggcgacagtgtgaaattttgcttaccaggaggctcagcaaggcggaggtacaggttctcaccaaggctggccttcttctctgagtcgacaagctcccctgtccaaaccaagcatcttgacgggtcagccatggtgccgccactgctcaagttggcgtaagcatatgccttgcaagagcagttgctgctgcactcggccgcgcactggtcgaagctcctgttccggatctgcaagaacttgtcggggaccttcatgtcaggcaatgacacgaagcggtgaccgccctctccgcatctcagctcttcctttctccggcatcctgattgcgagatgctgggatctacaggctcgaacccatcgaggcaccggcacgccgggacggcccccgtgaagtcgcagtagccaaacgggccgcacgagccatagacctcgcagctgccggcggcggggcgctggaagatcaacatccatgacgacgagctgttgtcccagctcaggaacatcatcgtgcccgtgctgtcaagtgtgaggcgtgtgtagatggagctgtcggagacagtgtatgagtagtagagcttgttccctgagtcgatgagtgtttgatacatgaataagctgctgttactcggatactgggcgccggacaccgtcacgctggttctgacgccgttacggcagtatggcttggtcccgttccaggtcatgccctggaggtccgagctggggtcgaggctgaaggagaaatctccagtggatgggtcatcatggctcctccacgcagtgaggcgtccgatgatctcggacttgtagctcatcaagaacatcatgcctgcgaggatggtatcagtcgggtgatcgaagctttgccatatgtcggtgccgtttggcaaccggagaacgaagttccccgtgtcgagcagcacggcggaggctccggtgacgctgatcttggttgtccaaagaatgtggccttgggagtccgacagcaccatgcctgagctgttggtgatggcaagggtcgctgacgaaggggtggtgattgggttgtcgcggttggcaacccacacaacggtgcgctgggggatgttgtggaaccagactccaacatagaggctattgctgaagttggccggggggaagaagccgagggcaaagatgccgcccttggagatgagcatctcgctgggaaagattggctttcccagtgtcagctggtcatcggttttgcatagaggaatcgagagcagcaggaggaacatgagaaaatagaccatattgcctgttagactttctgcttcgtttgcttgtcatgggtcaagttatatctttcattcataatgcagatatggactggtgtagttggagttcaattcccttgctgtcacctcatctgaagatcaggagaaatgtgagatggctaagtcctgattcagactcatggacagagacagtaaaggaccctgtctgaattctgatgaccaggtcacctggtcatgatactccaagtcgtgtgacaatgctgcacgaaaacgaaagaatgctgctgccatggactttggagtgataggctagtgcaggcaaaagcgaaacctcacgtgcgttccatggctccacgtggtgtcacaggcccttgatgctgccactctccatttgaagaagtacaataggtattaaaaccaattatgatttttatcccaagttatatatatatttttttgaaggaaaggcaagtaatcgtagtctttactgctctcttttagcttacctagttttgagcacagtggtttcaattctccactctcttttttcttaatcgcctagtgcagaaacttccaactcaccaataattgagcgaaattgcttatggaagaatttccttttttttttttttgtaaaccattgaagatgaaccatacacccacaaagcaatcatattcctaggttcttgcacaattgatcaagtggtgaattctacagccagctatatctgaaatttaaacatctaacgtccttgtagtgtggtaagacttgtactgttcacagacttgttggcatcctctcttgccccttctgccatgcaattccttggcacaaaatatgcaggttgcttagaagtaggaagtgttgtggcttcattctcgaacatggccacaactgatgacatgagtggtctagcatttgggtcttcctgaacgcataacagtcctacatggatacagagcaaaaactcattaagcgaatagcactccagaataattgagtccacaaatttctctgcctttccatctttccacaagctccatgcctgaacaaagagaggagatatcctaatcagtgctaaatcctagctgttgaaattttgttcatctcaatatttcatagaacttacacaggctataaggtttggaaaatccattataagatgagttgagctgatcttacaaccacttataagttccaagactaaaacaccaaagctatatgtgtcagacttgacagagaagatgccttccattgcatattcaggagacatgtaaccactgtttgaatcgtgccaccaataacaagaagtgtgggtaatttgaaagtatccaagtatataaaatttagtattttaatcataagtagtgcaagagttactcactatgtcccgactacatgtttagtgtttgcttgatgctggttgccaccaaagatccttgccataccaaaatctgatattttggggctcatctcctcatccaataaaatattgctggctttgagatctctgtgaattactctcattcttgaatcttggtggagataaacaagacctctggctactcctttgattatgttgaaccttgtttgccaatcaagtataggcttttttgaatcatctaccatgaacagtatgaaacaagacttaaagttgttcaggcacctctcccaccaaaagtgataaagggaaaatgaatatatgattaggcgtaccaaaaagaaagtaatccaagcttttgttgcgtaaatattcaaaaataagaagcttttcatctccatgaatacagcagccaagaagcctaactagatttttgtgctgcaatttgtcaataagaacaacttcatttgtaaaatgctctatcccttgtgtgcaacctgtgttgagccttttgacagcaacttctctcccgccttccaatttcccctgtgtaatacaatcattttaaatttataaaatattgtaggattctccagtgtttgtgattgtcagcctgaattgtttaccttataaaccttaccgaaacctccttttccaagaatgttggaatcgctgaaattgtttgttgccgcgacaacgtattcaaaattaacatgtgaaaattctaaattctgctcaattagttcttgagatctaaggtttcctagcagcattctgttctgatttttgttgtttctccgtttgcctaataacaccgatgctgtcagtacaattacaggaagacatcatactatgaattcataagtaacggcccttgccataccttttgattgccatttcctgacaaggtatatgcatgtgagcatcagcaggcatggaataattgtgactaaaaccaccactagatatctgttctttttcttatcttcagaagtgtgtcctatcaagagaagtaaacaaaattatgagaatttctaaaccataagtatgcatggatgttgcttttaatttgatgtgcagactatctaagattttgttgtctctgcaggggaagaaatggtgagcataccaggagagtcggctaaccggaggtataggttgtcaccaaggcttgccctcgccatgtcagcaagatccccagtccagagcaagcaccttgactgatcggacatggtgtcggctttggtcaagttgccataagcataatcgtaggccatgcatgagcagttgtggctgcacttggccatgcactcctcgaagcttctgttctggacttgcaagaacttgtcagggagcttcattccagacatggtcacgaaatggttcctacctccgcatcccaactgttgctttcttcgacatcctctcgaagagttgaaatcacttggctcgaatccatcaaggcactggcatctggggatggccaatgtgaagtcgcagtagccgaatgggccacatgaggcgtagagattgcagtcaccagcggccgctggctgttgagagatgactgtccaggacgatgagctcccgttccaactcaggaacctcatgttgcccatgtagtcaagcttgattcgtgtgtatggggagccatcagaggttgtgtacataatgtacaactcatccctagtgttcacaagtgatttgtacatcaaagtggcaatgttgctcccgtatgcttcaccggacactaacactctattaagtgaaagtgcaatgaaacggtaatatggcttggtcccgtgccagatgaaggcctgaaggtttgatctggggtcgctgtggtaggagaagtccccggtggatgggtcattcggtcccttccaagcgacaagtcgcatggcgacttgtgccttgtatctcaggaaaaacttcttgttggggagaagggtatcagttgggtgatcaaagctttgccatgcggttgtattgtccggcagccgaagaaccaagtttcctgagtctagcagcactgcataagctcggtcacctctggtgttgatgttggccatcgtcgttcaaaaggtgtggccttctaaatctgacaatacaaagttagaactattgctgatggcgagcatcgcagatgaaggggcagtgatcggcttgtcacggttggcaatccaaacgtatgtgcgctctgggatgttgttgtaccatatgccgaggaataagctctggttggaagttgctggggagaagaagccgagtgcgaaaaccccgttctgggagacgagcacgtcgccagggtagagtttctttgcttgtgtcagctgatcatcgcacttgcagaatgagaagatgaaaagagggaagcaagccataccattcatttggtcttgttcttagctttgcctagttgcctgcaaagcgtagagaaatagcacacacacatatgggtgtttaattatctgatgcatacatgattctcctgagtcttgactcttgactcttgaggagcacgcggttggaccaaaggaagcagcgtaataacgaatggccgagactattctgtccgtcgagataaagttttgctacgaattcaaactgaactgtggggagactacggtgaagtggcctgacgagagcataggcgtagctggtattagtactcagtgttgtgatgctaacttgtgcagtttgtggctggctggctggctcggtggcaccgggacaacctcgcaactagaaatatcgacgcttgaacgcttgtgcacaacagaaaacttactacaactatttctgtagacgacaacatgaaggttggaggatcaacgatttatgctcaagaacaattgatggagactactgaaggatcaaggaagttgtttgcgttacgcaaggagacgacagggattaccccaagagactttccttcttttttttttttgtaaaccattgaaaatgaaccatacacccacaaagcaatcatattcctaggttcttgcacaattgatcaagtggtgaattctacagccagctaaatctgaaattaaacatctaacgtccttgtagtgtggtaagacttatactgttcacagacttgttggcatcctctcttgcccctcctgccatgcaattccttggcacaaaatatgcaggttgcttaggagtaggaagtgttgtggcttcattctcgagcatggccacaactgatgacatgagtggtctagcatttgggtcttcctgaacgcataacagtcctacatggatacagagcaaaaactcattaagtgaatatatctgcagaataattgagtccacgagatcctctgcctttccattcttccacaagctccatgcctgaaccaagggaacaaagttcctaattagtgcaaaatcctagctattgaaactttatgcattttgatatttcttagaacttacacacttacacaggctataagatttggaaaacccattataagatgaggagagcttatcttagagccgcttataagttccaaaactaaaacaccaaagctgtaggtgtcagacttgacagagaagatgccttccattgcatatcaggagacatgtaaccactatatgaatcatgtcaccaacgagtgtaagttatttaagtgttttccaagtatataaaagttagtattgtaatcataagtagtgcaatagttactcactatgtcccgactacatgtctagtgtttgcttgatgctggttgccaccaaagatccttgtcatgccaaaatctgatattttggggctcatcccctcatccaataaaatgttgctcgctttgagatctctgtgaattattgtcatcctcgaatcttggtggagataaacaagtcctctagctactcctttgattatgttgaaccgtgtttgccagtcaagcatagacttttttgaatcatctaccgtgaacaatataaaacgatacttatagttgttcacacatggccttttggtaacagtcttccaccaaacgtggaaaaagaaaaggtaaaaaaggaatatatgattaggacataccaaaaaggaagtaatccaagcttttgttgggcaagtattcatatatgagaagcttttcctctccgtgaatgcagcaaccaagaagcctgactagatttttgtgctgcaatttggcaataaggaccacttcatttctgaactcttctactccttgtccagaatgcttgctaagccttttaatggccacttctttgttaccgcctagcatgccctgcacaatttaatcactttaatttttattaagaaagttcatcgggatatacacttgttcacacagtatcatggatgtatggtttcacccctgaggttctatatttgattcttaacacaatcatacattcttctcaattatttaacaccaagtttgttggaacaaaatccaataagcatggcaagggcttcccttcaatgggagggaggccaagcttggtcctgtgaggagatgagaggaagaggatgaaggatgagagccctttcctcgaatggttcctgtgtcatctagttcaattctgccagaacaaatacggcccgctaatgcccacaaggacgccaagcccatgttgacaagaacccgatttcaagtcgagatcaatgggttacgggtgtgtcttcttaactcgtttccggtgcgatggctcaaagtttgggtaccgaggaacaaaatcgatggtaaataatcaattttatcatcacaaaaaatgcaattgtatgccacatatgttacggtcctactcctctccaaatatcaattatacatgtttcaccatgtgctcctaaaggaagcacttagcgtgcagaaaaataacataaacacctaccgtccctctaataagctgatgctattttcacctgtttgtctgccttcaaaggccctatgtgcaaaatacacaggctgtataggagctgaaagcgttgtggtctcgttctccaacatggacacaaccgaagacatgagtggtctattatttggattatcttgcacgcacaatagacctatttggatacatagtaaaacttcagttggtgagcaactcttagaaatggatgagtccatcaaatccatcgccctgtcgttcttccacaagttccatgcctgaaacagtggaatcaagtccatataaaattagtacaattaatctgaattgtagagataaagcattccaccatacttacataagctaacaaattggggaagtccgtcagccgaggcaagctaatcttcaggcaacttacaatctctaagagtataacaccaaagctatatgtgtcggatttgactgaaaaggcgccatccattgcatattcaggagacatgtaaccgctgcttaatgatttagcagtaagtaaagattcgagcaaataaacattgtgaacattaatgcatgaatgactcactatgttccaacaactctgttagtatttgcttcatgctggttgcctccaaagattcttgccataccaaaatctgatatcttaggactcatatcaacatccaataagatattgcttggtttgagatctctatgaattacagttaaccttgaatcttggtggagataaagaagtcctctagctactcctttgattatcttgaaccttgttggccaatcaagaacatatttatttgcatgatctataagaatggtaaactatgttattattaagtatgcagccaagtttctttggatcatatgataagtttatgcaatactgtagtatataaatctgaacagtaccaaaaatgaaagcatccaagcttttgtttggcaagtattcgtaaattagcagcttctcatctccgtatatacaataaccaagaagtctaacgaggtttctatgctgcagtttggcaattagaacaacttcatttctgaactcttctgctccttggccagaacccttgctaagccttttaattgcgacttctttgccgtcatctagcattccctgcataatttaatcactttattttttttattaagaaggctgttcatttgtaaatgagtggttttacagttcctaaagactgaagtctgaaaaggtactacagtcttaatgttaatttgaggtacctccatatttgggatggtaaaaatctctctgctaatttatcagtacactgcaggggcattcctacttcctagttccttttttttttgacatgctacttcctagttcctagttcctacagcatactatacggggtcacgagaccctaggtaaaatttcaatctctagttgttttagcctatattaactatattattagttaaaaattatagtattatatatgttagtttttgtccctattgtaattctcaagatagaacttattttgtaccttgtaaaccttcccgaagcccccttgtccgagcatgttgtcatcagaaaaattgtttgtggcagcagcaatttctccaaaactaacaaacgggagctctaaattttcatctccaagttcatttgatgcactcaagtatcctagaatccctctcttctggacaaccttattctgatgacgtttgcctgacaggactacaaatatatatagtgtgttaatattagctctagtaggagtagaggatataagctgcgagtattacctctgcacttgtataaccatacaaggaatatgctcatcagcagaagcaaacatgctgctgtaagtgggagcataatttttaccacagtcctcttcttattgttaactgaatgggaagaaaattttcaccgagaaaaccataaagtaattaattgctgaacccattagtttcaggcaaatgaatgcacatgcgtgcaattttgtgatagtcatgtgtacctagttcagactttgccaatctcacatgcaagtcctgccctttgtccacataacgaacatcaaccatgtcgccgatccacatgacgcagccgcggccgctgatgtccgcggcggcgtaggcgacgcaggaacagttggccaagcacctcgccctgcactcgtcaagcgtggcgcccgtgtccaccgtggcgttgtccgtgtcggggagcttcacgccgcgcaccggcacgaacccgtccgtggtgctcccgttgccgcactccagcggcgcgttcctccggcacccaccggaggtatccctcatggaccaccgcgagggggacaccgggctgaaccccgccatgcagctgcagaagagcgtcgacgcggtgtcctcgttgcacagcccgaacgcgccgcacttggcgtagtcgtcgcacacgccgcgcggtgccttcatgtacgggatccacaccttgctgctgggatcccacacgaggcgctcggtcacgccggcctcgtccagcacgaggcgggagaagggggagccggcggcggcggcggcggtgaagacgtaggcgatctcgtcgggcgtgaccaccacctggctcgagaagatggattcgtacgacgccatctccgggacgccgctgaaccactgcccgttccatggccccgtccggtacttcttggcgccgccgcaccacgtgacgcagtccgggagccccctcgtgtccagcacgcggcggcagtctcccgtcgccgggtcgtcgtgcgcgcgccacgacgagaggaaccacgcgtcgccggtctgccggttgttgccgagcctcatgccggcgatcagtgtgttcgacgggtgatcgaacgactgccagatgaagacaccggtgttcagctggtcgcgctcgcgcacgacgaggtttccggactccagcagctgcgccgccgtcgctgatgaagacttgccagtcgtgttcgacgaccaggcggccctgccggagccgtcgagtaggacgagcccgcccgcgccattgttaaccagtacgccggcggtgtcgttcagtgggctgtcacggttggccacccagacggcgtccgcggactcggagaaccatatcgcgaggtatctcctgtttggcaagccgagtgagaagaagcccagagtgaaggagccaccggccgacacgagcgtgttgccgtcagtgaggttgcggccattgctcagagtgtccgatgcaacgccggcggcagatgttccgagagtaaggaggaccatgaagaagaaggtgaggctaaggtggaaaatgttggcggttgctgcttccataacgggtgagtttttcttgcacgtccttgcccagaattgttcacggactacagtgcacgggaacaggttggcctcacaagtatcatacatacacggaatctagtgcccgtgtaggaggaattcaaacgcgttctaacttccaacacagtaattaatatcccacgattgactagctagctagatgcatgagtccatacggataagttgcaaagcagcggaaactgtagagaagaaagatgcatgagtccatacggataagttgcaaagcagcggagtttattgcatgtcagttagatagttatgaaaaatttttaaaaaaattgacaagatagatcaatatgtattatatcactccataaacatacaagtttaaattcaacttctacaagctgtaacaaaaataacaaatttaattgtaaatatatatgtaataatttgagttttgtttgttatttttgttacaatttgtagaagttgaattttatcttgcatgtttgtggattgatatattacatattgatctatcttgttcatatttttttaatttttttcataaccatttagatgacatgcaataaacatccattcgagctgttaaaacagttttccctatttaacgccttggaaagtgcgcccatggtaatttgattctgaatataacgtactagccaagttactatgatagtgcacacatttaagggtgttcaaactactcacaaaatcaaccttttcaaaagttggtaataccaaaactttgataagttgacaatattattaaattttcatatgcattaccaatgttccgtaacaaactaaatgaatccatatatttatcgaatttacctgatatgaattaaaatggcatcaatataaataaacccttacacgtatgattggtttcaaagtttatagtatatttatgtattatctctacttaatttgtttttcaacctcaaatggaaaatctgattatttgatggaaactgtggctttcctggtgtcagccgatcatcagttcggcgaccgagaccagccgcaggagatgagaaaagtagaccataatgaaccttaggatttctgattcgtttgattgtcacgactcatgagtcaaattatatcataaattcataatgcagatatgaaactgacttgtgtagttagagtttaattccattgctatcaacacctttggggattggaagaaatgaagctgtttaagtcttgattcagaccaatggaaatagacggtgaagggactagtcgaaagctgaatatctcatggccagttcaactgatcatgataaagttttctttttttaaaaaaaaaaactggtcatgatacttccaagtcttgtgacaacgctgcacgaaaaaagaacgccatgaccacgaatttaggttggactttggagggagcgggcagagcaggcgaaagccaaacctcgcgtctgtcccatggcgtggcgggttctcctaccagcgttgggtagtacttcctccgtattaggttacacaagtcgtttaaatttgttgtcaaaattaaactatttcaaatttaattaagctcatagaaaaaaatagaaacattttcaacccaagacaaaatatattatgaaaagatattcaattatcgatttgacgaatcgaatttggtgtcgtaaatattatactatatttgtctacaaacttatttaatcttgaagcagcttgactttgatcaaagtcaaaacgatttataatctggatggagtagtaagggcatgctcaatgtataaggtctacttggataataaggtaggacccggtattagttatagtgtttgctacaatgtatatgataagagaagacattagcctgggtcccactggtcccactcaattgcatggcatgtgagagagaagatgagagagagaagagaaagtattgctattttattcttatgggtgggcattatgcatatgggtagctcatgttaaagactactatatggactactatcacaatgttgtcatggttatggataccacatacctaataatagttgactaaatctcggcatgacccaccacataccatgtcctatacggaaaccgacttcagatatggagggagttccggataaggaaagacaactagagttctacatggaaacgacaaggactactcggattgtatccatattggtttccctagttctacttggacaagaggacacctatgggtataaatacaagcccccctaggaggacaggggggacacccaccatgagacgatcaacacgatcaccacgatcgggacgaccacctcatcaacgcccaacacaatccacatacaagcctatatacgccaagacacgctgccggatatcgacttcagggataggcatggctattcccctacggtatctccggataccgtcaggagatacgaaagcgctatctctgatctcgccgggcacggattcgaggaggaagactaccttgttgtcgactatgagtcagactttcagaccaacatgtcgataacagttagataggctgcccacatattgtactggtgtgattatggtgaataagagcaataccggcttcggccaacaggatgtagggttattacctgacaactcaggggcccgaacctgtataaaaatccctgtctccatctcttttacctcagtctcgcatatatcctagcaccaacgatccccatactgtccaaataccgtagtcgagacatcaaacgtcgacagtggcacgccaggtagggggattttggtgctctaggatttcgacgagatgggttcaaacgatggattctccgacaacaagttactcgacaacttcggctctgggagatccaacctgtccaaatacatcttccgacgagatcagaatcatcaccatcgactattcgatcaggcgagatcgaccaagcttcaagacgtcgccgtcgcggaagaccttgacgaattaccgccggaccagggtcaactacacgtcgtctacccgccaatcaatcagctggccgactgcatctacacatgtattaagcatgtatgcggtgggaaccatgtacagtaatgcacggcgtgtaccgaaggcttttttagccataggtatgcttgcatgcgtacataggtgccatctagacgtgctaattgtggagtacaattcaatttggctaaaaggtaattagtggattgacttattaattaatctactaatttcgtagatacattgtaacgctccacttctcgtgagatgttaaaaactaattcggcaaatcctaattgtgaaaaattttgtcctttgagtgcgagtctaagtcgtgccgtggatctcaattcaaatcccgttgttccctctcatcgaaatcaaaatcccccgcctcaaatttcctctaccaattcaagtctccgaaatctaattccgaaagtcaatcccttcctttgaatcctcgccaaatacatttccgaatcccaaaatatccaaactcccattttgtttccttccttgactccttgaacccttgtgtacaaagtatcaaatttagattcaaagcccaaactccaaatctctccaaatcaaaatctttcagcaaaagtctattttgcctcccttgtcgatgggctgattcctctctctcccggcccatcccctcctctcggcccatctctctccctcagccgctccttcctccctcgcgtgcctcgctcgtgcgccgctctgagcgagggtgctcgctctctctctctctgtatctctcactctctccctcgtcgaactccctctccccggcgccgatttcccgccaccgctgttcgaaatccggccgcacccccgcgtcgcgcgcgcgctcgctcgcgaggtggccgaccgactggccgccgccgccatcagcccttgcgccaccgacgccacgtgctgccgccttgcccctactccatgacaaaccgcccgccgccgtcatcgccgacgtcatccatggccctcgccactccatgccgcatgcgtccaaagacgtgaggctgggctcgtgctctcatctttcttcccccccaaaacggaaggagcaaggctccctttcctcctcctcctttcgctttatcccttacgggcaaggccgcctcgctctctcccttgtcctggtgcgggagcggacacagggtgccgctgacgccgcctttgcgccctaccgcgcccacgccaccaccgcgaccatgccagctcgccgcccccaccttgaccgtgctagcccgcgctcgcggttcgattcccaccgcaaggtccaccgccttcgtcgcccaatgcatccacgtcgtcgccgctttcccaccgcccacgaaaccgccgctgtcgccagccaagcgcctcttcacctataaaatcccaaccccatgcccacaatcctttgcccttcaccccgtgctccttgaaacggagtactaccgcctcctccctcgaccccggtggccgtcgcgcggccaaccccagagcaccgccacctccttcatcgtctcggccaagaacgccaccgccgcgaccaaggacgtcgttcccacacgcttccgacccctttcccggcgcgcccgccgcggcaccatgccacctcggcatcgtgttcgtcgccgtgcgccgctgctcgtccatgcgccgccatcggccttcctccccttcccatcactgaagtccggcgacgccgttccccgctcaacagtgagctcctcggctcctccctcccgttggcaccccctttccttttccgcatcgtgtagctctcgccaccgccgcttggcgccgctgcgtgagcagccgcggcgagcttcgccgatgccgcacccggctgtgcgccaccgtcggtctccctctcttcaagcccgctcgccattgccttcctcgggaccccctcgacctccccaatcctttcctgtggccgccacctcagcggccgggcccgcttgaccgagtcagcggcgacctggttagccgcctcctcagcccctcccgctcgtgggcttggcccatcaaccaaccttcccttcggcctgatgaaacagaaaaagttcacttataatccctcctcccgagcccagtacccacacctaagagctaaagtccatctttaatcccttccccaaacacagtgaccaaaagtccatatctgctccctctcaatttactctctcttaccttcttgttgaccccacttgtcaatgagtcaaagatattctcgagaatatcttttccaatattccacaaatatttccctcttctagaaattcaaaaatcattttatcttattccatgagttaataaatctttttcccttgttccataaatcatttccattggtcccacacgtcagtgactgtcaataatattcttgagaatattatttatataaatttcataaatcaatttccccttgttccacaaatatcttccttcgcccagaaattccacttaaacttccaaaattcatatctccctatccgtaattccgattgactccgttcaacttccaataattccataaaattgagatctatttaatggcactattatttagtctaaaataggatcttttcttggtctttgtttaggttttaattgtttgcgtacagttgcggttgccggattttcgtcgatcgcgggttttctcgaagattcgtgaagaccttgagcaaggcaagtcaccctttgaccaattgctcctataattggaaaatcattattattttgtttgcaacttgcattagtagaatcacacactcaacttgattggcctcggtttgcgtgccaaaccgacggacctaccaagtagtcgcactaattcctgtaggttgtactaccctgatttcctcgtcgctccacctttgtggtacctcggtatccgtgctctttgagcgcgaataccaaatatcccacatacaccgttgtttgtcgaaaacttgggaaatgggtttgagaagccttgaaagcccgacatgtggcgtcggtgtgtttgaaaataaaatggaatgtgaaaactcgcgatgcgggggttgtgcctgtgtggcactgtcccgtattcgcatataaggaccgattcctgtgggaaattcatccgagaatataacaagtgcgaccacacgggtgcaatgggacgcccctggctgagtaattagctaatcgggggagccatgatgccaagagacatgtggattcaacggggtggtgtcggggagaaccctcgggcttcctggcacagtatggtctgggacccctcttgttggcatatggtgaacctgtgtcggctttcaaaatgccttgtcatgaaagccttaaggtctcccgacgtggctgatctcacgggctgggtgatccgggttagtaatgtcgtgtgggtaaagtgtgccccctctgcagaggttaactaactgttcgaacagccgtgcccacggtcatgggcggatgtgaggtgtttcctgtagcgtagatttgtttgcctgtgctttgtgaaaagttgttgtggtgtgggaatcgttaccagaatcagcctatgtggcagatggatgacctgagtggtcaagaaacgaatctgtgtgattcgggatgtctatgggcatcatagtctaggcttcccgagtggaagcggattgttgtgctgctgggcagctggactctaggagtccgagaaaatgaaaaaggctctgggagccgattaatcaagtggaatggctctgggagccgagaagtaatgatctgacccgggaggtcggtacattaccaaatgagctgttgaaaaacatctcttaaagacgaaacgagacgcaagtctcttttcggcctaaacttagaaagagataaatcacttagtgatttcaaaacgtcttcaaataaaagatttgcaaaacaaccttgcctctcttccaagcttgcattaaacacctaagttcccgtgacttgctgagtacgaaggtactcacccttgctctatataaatatatatagttcctccacccggaagttgaagatgaagtaaagtgaagattagggtttcgtcctggttcccagccgtcgcctgtggtgttgggtgttagtccgttggttccgctgctgccgctgttgttggtgtttcctcgttcgcgtcgtcggttgcaatctcgggctgttctgagctgcaacctaagttaaggtaaataagtcctctatttattttaaggattgcaatgattcatatttgtcaccgtgggtaccagcactatgtcctgggactggtactgagatcgcggtttcgtaggaagcggtccgcaccgtttttcctacgacacactcctatcaggtgccgttgtacggcggtgccagattggggtgtgacatacatccggcatgtatctacaaaggtacgcaatattctatatgcaatttatcgtacctattcagatcatatagcattgtcagatctataatttattatgtttacctagagcatgtttcttatacaatatccgttgcacgagtgcttccgacgttaaaccaactacagtctaacgctgggggctcactccgttttcttctgtataaatcatgcttgtttacggtttacataatgcctgataattacatctgctcgttataacctgataatgctagaagatccatgcagtttttagtacatactcgatattatctgctatatatcttgccttctagaaaatatttttcaggaacaattgagcactcgagtaggttatggtcgagtacactccattatcgagaacattctcgacaaatgcggagttatcgcacccaacctaccaacaaagactgacgacctgtctcatagcatcggccatcgctggactacttgaagaaaggttgttaacggatgattcctcgcgaacgtcgtcggcttgatcacccgacatgattgcgaacggacatccggatatgctataagttgggtacgtgagtcatgctggccacatgaaatacacttgcaataaaccaactctagcacttctatcggtgttcgagagataattctgctcgctcactggttctcgcaccagtacacagcaatctctcgcacctcaacttccatcggtgttcgagagataattctgctcgctcactggttctcgcaccagtacgtagcaatctctcgcaccgcaccttccattggtgttcgagagataattctgctcgctcactggttctcgcaccagtacgcagcaatctctcgcaccgcaccttccattggtgttcgagagataattctgctcgctcactagttctcgcaccagtacgcagcaatctctcgcaccgcacctttcatcggtgttcgagacataattctactcgctcactggttctcacaccagtacgtagcaatctctcacacctcaacttccatcggtgtttgagagataattcggctcgctcactggttctcgcaccagtacgcagcaaactctcacaccgcagcgtccattggtgttcgagagataattccgctcgctcactggttctcgcaccagtacgcagcaatctctcacaccgcagcatccattggtgttcgagagataattcggctcgctcactggttctcgcaccagtacgcagcaatctctcacaccgcaacttccattggtgttcgagagataattctgctcgctcactggttcttgcaccagtacgtagcaatctctcgcacctttacttcagatggtcaaggtacgactacaacagtgtagcggtcctcgtaccacgactccaagtgatcgagggacacctactcaccggtcctcaaccagttgatcgtagtgatctctcgtacatttgcttcaagtggtcgagttacggctactgcctggtcctcgaccagcgatgtagcgttcctccgactacttccactttcagtggtcgagttacggctaagttacggctactgcctggtcctcgaccagcgatgtagtgatccttcgactacttccactttcagtggtcgagttacggctactgcctggtcctcgaccagcgatgtaacgttcctccgactacttccactttcagtggtcgagttacggctactgcctggttctcaaccagcgatgtagcgatttctcccactacctttacttcaacaaagttggtagcaggtacacaatatcgccaagtgttttacccagagatcccttaccacgacgacacctagcgttgaaacctatcctactgacccttaacgccgtcttgacaaggcctccgaggaacctaagggatcttcggctggggacgcccagagctgataaggccttgttggatccttcagagacgaaagaccatgtaagatatggtcgtgtaagagttctcgccgtgcgtattaaccaagctgtgtaatcggaaattgacttttccaacttcacggccgggggctaggatcagtgcttattcaaccaaggcaggtcaagagtccaagagcctactcctctgagaacgattctccgacgacaaggctgggggctagggagagtgaacaactcaaacgactgaccaaagtcgtgaactgagaagacactcttacacaaaacattggtcggtaaatttaattcattttcaatttaccatacatattataacatgtcaccctttgggcattcgctcaggggctatttctatttgatattcttttctgagtattcattttaggaaaattctattcgacattgtggaagactccatgtctctatggttctacaccaggatcgactaaggcgagtacgaccaatgttgacaaagctcctttgcagactctacgccttctcgattgctcgagaacggttgctagatcttgacaaggaatacggactgaagagatggtgtacccgccgagataaaatttcttgacttcaatccaaattctcgactacagcaaaacgggagacttagtcgtacgctctgtactttttcggtcgacatcagagattcacttagacaaaccctttcggtgcccacacggggctgacaaaggaagtccaacattatctctaaactcaccgagaacggtcacatgagcttgataacagttactccaatgtctgcgcgcggttgagaataggaattcgttcatttgcatcgaagtcgggggctgctgtcatggttatggataccacatacctaatagtagttgactaaatctcggcaggacccaccacataccatgtcctatacgaaaaccgacttcagatatggagggagttccgaataaggaaagacaactagagttttacatggaaacgacaaggactactcagattgtatccatattggtttccctagttctacttggacaaggggacacctatgggtataaatacaagcctccctaggaggacaggggggacacccaccatgagacgatcaacacgatcaccacgatcgggacgaccacctcatcaacgcccaacacaatcaacatacaagcctacatacgccaagacacgctgccagatatcgactttagggataggcatggctattcccctacggtatctccggataccgtcaggagatacgaaagcgctatctctgatctcgccgggcacggattcgaggaggaagactaccctgttgttgactacgagtcagactttcagaccaacatgttgataacagttagataggctgcccacatattgtactggtgtgattatggtgaataagagcaataccggctttggccaacaggatgtagggttattacctgacaactcaggggcccgaaccatgtataaaaatccctgtctccatctcttttacctcagtctcgcatatatcctagcaccaacgatccccatactgtccaaataccgtagtcgagacatcaaacgtcgacaaatgtataaggactactttagaggcttaagacccccctcctattgctacattgtggctgccctaaggagttgtttagattgacgtcattataagatataccatttttttaaagtaaagttgccaaacatgagcaaccatttagctttttaccatattttggtaaataaaaaaaatcttaccaattgataatgttaccaaattgggagtacctatacatctttcgaaagatttgttatcaaattttaaaaagatttattttagctataatctgaacaagaacaacctctgatgcccgagccatcttaataggccacgggtactcgagatgggccgatccatgcgcgatgagccgtgaattttttttatttataatttttttatttataattttttttattaaaagttttacaaaaataattttccattttgaaaattgacggaagtagtcgcctaccgccctctgggagggcgatttttaaaaatcgccctctcagagggcggcaaatatgacgtggcagacggccgttcgctctcgggcgacggccggcatggaattttgcaggcggcccccttgccgccctccgcgagggcgattttgcactgtgcggggggccgcctgcaaatgggcggcgagggggcatggaattttgcaggcggcccccttgccgccctgggggagggcgatttttgcctcccccctataaagcccagcccctcccctgtgaaatttcattatattcactaaaaatccaaaaaaacgaaagagagagagaggggagggcagcagaaggggagcggcgaagccctgctggttcgctcacttcatcacaggtatgctcccatacatcttttgcatttgtactaatatattacgtttgagtacatatgttgcgttttagttttagttccatatattttagcagatctgtagcacacagcacatatgtgtagatccagagcatagaatataatagtatgaattgagacatagacagtagtgttaattgtaagatgtagtttagtttgatctggagaatgtaacctacttttagaaatttagagaacaatattgtagagaatgtaacttagggcgtagtacagaaatgcgaggttaacgcagttattgttttcatcaggcacaatgtcaagtaaggtcacatttcagatagttcacggtgaaggaaatattagatttggtccagatggtgttgatctgtcagattttgtaatgacatctaagggcatcgataggcctgcggagagaacatttgagtcaatttatagttggttgttgagaggatttagaatagaccaagaagtctacacaatgtcagtatctgttgtagtgagtcgtgcaatagaaggttatttttgggaactaatgccgatggacagcactgctgcttggagacggtatgtggaaatggcttttgaacggtcatggcccctcgttatatttgtgtcggtacaagagaaagatacaaatgtttcaatgcaaaccgaagatgtggagggtcctagcaatgcaggggatgttgttggaccatcgatgcaaaatgaggaaaatcaaccaagggaggagcaggccatgggcatggcggatgagggggagagagtcggtataattgttgatgaaatggagagggaagattcggataatgagcaagcggaggacgacgcatcatccgatgaggaaggtgatgtaatggccactgattgggcaaatgaggacttctctggtcttgttatatcagagggtgatcatgtaccctgggagtataaggagaacgaggtaattgagggtgcaaggtatgctcataaggatgagatgaaggaggcggtgaagcattgggcagtttcattgcagagagagtttagggtggtcaagtcaacaaattatgtgtatgaagtgaggtgcatgaaggaagaatgtccgtggcgtgtccatgcatataagggtaaatggaatgattattggaaagttagcattgtgaccgagcacaagtgctacttacaaggggtggagaagtatcaccgaaacatcacttcagcttttgtggcaagtgagatgtacagcagtgttgttggtaacattggctttgaaccaaaatcaattattaggcacatcgagaacaaattcaagtacaccataagctatgcaaaggcctggagagccaaacaaaagatcattgagatgaggtatggcacatttgaagcttcttatgataatttgcctcgtttgttagccaccattgcccagaggaataataatacttactatgacctacatacatttacatcggttgaagatcgaacaaagagtgtgctgcaaagagcctttttctcattgggtgcttgcatcaatgcttttgtgcattgtcgacctgttctatgcatagatggaacttttatgacaggtaaataccgaggtcagatattgacagcaattgggtgtgatgggaacaaccaggttctacctatggctttcgcatttgtagagagtgagaacactgaaagctggtactggttcctagagagagtgcacattgcagtggtgcgtatgaggcccaacgtttgccttatacatgatcgtcatgcgggtatgttgcgggctattgactacttgcagaacggttgggatgagaagggacttccagctaagtggcctgatgttcggagtcggtggtgcatgcgtcacatgggtgcaaatttctacaagcaattcaagaacaagcatcttatggatctctttaagaggctctgtgcacagaaccaagagaagaaatttaatgagttgtgggacaagttggatgagttgacaacgaagcaaacagatgagcaatctcgcagaccacaagttgaaggtgacgagcctcccatacctcttggtgcattacatgatgacccaccaacaatgagaaggaggtcagggtcggccatcagaaatttctctcagtggattgagaatgagcctaaggagaagtgggctctattgttcgacaccgatggatctcggtatggcataatgacaaccaatttggcagaggtgtacaactgggtaatgcgaggagttcgggtacttccattggttgctattgttgaattcatccttcacggcacgcaagcctactttagggatcgatacaagaaaattggtccgtccatggccgataacaacatagtgtttggcaacgtagtgacaaagtacatggaagataaaatcaaaaaggcacggagacatagagttgttgctcaaggcacacaagttcatcggtatgaaataatgtgtgttgataggagcaggcgtggtatctatcgcaagcaagccgtgcaggaatgtgtcttgaaggcggatggtggatgtacctgcagttgtatgaagccgaagcttcatcaccttccttgctcacacgttcttgctgctgccggtgattgtggcatatctcccaatgtgtacgtctcaaattatttcaggaaagaagcaatctttcatacatggagtgaggagatatatgggttcgggatctcaggatcttacacaacgctgagtgcccaagttttttatattccagatccatctaagttaagggtgaaaaagggtcgacgccaaactagacgcatcagaaatgatatggatgagtcagaagcaggtgggaggactttacgctgcagcaagtgtgatctgcgcggccatacttacaagaaatgcccgaagaatgcagaagttccaagcggcgctgatgctagtccatctggacaggcaagtgatggtaggcgaccacctggtgaaggaacaacaagcaggcgcgcaaggccaaggcgtcgtcgcgcagcaggcgattccatggtgtaacaatgctttcgatttaggaaataaaatgatgtaatgagtgttcggactaaatacttctatcgtgtaatttcaattcaatcttgttgtaatgagtacctccgactattgttgtactagtagtattgcgaactattcggtgttgtatcgtaatgttatcgtgatgagtgttcggactaaacacttttgtttgtttgtactcttgtttaatatgtgttagtaattcgcttatgaacatttattacttatgttgaactaattatttatatgtttctgatcaacctatttgatgcaggtatggcgtacgacacaccggcgctgttgaactgtgggattgacaggaaccaccgctcgttcctgtcagcagtcgagggtgcacagctcggcaccttccgtccacgcacgtcgcgcgagtggttgcgtgtcgacccccgtcacgttccttggtacgcgtatgttcacatttgaactcaactttgctttgttttgcacttatgtttgaagtttgctctatacaggttgcgtgcggcaggccttctaccactttgtaggcttgttgaggcggcggcggacgaccgtgacccagcgaagcggtgggatgcagaccggtcactccttgccgctcttgtagaccgctggagacctgagacgcacacgttccaccttccctgtggggagatggctccgacactgcaggacgtgtcgtacctgctcgggctaccgctggcgggagcaccagttggtcccgtcgacggtgtttttgggtggaaggaggatatcactgcgcgcttcgagcaggtgatgcgccttccacacctaggaccgaccaccacccttcctccgtactctacagtcgggcctagcaaggcttggttgctccagttcactgtaagtaaataagttgttattatcatacatgcttatttgcgaccggatgagtgttttgtactaacatttcattcttaactgtaggcggaccttctgcaccctgacgctgatgattactcggtccgacgctcccttgaggcgtacctgttgtggttgttcgggtgggtgatgttcactagcacccacgggcacgctgtggacttccggctggtccactacgcacggtccatcgcggatgctcagccacaggacgtgccgcagtggagctggggttctgccgtgctagcagccacgtaccgtgccctctgtgaggcgtgcacgaagactgacgcgggagcgatcatcgctggctgtcctatgttgcttcagctttgggcagccgagaggtttgccatagggcgaccagtggtggacagcgcaccctacggggttggtcgcagcgcgcagtggccagaggacggtcccacgatggggacttactggtgtcgacgtggggttagtgcaacttcgctgcgttataagtttatcagtcctcttctttttttttccttcacataacatgtctaattccgatcatgtttattgcagcgtcgttacgctcacgtccaggtgagacgtggttacccggacttcgtgttcgagtttgaccgtctccagccgagcgacgtcatctgggagccgtacacagaagaggccgtcgctgcgagagcaccgctaggactttcgtccttgtgcacacgcgaccaggcttactggctcaccatcctgccgatggtgttcgacattttcgttgagcctcactgcccgcagcgtgtgatgcgacagttcggacttaggcaggtgtttccgggcaacgtgcagccgaccgtcccccctgccgaccactcgtgagttcggattgttcatttctaaatttttatgataattacatcatcgagccatacaatttacctctcttcacaggttgactcgacggggacagctagcaggcgcactttgggctccacgtgtacagcagtacgttgacgactgggtgttagctacagaggaggtgatcaacgagctcttcccacacacggaggagaactaccgtgactaccttcgctggtaccttcctcgcactcgtgcgcgtgtgaccttcactccagacgccccagagccgcacgttgccgctgtcacggacgcgtatcccacgcaccgtgaccgagactacttcgtggcggtacgtccaatttgtattacttccaacaattatgtcatttatcttgcataatataggacaactactgaattttttatttccatcttgcataggctgatgcggcacgggatatcagtgccgatatcaccgcagtccaggtgaggttgagcagaggtttgcacttgactgacgttgagcagaggtcgaccttcgaccggatgcaggagaagatgcgtgcggtcatgcgcgtcttctcctgtcgcagcgccgtggacgtcgtacctccagctggtccggtacacccacggcctcgcggtcctaccgtcggagcaggacctcgtttgtcttcgagcgcccctagcttcggagcagtgcgacctacagcaccggtttcgcacggtacagttcagcccagatattagttcatttttgtttcagcttttgcacgaatgtgtcaccatgttttaactgcacgtttcctcatcgcaggacctcgtatgccttcgagcgcgttcgcaggcacgaccggcgcttccgcgagctccgcaggggcgttcgccacctcttcgggcgcgttcgccagctcttcctctcacggagcgtcgttccctcgcccacacggtactttactttttattaatactgttaaatacctgtacgaaactgatggtccttgtccagcaggatttgcagccgggatcttcggtactggggcctcttcgtctcacgccggtaggactggtcctactagccagttctacgacgacgacttgcacggtgcagaccaccaggacgtactaggctcctctcagcttggaggagctccagaggcgcacactcaggagcagccagaggtcacacctgtacaggcaggacgggttggccgtgccgtacccccggaccgactcacgtactcccaggggcacattagggcgcagggtaggagggacaggggtaagaggcctcgtcagtagtgttctacctcttcagtccttatgtgaccgtttcttttggcttacaaacttgtaaagcagtactacttttgctattactactgcagtactacttgtgtttgtctcgtctacgtagttcttttcattcgtatggtgcttgaacaacttatgctcacaacaacacactttcggcgcttcacggtagtgccatatccagtagcgcgcacagtccacaacagcacacatgaaaagcggcagctcgagttatcactatcaactttcggcgctgcctgttgacataaagtgaatcacgcccacgcgtgatcgtcttgtcacatctaatgaataatgtatctcattgagttcacatgtattgcagtgaaaacgacgctatataattgacaatctgaaggcaacctcttcatatcttctttcccactaccacaccacacacgaaaatggaagcctattaattggtaatacgtaatctagaattgagattatgtacaacattcttcactacaattttacattttggcagcaaaccaaatatgatcaaatgcaattttaccttaccaaatatttggtagtgccaaaacttgcttatattttggcattaacaaaatatttgtacggtaacattccaaatatgccctaaaaaataataaaattgtattttaccagtcttggagattttaatcttgtatagttttcaatataaaaagatttgataactattgatatttatataaaaaaatatagagcacagtacaaaatcgccctcccccagggcggcaagggggccgcctgcaaaattccatgccccctcgccgcccatttgcaggcggccccccgcacagtgcaaaatcgccctagcggagggcggcaagggggccgcctgcaaaattcgttgacggccgtctgccacgtcattttcgccgccctctgggagggcgatttttaaaaatcgccctcccagagggcggtaggcgactatttccgttaattttcaaaatggaaaattatttttgtaaaacttttaataaaaaaaattataaataaaaaaaattcgatgagccgtgagtgctggagaccggcagagcggtgagccgagctgagtagggtcgggcagtgagccggtgacccagcgttgggtcgccgcgtccaaccccattgtcccgcactcccgctcggcgaggtagcggaggagatcaggagagggaagcgcttggatgagggctgaggcggtggccggtggaagacccaagtgacgtcggctgccccggcacggaggcgccacgtcaaccggcgagcgggcgcgggtgccgcggagccatccgtcgaacaggggcagtgaaccggcggagggcggctcggcccgcacgtccaagtgccccgacgcccggcgtccgccgctcccaatgcagcgcgcgcgagatggaggccggaggggttgcatcatgccattgccgcctagggagaggacagaagaagcgctcggctgaggcagtagggagggggacggattagcggccatggcagccggctgatgaggcggaagacacggcgagcctaacctgcactgttccggccgctcacgggtgtcacatgcttgtgcggcggtgacacaagttcgcggtgccacctcgacacgacgcgacgtcgcgagccccatccaagccaggtattgctaatttcgatttcgaattctatttcaagatcagctataatctttgggaaaataaaaaaggaaactcgtttccagtacaatgggatcaaagtttgtgtactaaggaatttgttaagatttgttagaaacttagaataataaattttgtagaatataattatatggcatatatgttatgatcctactctagctccttaagattaattactcctatgcatgttcaccgtgcattcctcctttttggtacgtataacctggtgtagaacttccgacttcttgaaacactaaaacatccaacttactagcagttatttgacgaaactgatcctgaaaggatgttgaaatattcttttgtacaacacacaatcttgggagaaccacatattccacatattctagttagtgtaatgttaatactctctccttccctaaatgtttgacgccgttgacttttctaaacatgtttgaccgttcgtcttattcaaaaacttttgtgaaatgtataaaactatatgtatacataatagtatatttaataataaatcaaatgatatgaaaagaattaataattacttaatttttttgaataagacgaacggtcaaacatttttaaaaaagtcaacggcgtcaaatgttttgggatggagggagtatatgtctcttgtttctattaattttatggaaatccacaatccgattacaggacttgtccaaaggaaacgctttgtgcctttgcgtgcaaaaagtaaatctaccgtccttctaataccgtgaggctcatgttattattagagctgctggtatttcctcctgattgtttggctccagaggccctatgtgcaaaatacacaggttgtattggagctggaagcgctgcagcttcattctctaacatgaaaacaacagaagacatgggtggcctattatttggattatcttgcacgcacaacagccctatgtggatacatagtaaaacttccatttttgagcaactctcagcaatggatgaatccaccaaatccatggccttgtcatccttccataagctccatgcctaaacagtgaaatagatcagtccatataaaagcggtatagttattttgaatttttatggacatagagcattccatggtacttacataagctaataggttgggaaagtccatcagccgaggtaagctaatcttcagaccacttacaatctccaagagtataacaccatagctatatgtgtcggacttgactgaaaaggcgccatccattgcatattcaggagacatgtaaccactgcttaacagttttagtaataagtaacaaaggatttttcaggaaatcaatgtaatagtaaaaaacaaattcctggatcactcactatgttccaacaactcggttagtattggcttcttgctggttgccaccgaagattcttgccataccaaaatcagatatcttagggctcatatccacatccaacaagatgttgcttgatttgagatctctatgaattattgtcaaccttgagtcttggtggagataaagaagtcctctagctactcctttgattatcttaaaccttgttggccaatcaagagcatacttacttgcaggatctatcaagaatggtatacaatgttcttatagtaaggataattttatcatctttgagaaagtactggtaagtatcacattgtttattgtaaattttggtaccttcagatactaaatatctcaaggtaccaaaaattttagtgtaaaatttaggtatcttgagatactttttcaagaacaataaaatttctctatcagtaagcatggagtgaagtttattggatcgcatggtatgtttttgaacagtaccgaaaatgaaagcttccaagcttttgtttggcaagtattcataaattagcagcttctcatctccatgtatgcaacagccaagaagtttaacgaggttcctgtgctgcaatttggcaattagaacaacttcatttctgaactcttctactccttgtccagaacccttgctaagccttttaattgccacttctttgttatcacccagcatgccctacacaatttaatcaattaatttttttattaagaaagttcatctcgagatgcactttttaccgcaatataagggacgtggtttcgaccccaaggttccttattcgattcttaacacgctcacacattcttcttaattatttaacaccatgtttcttgtcggttctcccttttttaaaaataaagttcatcatccataattgggattttcatatggtatcactgttttcacttttcagtagtaaactactccctccgtcctatggtataagggattttgggtagatgtgacacccaaaatctcttatatttttggacggagggagtactaattgtggcacttcttctgtaatactcctaaaaaatatgctctaaaattgaagaatattgtgcgatagttttgtcctactgtagttttcaatacagtttttgtgggctaccttataaacctttccgaagccaccttgtccgagcatgttgtcgtcagaaaaattatttgttgcagcagcaatgtctccaaaactgacaaacgggagttctaaattttcatcaccaagttcatttaatgcactcaagtatcctagcatccttttctggacaaccttattctgacgtttgcctgacaggaatatcaatatcgtgtattttaatattaatagtagtattattcttaattagataagctgtgagaactgagaagtgaggtggctcggtatctacctctgcacttgcgtaaccacacaaggaacatgctcatcagcagaagcaaacatgctgctgtaactgggagcagaacttttatcacagtcctcttcttattgttaactgcgaaaagaaatatttcaccaaaataattagtacttcctccacgctaaaatatagtaacgtagtactcaatcagacatcacaaatattatagactctaatcgagtactaggcgatgtttaaccgagtactaggatattttacagcgaaggaaatatatatgtaattaaccattgccaaacacattgagcaattctacggtccttaagaaggtatcatgaggtatcaaaaatttagtgtaaaatttggtaccttatagtacctagttaccaaaaggtaccaaatttacaatagaaaaagtggtaccttatggtacctcctcaagaacacattagctcgaacacattagtttcagtgttgtacctagttcaggctttgccagcctcaaatagagatcctgccctttgtcgacataccgaacgtcaatgacgtcacccgtccacatcacgcatccgctgccgccgccggcgcctcggatgtccgcggcggcgtaggcgacgcaggaacagttggcgaagcacctcgccctgcactcgtcaagcgtggcgcccgtgtccaccgtggcgttgtccgtgtcggggagcttcacgccgcgcaccggcacgaacccgtccgtggtgctcccgttgccgcactccagcggcgcgttcctccggcaaccaccggaggtctccctcatggaccactgggaggggaacatcgggctgaaccccgccatgcagctgcagaagagcgtcgacgcggtgttcacgttgcacagcccgaacgcgccgcacttggcgtagtcgtcgcatacgtcgcgcggcgcctgcgcgaacgtgttccaccccttgctgctgggatcccacacgaggcgctggatcacgccggcctcactcagcacgaggcgggagaagggggccgcggcggtggcggcggtgaagacgtaggcgatctcgtcgggcttgaccaccacctggttcgcgaacatggacgagtacgatgccatctccgggacaccgctgaaccacagcccgttccatggccccgtgcggtacttcttgccggcgccgcaccacgagacgcagtccgctagccctctcgtgtccatcacgcggcggcagccccccgtcgccgggtcgtcgggcgcgcgccacgacgtgagggaccactcggcgccggtccgtgggttcctgccgagcctcatgccggcgatcagggtgttcgacgggttgtcgaacgactgccacagcacgtcgccgctgccctggtcgcgcacgacgaggttcccagactcgagcagctgcaccgccaccgatggagacgagccagtcgtgttcgacgaccaggcggcctggccggcggcgccgtcgagcaggacgagcccgcccgtgccatcgataaccactacgccggcggtgtcgttcagtgggctgtcgcggttggccacccagacggcgtccgccgactcggagaaccatatcgcgaggtatctcctgcttggcaagccgggtgagaagaaccccagagtgaaggagccattggctgacacgagcgtgtcgccatcagtgaggttgcggccattgctgagcgtgtccgatgcaacgccggcggcacggtattggaaacaaaggagcacggagaagaagatgacgggacggtagaaaatgttggtggttgctgcttccataactgttgattctttttttccttgcatctccttggaaaattgttcacggccgctgtgcagggagcacgtacgccggccggcctcagtgtctcacgactcacgagcaccatacataggctgtgcttaatctaaattttggatccaaacttcagtacttttccatcacatcaacctgtcatacacacataacttttcagtcatatcatctctaattttaaccaaaatataaactttacgctgaactaaacatagccatatacggaatctaggaactagtagtgccccgccgcataggaagactgcaagtgcgttcctacttcctgccacctccgtccctccgtaccagtttaaatgcagccgtggattctcgtctctaacgtttgactatcttatttaaaaattttaattttttaaataatacgaacggtgaaacgttgaacataaataacgtgaaactatgatctttctgagacggaggtagtacagtaatatcccatgattgactagctagatgaatccatatgggtgagttgcatggtaatgcaaactgcaaagaagattggctgtccatggaatcatggatgattcgtgactgcatataacatgcatggtgtactctccgtcgtgatagccagggtaaagcatcttcatggcaatggtcaaaagagagatgaatggaaacataagtgagggatactgttgccctcgaccccaagaaaaggaaaccataattcatcaaagtgataagtccacaacacatccctatcatagtcgtgctgttgaaaactgctggtaaagtgacgatagctttattaaacttcgtttgacctagctaaagatccgtgaagtcgtgctaaatgctagtactactgtacttaagtggttcagaatcatatcgcgcagaaaagcaaggagcgtagtgatcatctgattaacatctcgcctcattcaaaaagcccgcgtgaaccctgttattttccgattaagatgtagattctatctcgattttcactattacgtttcgaaactgcttaaggatatgttttatgagaaaactttctatacaaaggtttttctaaaaccacaaataaatttaattttctaattcatactagtaattaaaacttgactaatcttaaactaatgactttctcgttttatgtgccgacctggtaggccttgagccgtctggggcctcgtatttatgggcctcaataactcagtacggcccactagcccattggaccaggagtctcccgtacatgcggcctgatttgacccaatcccgtgcggcggcggccgccggcggcacgggagcggcgccgcgcggcgggaggagagcgagtggctgcggccatggccatggccggcgagcccgcgtcgggtggcgtcaacgcgggtgctgccacgcgagggagcagacggcatcgacaggaagtttgccagcctagggggaatcgctctcggctgaagcatttggagaagtagcggcggacgccacggcagccggctgaggggggaagacggcggccctcacggggttacaagtcgtggcgccaagctcccggtggccggtgccacggtgccacctcgtcgcgagccacttgaagccaaggtatacttctgaagttctgatttggatttatattccaagattaactactaggacttggtcgaagtttttagattgaggatatttttcagacttttaattggtggtattgagtgagcctgaagaaaatgattgaaagtggataaaaagcgatagtaaataattaattttgtcatcaaagactttgttattcccatatttcccctcaaaaaaaattgtcatgccaaaatatattgcacacaatcacgcatgttatgatcctacactccatacagttgtcttgggagtgttttttgatatagcctactccctccgtttcacaatgtaagttat

SEQ ID NO: 5235 - DNA, 71116 bp, Oryza sativa
ctaccccatacacgcggagcgaaaacccacgaggggtcagggcgcctcggccctcgggcccgaggggggtgcagcccgaccccctcggggggactaagaggagggcgaacacatcaccctcgggcccgacgtcccccgagggtgccaggccacgtgggcgattgtgtctgcctcaaacctctagtcatgatactcccgatcccatgtcaccgacagtagcccccggcgttatgccagggcgatcgccctccttaagggaagcggtcgggcgtgacgccactcctaaggcctggtgacaggtgggaccggtctccacaattgggcagaaaaccaaacggtcacaaatcacgcacatcggcagtggtaattcggctgtcaacaatgagcggtctcttcaagactgccacattactcgagtagcacacgaatctggacatggcgattcgtttcatctgaagatatggtaacgtcgcttcggttggcgagcgtaattaacgcgcgcacgatatgatctacctcgaccgccacaaccgcatatccacctcatgcgccgcaagcgggcgaatgggattagtggaagcgtgggcgcgagaaacgagggggcgaaatagtgggcgcgagaaacgaggagccgggcatagcgttggcaagggtataaaggcactgaggaagggacttgtttccttcctttcgccattattccccttgtctttgctgcttgcgccctaactcctcctttcctgcgccctaccctcgccacacgcgctcgctcttaatcttctcttcctccggcgccatggcacggggctccgctctgctcgatggtagcgtgctgccgccctcccgcatcgtgagcgagaggcaggctgggctgccgcgccgcttcatgccggaatcggccaccggccgggagatagtcacgctgggcgagggacgcccggcgccagactgtcacgtcctgataaattcatcccgaattaaaaatcattcgctaaaaggaataatagaattaattaaaattcgaaaagaaattggcaaacactaaaatacgtacaagaaaaattcaaatgtggcccggagaatttttgttaaattctccttggtctaaaaagagccctcaaattttagtggaattttcagagcacaaataataattattaagaaataaacaaagttaaaaaggtttataaaaagaaaaaccctaaaagaagtcttcttcccccccttcctctcttgggccggctcggcccacctcgctctttccctctctctcctccccgcggcccactcggcccctcccccgcgcgcgcgccgctgacaggcgggcccgcccgccaccctcgctgacgggtggggcccacctgtcatcgccttcctcgcgccgctcccgccgcccgcccgtgccctagcgccgccgccgccgcggattccgccgcatcccgccatccccgcgcgcattaaagagggggaaatcactccccgtgattccctctccgtttccccccgcttttccctctctctctccctcggattcgctcggaatctttcccctaaacctcgccggcatcaatggcgcccgagatcgccgcggccgtttccttcccctccggcctctctctctccctcccggcgctatataattgttccccgtgcctctctcctccgtttccgccgctcgccgctcgctctccccgtcggattcgtgctcgcgccgtcctcctctctctccgccgtcgccgccgagctccggttcgccgccgtcgtcgccccggacttcctcccgtctcggcgtcacctccatcggcttcgccgcgtcgtcgtcgacctcgtccgctcctccgtttcgcccgccgaccgccggagcaccgtcgtcctcgccgtcccgaaccgcgccggcgctttcctccactccggtcgtcgtttccgccgtcctcgtcgtcccggggtgagccgtggaccgcccctttcgcttccctctcttctccgatctctcgggcgccgctccgccgcgccggtggtcgccggcggtgaccatcggggcgcgggcgcgccgtctcccgtcggccgtgccggcgaggccgccttcgggcgcgccccgcggctgccaggtggggcccggccgtcagccgcccgcgcccgcgggtgcggctgacgcgtgggacccacggcgccggccgccgtcagccgcgtgcacccggtccaccgtggaccgagaggctgacgcgtgggccccactcccgtggacccggtccgcgcgccctctctcccggctgacgcaataaatgagtttttaattaaaatttaaatgaagaaattcgtaaatatccatttaaagagcatataaacttcaaatggctatatcttggccatttgaactcggaattggaccgttcaagtctctaatttttccttaagaagtcaagaacccatttttgtgctttgtttctgctgttatgtggagtttattagagtaaaagccgtttcttttccgttggtcgtgtagacgctgcagcttcggaagatccgctcttcgtggaagttgaagccggtgtttgggaaagcgagcaaggcaagtcacatcatccttgagcatattgaatcccagtttataaaattattttgatttaaattattgcattaccgctttatttaaattcccgcgttatcactgttttatttagccatgcctatttatcgttgttaagacattattattgctattgttattattaccttgttcaccctaggaaaataaaaccccaactagtgggtactctatttatggttccactagtatgaacttaggtagatgcttcgctggttaattaggcaacattaggtgattttataactttagactttgggaattctcatatcatttggacactttggaattgttggtttatggtggaattggacatacacctctcttcccctttcaaaacccctaaaacctgttttcggtggggtttgggtgcatgccagttgtgggaagtagcaccccggccactataaggattaagctcgggcctctgttgcaaagcactaccgtacttccacatgtctagtgggtaaggcttagtttgtggctcagtctggttataaacaaaagtacacggattggagatggatgaagtcgggggtcgatggacattctccagggcaaatgaaggctacacgagctgcggcccggtagtcgagatgtcgtggcagagggttggtgccctgctgcttggggctcagtcctgcctgcctgtcccgggggttccggccgtaggcaggattgggtcggtactcttgtttatggctaggatgggttgggaactatgtcacgtcttccgtccgtataccgtggtggtatgtggcacgtggttacacgtgaggaagatgtgtcttgtgggtaaagatgtacacctctgatcagagtataatctattcgaatagccgcgccctcggttatgggcaagccgagcaatgtacccaagtcagtgttttaattcttaaaatttgctcaacaactaaaatgtggaatggttggcctgggttggcttgggacgagctgggacccagggtcgggttgccagttcggtctgaatcatcgtaggccttgggttaaggcaggttcgtgtgggttcacggccttgattaataatactgtgtagctctaggatcgtctttataaaatggctttgggcaactaagtgacttttaaatgccgtttactgcaaaacttaacccctatcttattatccccttgtactcctttgcattaattgtgcatctccggtgtggcctgctgagtactgtggttgtactcattcttgctcaatcttttccccccttcagtaagagaagctttggagaagaagtcttaggtggagtcctggcttataccccagttgagcgcctgtgaagatggagccgtaggcccgctagtccgctgctgtttatttttgtttgtcaggcctgaagtacctttgtaataatgtaaatattatcgatataataaagatgtgtcttttataccatgtttgtgtggtgtacccggcttttcctgggacggggattaatacactggtgttcgggaaaaggcaattttcccggtcgcgacaagatggtatcagagccatctcgactgtaggataagccaagtggataaaacctaaggacatattttataaataaaactatttgcgaaagttccttttttttctccttcccctaatgctatttgcaaaaggtttactcccttcttccttcttcggatttccactagtactagatggttagtttgcgaagaagaagatgtcgccaattgttcgccgaagctccggaagactgcaggatccgctagcgaagtggaggaagcagtgaagccagctgtgaagcagtgaagatcttggagaacccgtcgcagaacctaagccaccctgtagggtagtgttgttagtcgtgtgttccttgcttgtgtgtgtagcgcgtggtttgcatcggggggttgtgatgtaaccatgctaggttgtttgcttaatcaacttgcagaataagtgaaacaaacaacacatcaacaaagagagttagttcctttaaggtcctgtccctagttctggtctattctttcctagcttgtttcctctctcacctcaatccctgtaacagatgtttaacagagaaaaaggaaagaatgtcagagggtatgcctccagtaactcaagttttcaactcaatccaccactggcctcaagagagttaaccagggcacacccttggtccattccaagcatgccgcttagttcacagctaccattggttggaagtcaagaccaaaatcagtatgtgtttgatcgagcatttgccacccaggtcaatgagcttccaatgccagaagaggatgtccccttttgtcacgattgtagagaacaaggacactatgccctgaattgtccatgggtatatgccaaagaagccccttcctttggtttaacagggcagacatcgctaaaccagcctcctcgcaccaagtcaagcttgcagcctagtgtgcaaagtagagagcccaatggagagaatccattgaatcccgggaattgctttcctcctagcccttcgtaccacgtggggtcacgtactaagcaagccaaaggcaagaagagtaagaatcagaagagaaaagcgccgatgcgaactgaagaagaagtacgtaagatggctattagcagcaccgaatggcctcccgcagggataactattcctagacgtcaaagaggaaataccttccgaggtgcacgacagttgacccagcaccttctaagccatggtggcagagtatctgatagtgaagggtcagatcaagtctcctcggatgatgaagatgagtctccccgacatctcggtgaggaagagatggaatcaaaagcatgtatccgttgtggagaaattggacacattgctagcatgtgtctcacactctgcgcttattgtgaagaagaccatccaccaggggagtgtcccacccgcaaggtcacatgctttctgtgcgaaggtacaaatcatgtgcccaaggattgccaactcagtgtgttgttgaccaagaccgcagaaatccaacgaacgaccctacgattgtctcgtcagctagtcagctccaacagcaacatcgacgatatcatccacaacaccaatgctcctcctgctccacctaactctgcaataaatcatagcaataatatctttagcaccaaccattctctgcaccgacagcctcagcaaagagttgtcgtcgatggaagaagttgtgtctctccccgacctactccaggccaagcaaagggcaatcaacctcaggagggcgataccaagcagaaaaccgtcatccgcttcaaccagcaatcagaaggaagcttctcctgcgaatgatagcattatgcagtcctatcacatcatcacagaaccaatcaaggatgatgcagtcactagaacaatgccagctatatctctccggaatcaaaatgagcagccatgtttgtggttttcagtttgctacttatcattgtgtaatcgaaagtatgcagcaatcatgtaataaacaaatatattcatgattttaaacaatgagcttgctatgtttagggatgattcatgttgaggatacaatgtaccaatgataagcaccttccctttttgtttaaggcagtgccttgtattcgtgtaataagggagaaatgggtaatacagacaagttctaagaggattcttgtggaagatgcggatatgtgatcatatgtataattgtttactgacaaggagacctagggtctcgtgtcagaagaactatattataaactcgagttaataaccaacctgttgatggaaaagaaaaccaattaaactgtgttgggttaaaaagccaatgagacagtagttggggataggagtttggatacgccttttacagatcaagataaggattgttggatgaaacccataagggtacccgccatgcctctacattgataagttcggatatacctgcaaacagttaagaagatccaggagacatcaatatttgagaacatagtagtcgatggttggtaattagtctatcaggtatcagaaaagggtcaaaggtgatatggcagaagaacaatttggatgctccccatctcgaggaagcactaaagatgatcatcggcaattaaaccctagtggcatagatacagatagcaagcaacgtatttccttgaaggtagtcagtgcagctttttgacgaaccacatcaaggtttcacggaaaggcagcaagccaaaggacctcatcgtccccagaagcgtccgcaatccacattaaagaataccacctgttagagataagccgaaagatgattgataaaagagattggcaaagacgttctccagcatgaaagaagtaggccgaaaggtgattgataaacagaaacatgctctgcatcgctcaaggaagacccctgatagtaattgccccgcaacagtcaccttgtcattaagtaagcaagatgacctaggtaaaagtgtttctatgaaggcaaagagtgaaatcttcaactcggtatcagatgctgcacggagtgaaaagtgcaagcaccggttaccaggcaacaccatgtcttgggagattgtcacgcccagaaattcacgaaccagaatttctaagctgaatgtgcattaaacccctgtccaggaccggccagggtacacaaacgacaattgttgacatacagatccacgtcttacaaaaatataaaagattacaaatgcagcggaaaaagagaaaagcgagctaagcctgaagacttgactcctgcagcgggcgactccattccacaggcatccttgacggcagcgacgaaaccaacctcttcgagacatcttcaactgagaaggacttcaactctggtgtgggggaaaagagagcaagactgagtactacccactgtactcagcaagtcacaccggaagaggaggtatgatgcaagatatatccaagggaggctaaaggttcttttgcataaagccggcatttcaaagcagtagttgaaagcagtaaaacagttgtagtaattaatccatattaaccaatcactgtccaacgttacaccacgttgcaacaggcccaaaccaccacctgacctaaccagttccaaaagctaactagggtgaaactaatcacggtgaatctggtcgaccgcccataaccgcgggcacggctattcgaatagttttactctgatcagaggtgtacaactgtacccacaagacacagccccacgacacgttcccgtgcgccgacatgccaccacgacataccggaaagaggccgtgacaggacccttcgcataaccccctctaaccgatcgcaccacaccttagggttcgcccccgtccccagcaggcaacgggcagcccccctttcgtgccgcggtgaatccggcagccgatcaaccggacaccccggccgacccaactccatcacgcccaccctcgcctggatacgtcggctagagaaaagctacactacaagcccagccgttgcccacgctggcttgtggtaagtacgataaattcttccagggcatcccgcgaaccggtccttaatcgccatgggcacgtctagcaaaaccatgcacccacagcccaccatgtagtgtattttaattagccaacaccattgcggtggcactaatccaaagctattgccaataatcaagtctatgctttaatgtggtccccttttgtgcactagttgaactaagcatggctaagcatctcctaaaccaacatctagtcattttaatacccaagttatcattggcataagggaaacaacatatagctgagtaataggacccatcccacatgatattgtaaaacaatgcaatatttaatagaaatgcgggacatttgtaaattaggtacaatatgatcaattgcaatgtatgacttgccttgctctcgcactgatggaaccacagcaacgtcttcgagaaactgcggatcgacgaaacgggcgaaatctacgcgacaaacaaagcacacaagcaaaacatgctataagactactgaaacaggaaacaaaaccatttttaatggattctacacatttttcttgatttactgagacttgaatggacttaaacggagctcggatgaattagttatgaattttagaagattcactgtgtttttactaataaagaaaaagtccttaattaattattgcgcaatatattccagggctgacgtcagcacggggtggcgcggcgccgacaagcggggcccaccggtcagcggcacggggagagagaggggaagggcgctggtacacgggcccactcggcagcggctcaaggggggggcacggctggcaagcgggccccacggctccggctccacgagccgatgtaccggccaggcccggcatcaagccggccgggcggccatggcaaggcggcggcgcgggcatgcgaccgccagcgacggcgagcggcggcgcgggcggcgggcggcggcgcgagcggcggcgcgggcggcgggcggcggcgcgagcggcgacgaccgaaagcgacggcgagggcgcgaagagggcggcggcgcacggggaaaaaaaaagaaggaaaggaaggggagggagacctcaccggaggggcggcaatggccggcggagaaaaacgagggaggcggcgaagaccggtgatgccgaggtgcggacgagcgacggcgacacctagggaaagagaggagaggaattagggcggaggaaaacccccacagcgaccatccacgccggccggagtcggaggggagagagaactcaccgacgacgcgagggaaatggggtttcggtggtattccggtgacgcagagcagcggccgggaagggtcttgcggcggcgaagctagtggtggcggtggcttagtgcggcggcggctctagcgacggcggcacacggccggagtgcggcgacgggcggcggcgtaagtggcggcggtgcgagctcggtagggggcacgggatggagcggtgagagcgaaaaacgagagaggagggcatggggagcattttataggcggagggggaggcggacgtggccgggaggcgctccgatttcgccggcgacgtgggggaggagagagagaaggtggggggagattcaaaatcgaatcccgcccctctcgtgcgctggcgcggccgggagacgcggggagagggcggcgacgtggcgtgggcgcggcgacgtggcgtgggcgcggggaaagcggaggaagtgggtgcggcggcagcggtttcggcgggacggcgcgagcgggagaggcgggaggtgggagacgggtccgacaggtgggccccacctgtcggcgaccccgggagggagggaggcgggcggccggctgggcctcggcctgcggccggcccagcagggaggagggggaggaaaggaggagatgggccagcggcccatccgaaagaaaggaggaaaaagagaaaaaaaaagaaaaagaaaaaagaaaaaggatttttttttcctggaattaaaattgcactttggtgatttttaattggttaaaattatttctagggctctgaaaattccactaaaaatcctgttagcatattttgacatgtagaatccaagaaaaattccacatgccgattccgattattatttgcatttattactttagggtttctctctaggttaaattaaacaatttcttcggacgatttattttatgaatttagagcaagggaggggaacttcagggcgtgacaaacctaccccccttaaacagaatctcgaccccgagattcggaagagctggcgaagaggtgcggatgggcggccttcaattcatcttctctttcccaggtggcttcttcttccgagtggtggctccactgaactttgcaaaacttgatcaccttgtttctggtccttctctcactggtctcgaggatacaaatcggcttctccacataagtcagatcttcctggatgtcaatgtgctctgagctagcttgttcctcaggtaccctcaaacacttcttcagttgagacacatgaaacacatcgtggataccaaccatattagatgggagctcaagctggtaagcgacttcacctctgcgttccaagatcctgtatggtcccacaaagcgtggtgccaacttgcctttggtttggaagcggtgtactccccgaagcggagtgacacgaaggtacacataatcccctgcttcgaaagtaagctctcttcggcggttgtcagcataactcttctgtcgagattgcgcaattcttagcctttctctgacagtcctaactttctcctctgcttcggttaacacttctgtcccaaacagttggcgctcacctgtttgatcccagaaaagtggtgtgcggcactttcgtccgtacaatgcttcaaacggtgccatttgcaaactggactgataactattgttgtaagagaattccgcataaggcagacttttatcccaggctccgccaaagtcaagcgcacaggctctcaacatatcttccaagatttgatttactcgctcggtctgaccatctgtttgcggatgataagccgtgctgaaattcaaacgagtccccaattcttcttgcagtttctgccagaactttgaagtgaactgactccctcgatcagatactatcttcttaggtaccccatgcagacacatgattctcgagaggtagagctccgccaaccttttgcccgtataggtagtgtgtactggaataaaatgagcaactttggtgagtcgatccacgaccacccagattgaatcgtgccccgacgacgttctgggcaaacctgttatgaaatccattccgatttcttcccatttccattccgggatctgaaggggttgtagcagtcctgcgggcctctgatgctctgctttgactcgctgacaaacatcgcagagtgcgacgaattcggctatttctcttctcatgctggcccaccagaatttctctttgaggtcctggtacattttagtactgccgggatgaattgaatactgagtttgatgagcttctgtgagtatgagatccttcagttctttgtcgtcaggcacacacaatctttctcccaaccagattgtgccattctcatcctcatggaaatctcgagcttttccaaccctcatattctttttcagctcagctatttcaggatcatttacttgagctgctctgacttgatccacgagcgtaggccgggcctctagggcagctacgtacccgtgttctacgatgcccaaatttaggtgctcaagatcttgctgcaatttgtcacacatgacttcggtatatactgcattgcaatagctctttctgctcagagcatctgctaccacatttgctttgcctggatgatagtgtatccccatgtcataatctttaatcaactccagccatcttcgttgccggagatttaagtcgggctgggtgaagatgtacttcaggctcttatgatcagtgtaaacttcacagcggttgccaataagatagtgccgccagattttcagagcatgaaccactgctgccaactcaaggtcatgagtgggataattggtctcgtgtgggcgcaactgtcgcgaagcatatgcgaccactctgccttcttgcatcaacacacatcccaatccttggcgagatgcatcacagtagacctggaagtctttcgtctgatctggcagaattagaactggtgcggagactaacttcttcttgagttcttcaaaactttggttgcactcagctgaccatttgaatttttcatctttctttagcaactgtgtcatgggcctggcaatcttagagaaattttcgatgaaccgacggtaatagcccgcaagtccaagaaaactccggatctgagaaactgtctttggtggggtccactttgtaactgactccacatttgatggatccactgccacgccttgagcagaaatgatgtgacccagaaatttgacctccgataaccagaagtcacacttgctaaacttggcatatagttggtgctccttcaatatctcgagtaccaggcggagatgctgctcatgttcctcttctgattttgaataaataagtatgtcgtcaatgaataccacgacaaacttgtcaagaaactccataaacactttgttcatcaagttcatgaagaaagccggtgcattggtgagtccaaaggacataaccgtgcactcaaacaacccataccgagtggtgaaggctgtcttgggaatatcctcttcccgaattctcaactgatgatagcctgatcgtaggtctatcttggaaaacaccttagctccttttagctgatcaaacaggtcatcaattcttggcaacggatatttgttcttgattgtgacctcattaagggcgcgataatccacgcacatcctcttggtcttgtctttcttctccacaaagataaccggagcaccccaaggtgaagtactcggtcggatgtaccctttctgcagctgttcgtcaacctgcttcttgacctctgctagctcattagctgccattctgtacggcctcttgtaaattggagcagtcccgggtgccaaatcgatccggaactcgatttctctcttcggtggcattgtagtgaggtcttctgggaacacctcaggatactcttgtactataggaatatcctccaacttcctgggacttttctccactgtttctgtctgaccctcaatagcagcctgattcagactcgctacggacttctgcgacgctggggaacggaaggtgatcttcccccctttgtcgttggttagggtgatggtgcggcttgcgcagtcaatcactcccttgtttctggtcaaccaatccattccaagaatgacatccaggtctttagattcgagaaggatgaggttggatagaaacggtgatcttttgatctctatagtcaccgaggggcagtagtgtgctgtcctcatatcatttccaggggtatgaacctgcatcggtattttaagttccactaccgataatccatgtgtcccagcaaatcttttggaaatgaaagaatgcgaggcacctgaatcaaagagaactgttgctggatatgagttcactggaaacgtgcccaacacgacctctggtgctgcctgtgcttcctctgcagacacatgattggcgcgggcctggatgaacctgggtccagtgcgattcagcttcggacacttgccagcaaagtggccgtgcttgccacagttgaagcagggtcctggctttcctacagcccccttcttgggttgttctgactgaactgacacagttggcggatctgactgagctggtgccattagtgggggtggagtcgagttgtggttgcgctgcttactgttgttgtgactgccaccgttgtaatcgttgtcgaagttactcgggtgatagggacggtgctgacagacgatcagggtggaaggcccacctagctgtcccgtcatgaagcgaggcttctgattgttcccctgaggaaagctgatctgagctgcctttctttttcggtccattttgttgcgttgctcttcctgacgaatagccttgtccacaagcttctcaaagtcctcataaactccggagattagctggttggtcaattcatcgtcgagcccaaacaaaaacttctcctgcttctcagcatcggtgcgcacgtcctcaggggcgtagcgcgcaaggcggttgaactcatgcaagtactctgtaactgacatggttccttgctggagcgcacggaactctctcttctgttgtgccataatcccttcaggaatctgtgccttcctgaagctttgacaaaactctgcccaagtaacctccgttgcatctagacgggtcgccacgtagttatcccaccaggcagaagcgggaccttgcaactggtgtgtagcaaaagcaactttctcttggtcgttgcattgcagtaggttcagcttcttctcaatagcacggagccagtcgttggcctccattgggttggtggtgcttgagaaagtgggtggctggatacgaagaaagtctaacagtttggacacgtgtgatggtggaggaccaaactgctggttctgttgcgcctgctgcaacatctgatggtaatgttgctgcatctgttgcatcatcattgtcatcatttgagtgactgttgggttttcgggcggtggagatgatctgctgccagatgcaccactgacatgagctccatcggtctgctcttcgctgcccctggcgtcgctggagtcacggggatcattccttgtcttcaccatctggaggggataggtagaaataagagaaaggaagaaaacggatggctcggaaactaatttttcttatgaaattaagtgccattatcttaatctggattaaaacactgaaaaagaggcacacaattcctaattaaggctgtcataccactcacacatgatatcgaccgccgactaacccacaagcaacaaacctaagcacggaaactagcaagcaaacaaaactaagaagacgataaagctaagggcggcgactctgaagcttggagcggcgcttgcgatcgaagaacaggtctgacatctaaagagtacagagggataggaaccaacacatgctcaaaaccaaattaaataaagcaacaaatgactaagtaactcgccgagcatgatgatttttatgcatagaacatttttcatgaacccggataaagacactaatgcgactgactaaaccatagcttaatgcataaacttgttgcatggaaaatgatgcgcataaaattgccccatcgaacatagacacgacctaatgcatatcacccgataaattcccaactgactgtcaaataaactccaaataaacttttaccaaaccctagactgtccctagtcgagaaatccaattaaataagcgaccaagatttttcccacaaactcagaagaacaaaaccccaaaatttttcccgaaacaaatccaagtgcaaaaagcatatgcagatgaagaggggttcagagggctcttaggtttccagttggcttgtcctacggtcaaggtcggctctgataccaacttgtcacgcccagaaattcacgaaccagaatttctaagctgaatgtgcattaaacccctgtccaggaccggccagggtacacaaacgacaattgttgacatacagatccacgtcttacaaaaatataaaagattacaaatgcagcggaaaaagagaaaagcgagctaagcctgaagacttgactcctgcagcgggcgactccattccacaggcatccttgacggcagcgacgaaaccaacctcttcgagacatcttcaactgagaaggacttcaactctggtgtgggggaaaagagagcaagactgagtactacccactgtactcagcaagtcacaccggaagaggaggtatgatgcaagatatatccaagggaggctaaaggttcttttgcataaagccggcatttcaaagcagtagttgaaagcagtaaaacagttgtagtaattaatccatattaaccaatcactgtccaacgttacaccacgttgcaacaggcccaaaccaccacctgacctaaccagttccaaaagctaactagggtgaaactaatcacggtgaatctggtcgaccgcccataaccgcgggcacggctattcgaatagttttactctgatcagaggtgtacaactgtacccacaagacacagccccacgacacgttcccgtgcgccgacatgccaccacgacataccggaaagaggccgtgacaggacccttcgcataaccccctctaaccgatcgcaccacaccttagggttcgcccccgtccccagcaggcaacgggcagcccccctttcgtgccgcggtgaatccggcagccgatcaaccggacaccccggccgacccaactccatcacgcccaccctcgcctgggtacgtcggctagagaaaagctacactacaagcccagccgttgcccacgctggcttgtggtaagtacgataaattcttccagggcatcccgcgaaccggtccttaatcgccatgggcacgtctagcaaaaccatgcacccacagcccaccatgtagtgtattttaattagccaacaccattgcggtggcactaatccaaagctattgccaataatcaagtctatgctttaatgtggtccccttttgtgcactagttgaactaagcatggctaagcatctcctaaaccaacatctagtcattttaatacccaagttatcattggcataagggaaacaacatatagctgagtaataggacccatcccacatgatattgtaaaacaatgcaatatttaatagaaatgcgggacatttgtaaattaggtacaatatgatcaattgcaatgtatgacttgccttgctctcgcactgatggaaccacagcaacgtcttcgagaaactgcggatcgacgaaacgggcgaaatctacgcgacaaacaaagcacacaagcaaaacatgctataagactactgaaacaggaaacaaaaccatttttaatggattctacacatttttcttgatttactgagacttgaatggacttaaacggagctcggatgaattagttatgaattttagaagattcactgtgtttttactaataaagaaaaagtccttaattaattattgcgcaatatattccagggctgacgtcagcacggggtggcgcggcgccgacaagcggggcccaccggtcagcggcacggggagagagaggggaagggcgctggtacacgggcccactcggcagcggctcaagggggggggcacggctggcaagcgggccccacggctccggctccacgagccgatgtaccggccaggcccggcatcaagccggccgggcggccatggcaaggcggcggcgcgggcatgcgaccgccagcgacggcgagcggcggcgcgggcggcgggcggcggcgcgagcggcggcgcgggcggcgggcggcggcgcgagcggcgacgaccgaaagcgacggcgagggcgcgaagagggcggcggcgcacggggaaaaaaaaagaaggaaaggaaggggagggagacctcaccggaggggcggcaatggccggcggagaaaaacgagggaggcggcgaagaccggtgatgccgaggtgcggacgagcgacggcgacacctagggaaagagaggagaggaattagggcggaggaaaacccccacagcgaccatccacgccggccggagtcggaggggagagagaactcaccgacgacgcgagggaaatggggtttcggtggtattccggtgacgcagagcagcggccgggaagggtcttgcggcggcgaagctagtggtggcggtggcttagtgcggcggcggctctagcgacggcggcacacggccggagtgcggcgacgggcggcggcgtaagtggcggcggtgcgagctcggtagggggcacgggatggagcggtgagagcgaaaaacgagagaggagggcatggggagcattttataggcggagggggaggcggacgtggccgggaggcgctccgatttcgccggcgacgtgggggaggagagagagaaggtggggggagattcaaaatcgaatcccgcccctctcgtgcgctggcgcggccgggagacgcggggagagggcggcgacgtggcgtgggcgcggcgacgtggcgtgggcgcggggaaagcggaggaagtgggtgcggcggcagcggtttcggcgggacggcgcgagcgggagaggcgggaggtgggagacgggtccgacaggtgggccccacctgtcggcgaccccgggagggagggaggcgggcggccggctgggcctcggcctgcggccggcccagcagggaggagggggaggaaaggaggagatgggccggcggcccatccgaaagaaaggaggaaaaagagaaaaaaaaagaaaaagaaaaaagaaaaaggatttttttttcctggaattaaaattgcactttggtgatttttaattggttaaaattatttctagggctctgaaaattccactaaaaatcctgttagcatattttgacatgtagaatccaagaaaaattccacatgccgattccgattattatttgcatttattactttagggtttctctctaggttaaattaaacaatttcttcggacgatttattttatgaatttagagcaagggaggggaacttcagggcgtgacagagatgatccaatgggaaagaacacatcaaggctgaaggtgcacaggaatacgttgaatgctaaatgatgacaacatgaagagaatagcggaaagtaaactgaacataaagaaagtgaatctgagttgcttgttcgtgggagctattcccagttatgaaacaagtgatatgttcgaagatagtctacagaggtcagagtaaaatcacatctaacaacgaagcttcaaatttggccggataacgaccagacaataagaagtccagcagtaaagccatttgggaagacgtcaaagcatgtccagtgggataagttggttctcttgggaagcataattcaaaggcaaagttatcgacccttgcatcaaatagcagaagtagctatcacccggagaccaggaaagctaatatgaggcagttggtggcgagttagaagcaaatgacaagcatggtatcttagtaatgacgagctgatctcgacgcatgacatgaagtgggtaacttgtatgaggttgactccaaagatatgaactatgcaaagttctggaactgaagccccatcttcaagtgccacaatccagtcgaagtcagctagaggtgcaaccagggaaaagtcaggtgaagagaagactccatctgcaacaggagattgagccaagcagtccagagtggagaagttttgttaggcaagttcgttataaaagatgcgacggaagaagtcggacaagaagagaagaccgcccaacctatcttcttgctagcctcctcgaatctcggggacgagattcttataaggggggtggatttgtcacgtcctgataaattcatcccgaattaaaaatcattcgctaaaaggaataatagaattaattaaaattcgaaaagaaattggcaaacactaaaatacgtacaagaaaaattcaaatgtggcccggagaatttttgttaaattctccttggtctaaaaagagccctcaaattttagtggaattttcagagcacaaataataattattaagaaataaacaaagttaaaaaggtttataaaaagaaaaaccctaaaagaagtcttctttcccccccttcctctcttgggccggctcggcccacctcgctctttccctctctctcctccccgcggcccactcggcccctcccccgcgcgcacgccgctgacaggcgggcccgcccgccaccctcgctgacgggtggggcccacctgtcatcgccttcctcgcgccgctcccgccgcccgcccgtgccctagcgccgccgccgccgcggattccgccgcatcccgccatccccgcgcgcattaaagagggggaaatcactccccgtgattccctctccgtttccccccgcttttccctctctctctccctcggattcgctcggaatctttcccctaaacctcgccggcatcaatggcgcccgagatcgccgcggccgtttccttcccctccggcctctctctctccctcccggcgctatataattgttccccgtgcctctctcctccgtttccgccgctcgccgctcgctctccccgtcggattcgtgctcgcgccgtcctcctctctctccgccgtcgccgccgagctccggttcgccgccgtcgtcgccccggacttcctcccgtctcggcgtcacctccatcggcttcgccgcgtcgtcgtcgacctcgtccgctcctccgtttcgcccgccgaccgccggagcaccgtcgtcctcgccgtcccgaaccgcgccgccgctttcctccactccggtcgtcgtttccgccgtcctcgtcgtcccggggtgagccgtggaccgcccctttcgcttccctctcttctccgctctctcgggcgccgctccgccgcgccggtggtcgccggcggtgaccatcggggcgcgggcgcgccgtctcccgtcggccgtgccggcgaggccgccttcgggcgcgccccgcggctgccaggtggggcccggccgtcagccgcccgcgcccgcgggtgcggctgacgcgtgggacccacggcgccggccgccgtcagccgcgtgcacccggtccaccgtggaccgagaggctgacgcgtgggccccactcccgtggacccggtccgcgcgccctctctcccggctgacgcaataaatgagtttttaattaaaatttaaatgaagaaattcgtaaatatccatttaaagagcatataaacttcaaatggctatatcttggccatttgaactcggaattggaccgttcaagtctctaatttttccttaagaagtcaagaacccatttttgtgctttgtttctgctgttatgtggagtttattagagtaaaagccgtttcttttccgttggtcgtgtagacgctgcagcttcggaagatccgctcttcgtggaagttgaagccggtgtttgggaaagcgagcaaggcaagtcacatcatccttgagcatattgaatcccagtttataaaattattttgatttaaattattgcattaccgctttatttaaattcccgcgttatcactgttttatttagccatgcctatttatcgttgttaagacattattattgctattgttattattaccttgttcaccctaggaaaataaaaccccaactagtgggtactctatttatggttccactagtatgaacttaggtagatgcttcgctggttaattaggcaacattaggtgattttataactttagactttgggaattctcatatcatttggacactttggaattgttggtttatggtggaattggacatacacctctcttcccctttcaaaacccctaaaacctgttttcggtggggtttgggtgcatgccagttgtgggaagtagcaccccggccactataaggattaagctcgggcctctgttgcaaagcactaccgtacttccacatgtctagtgggtaaggcttagtttgtggctcagtctggttataaacaaaagtacacggattggagatggatgaagtcgggggtcgatggacattctccagggcaaatgaaggctacacgagctgcggcccggtagtcgagatgtcgtggcagagggttggtgccctgctgcttggggctcagtcctgcctgcctgtcccgggggttccggccgtaggcaggattgggtcggtactcttgtttatggctaggatgggttgggaactatgtcacgtcttccgtccgtataccgtggtggtatgtggcacgtggttacacgtgaggaagatgtgtcttgtgggtaaagatgtacacctctgatcagagtataatctattcgaatagccgcgccctcggttatgggcaagccgagcaatgtacccaagtcagtgttttaattcttaaaatttgctcaacaactaaaatgtggaatggttggcctgggttggcttgggacgagctgggacccagggtcgggttgccagttcggtctgaatcatcgtaggccttgggttaaggcaggttcgtgtgggttcacggccttgattaataatactgtgtagctctaggatcgtctttataaaatggctttgggcaactaagtgacttttaaatgccgtttactgcaaaacttaacccctatcttattatccccttgtactcctttgcattaattgtgcatctccggtgtggcctgctgagtactgtggttgtactcattcttgctcaatcttttccccccttcagtaagagaagctttggagaagaagtcttaggtggagtcctggcttataccccagttgagcgcctgtgaagatggagccgtaggcccgctagtccgctgctgtttatttttgtttgtcaggcctgaagtgcctttgtaataatgtaaatattatcgatataataaagatgtgtcttttataccatgtttgtgtggtgtaccccggcttttcctgggacggggattaatacactggcgttcgggaaaaggcaattttcccggtcgcgacacagactacccggggcggtccgtcttctttctcccttttgcaatggcagggctggttccgctattttcttctttcttcatggatgttctggagttctacgatctccagatggcgcacctcacccccaacgcggtgatgacattggccatcttcgcgcatctgtgcgagatgttcattggggtgcgcccatctcttcggctgttccggtggttctttaccgtgcagtcggtgtcgccgccatcggtagtcggtggctgctacttccagccacgggggccggcgctgaaccgctacatcccctgcgccctccgcaagaagtgggacgactggaagagcgattggttctacactcccctcgccgacgaagcgcgcctccgacttccgagccagcccccggcgcaggcctccagttggcgggcgccggtagatctgggggatggctatgacgctgtcctcgaccgcctggcgggcctgcgatcccaggggctcacaggggccatggtgtatggcgactacctccgtcgtcggattgcgccgctccagcggcgcgctcggggcgcctgggagtacaccgggtccgaagactacatgaggacccaccagggagtgagatgggactgggctcctgaggacttcaagatattggtccaacgggtgctgaatctcaactccgtggaggcggccctcattccccaaggaatcctccccctctgcagcgatccagaccgcgcctccatcttgaccattatgacggcagtcggggcctcagaggagggagctccaaagggccacgacggcgcaggcgggagccgcaagggggatcaatctaccccaggagggggtcgtgcttctgggccccgcgtcaggggctcggggagcaaccgccctatcgacgaccgggggaagaggaagctgggacgaacacctcccccatctcctccccgagggggcggggcagtgcgtgccagcagcaggcgcccggagggggccgcgccaacatcacagcccgagggggagcgcaagaagaaacggctccgcaagatgggggagacagaaccatctcggggaaacctcatctcccctccaaagtggtcgttcaaccgaccccctcgcaggttcatctctcactcatcgtggctgtatccattctcttcaacgcgagttttcactcacccgtctttgttcgtcttctggtcttttcttctgttttagcgagatcccgtcgcgtccctcccgtcattccaagtctggccaatctgaggccgaggatccggcggccacagaggcacggaggcgagaatctgaccggcgagaggccgcagatcgcctacgggaagctgaagaggccgcccgggaggccgcccgggctcgccaggctgaggataccgctcgggaggaggccgcccgagcccaccaggccgaggaagccgctcgggagaaagccggatttcgccaggacgaggcaatggtttcttccgaggcagctcgcgacgaggtcgcgggcgcatcgcttgggcccactccctcgggcgacgctcaggcgacaacttccggggcagctggcgacgaggctgcgggcgcgtcgcctgggcccactccttcgggcgacgcccaggaccaaacaggtccggggaacatccccgagtccggcacgtccattggcgggccgagccgcgcgacatcttctccaaggcagctcttccccacgccttccgtcgccccgctgagcgcagagccccttctgcaggccttagccgccgcaaacaccgcggtgttggatgggttaagtgcccaggtggaggccctgcaggcggagcgtgcggagctcgacgccgcatgggcgcgtgtcgaggaggggcggcgatcggtggaggccatggtggaagcgggccgcaaggcacaccgccggcacgtctcagatcttgaagcccgtaagacggcgctggcggagatcgctcaagaggtggaggaggagcggggggctgccctcatcgccaccaccgtgatgaacgaggcgcaggacaccctccgccttcaatacgggagctgggaggcggagctaaagaaaaagctcgacgccgcccagggggtccttgatgccgccgctgcccgagagcagcgagcaacggagaccgaaacggcgctccggcggcgtgaagaggcccttgaggcgcgtgccatggcgctggaagagcgcgcctgcgtcgtggagaaggacctggcggaccgcgaggccgccgtcgccatccgggaggcaacgctggcggcgcacgagtctgcctgcgccgaagaggagtctgcactccgcctccgcgaggacgcgcttaccgagcgggagcgagctctcgaagaggccgaggccgcggcgcaacggttgacggacagcctgtccctccgtgaggcagcgctggcggagcaggcacgccgcaatctagaatgtgtccgcgccgagagggccgcactggaccagcgggccgctgacctcgaggcgcgggagaaggagctggactcgagggcacgcagcggcggggcggctgcgggcgaaagtgacttagccacccgcctcgcagctaccgaactcaccatcgccgacatgcagcgcgcgctagactcatccgccggggaagccgaggccctccgcttggcgggcgagatagggcccggcatgctttgggatgcagtctcccatctggatcgcgccggtcggcaggcgggcctctggaaaggccagacaatgaagtactccaccaaccagggaggcctcgctcagcacctctcgaagatggccggggctctccagcagctccccgaggagctcgagaagaccgtcaagtcatcctcgagggacctcgcccaaggagcggtggagctcgtcctggcgagctaccaggccagggaccccaacttctctccgtggatggcgctggatgagttccctcctgggactgaagacagcgcgcgcgcgcaggtccgggatgccgccgaccacatcgtccacagcttcgagggctcggcccctcggctcgcgttcgcccccaactccgacgaggagggcgacgccagcggtgcagacgacagtgacgacgaggccggcgacccgggcgcatcggattgagcccccaggcccccgctaatctctagttttttctttttctttcttctaaggccttcaggcctcttttttgtatagatcaacttaatctgcaatcaaaaatgatgaaaatttttgtgttaattttactttgctatacaaatgagatgaggatgatctgtgccgtggtccttttgtgtcttagcttgatttaaggactcgtgcccaagtcccagtcctcgaaaggcgcgggtcggggctagtgcctggggagatccacatgtcgaggctggccaggccgggaacgtggtgaccgagggttatgggtgacccgattgtgggtttttgccgattcccccccccggagttcaccacgccccagggcacggctcggttctgggccccgtttggcgattttagctgaccgaaccgagcccccgagggcaaggttgagcacgagtgatcttatttcaagtcaaaattcttcaaaaaggaaaaaacggcacagatacagcccttaggaaattgaaactgcttttattgaaatactgaaataagagaaaagagaatgtgcatgtgtggtagcccccggccaaccatgcacacccgagggggggggtacggggttggcccgagcccgaaacctgacacccgacccccccctcaggggtagaagcgacgaaggtgctcgatgttccatgggttaggcaactcagtgccgtcgcccatggccagccgtatggagcccggccgggggacgccgatcactcgatacggaccctcccacattggtgagagcttgctcaatctagcacgcgtttggacgcggcgtaagacgaggtcgtcgacgcagagtgatcgggcccggacgtggcgctgatggtagcgccgcaggctctgctggtagcgtgcggctcggagggccgcacgccgccttcgttcttccaagtagtcgaggtcatctctacaaagctgatcttgatcagcctcgcagtacatggtggcccgaggagacctcagggtgagctcggatgggagaaccgcttctgcgccgtagacgaggaagaaaggcgtttccccggttgctcggcttggtgtggttcggttcgcctagagcaccgctggcaactcctcgatccatgaatcgccgtgtttcttgagaatattgaaggtcttggttttaaggcctttgaggatttctgcattggcgcgctccacttggccattgcttctggggtgggcaggtgaggcgaagcagagcttgatgcccatgtcttcgcagtagtcgccgaagagttcactagtgaattgggtgccattatccgtaataatacggttaggcactccaaaccgggccgtgatgcccttaatgaatttaagtgcggagtgcttatcgatcttgacgaccggataagcctcgggccacttagtgaacttgtcgatcgcgacatacagatactcaaacccgcccggggcccgcctaaacggtcccaggatatcgagtccccagacagcaaatggccacgaaagtggtatggtctgcagggcctgggccggctgatggatttgcttggcgtggaattgacacgctctacatcggtggaccaggtcgaccgcatcattgagagctgtcggccaatagaaaccttggcgaaaagctttaccaaccaaggtgcgcgaggcggagtgtgctccgcattcgccttcatggatatcggcaagaagcacaacgccttgttcccgaggagtgcacttcaggaggattccattagccgcgcgccgatagagggtcccttctaccagcacgtagcgtttggagatgcgatggacgcgttcactcccttcgcggtcctcgggtagagtcttatctgtgaggtatgcttggatctcggcgatccaagcaatcaatctaagggagctgggagcactcccctcgggtcccgaggcctggactccgacgggcctcgggggccggttaggcgcatccgtctcccctaaggggtcgggtcgcgccgacggctgggcaagcctttcttcaaaggcgcccggtggggtctgggctcgcgaggacgcgagccgtgagagctcgtcggccatcatgttatcccgtctgggaacgtgccgaagctcaatcccgtcaaaatggcgctccatacgccgtacttggcgcacgtaggcgtccatctgcgagtcagagcaccggtactccttacagacttggttaacgaccagctgggaatcgcctaacaccaggaggcggcggatccccagtccagctgccactctgagtccggcaaggagtccctcgtactctgccatattattggtcgctcgaaagtcgaggcggaccaagtatttgaggacgtctccactcggagaggtcaacgtgacccccgcaccggcgccctgaagagacagggagccgtcgaactgcatcacccagtgggcggtgtgaggcagctgcgagggacccgagccggtttcggggaccgagacgagctcgggagccggggtccattctgccacaaagtcggcgagggcctggctcttgatagcgtggcgtggttcaaagtgcaaatcaaactcagaaagttcgattgcccatttcaccacccgtccagtaccctctcgattatgcaagatttgaccgagggggtaagacgtaaccacagtgacccgatgcgcctggaaataatggcgcagtttcctcgaggccatcagaacagcgtaaagcattttctgggcctgagggtatcgggtcttggcatcccggagggcctcactaacaaagtagacgggccgctgcacctttcggtggggccgatccttttcgctaggggccgcatccctggggcgctcttcacccgagcggcctcgcggggcgcactcgtcttctgtgccgacgacctcggggtcggaggacgacgggggcggccttcccacagtggcttcggggccgtcctgggggtcgggggcccctggcgtcgtcggacaagcgggcagagggccatctccggtcgtcgggagccttgggccaccgttctgctcgggggcctctcctccctgctctctcccgggccaaatcggcacagggttagcctcggggtcagagggcgataggtgcggccttcccgcagtggcctcggggccttcctgggggtcgggggctcctagcaccgtctgacaagcgggcagagggccatctccggtcgtcgggggccttgggccaccgttcggctcgggggcctctcctccctgctctctcccgggccaagtcggcacaaggtgggggtgcgcggaatgaggattgtcctcatcgcgttccacgaccaacgccgcactaaccacttgcggggtcgccgctaagtagagtagcaagggttcatttggctctggggcgaccagaactgggggagagctgagatacaccttcaactgagtgagggcacgttcagcctcctccgtccaagtaaacggcccggagcgtttgaggagcttaaataagggtaacgccttctctcccagcctcgatatgaaccgacttagggcgaccatgcaaccggtgacgcattgcacatccctaagcttgctgggggggcgcatccgctctatagctcgtatcttctcggggttggcctcgatgcctcgggcagagaccaagaacccgagaagcttgcccgtaggtacaccgaacacgcacttatcggggttcagttttatgcgggcggagcggaggctctcaaaagtttccgctagatctgaaagtaacgtttcctggttgcgcgtctttacaaccaagtcatcgacataagcctcaacattacgtcctaattggctacccaaagaaattcgagtagtacgttgaaaagtaggacctgcattctttaacccgaagggcattgtcgtataacaataagttcctatgggggtaatgaacgcagttttttcctcatcctccctagccatgcgaatttgatgataaccagagtatgcatctagaaaacacaaaaggtcgcaccccgctgtggagtcgacaatctgatctatgcgaggcagggggtaaggatccttaggacatgccttgttaaggtcggtgtagtcgatgcacattcgaagcttgccgttcgccttgggaacgaccaccgggttcgccagccactccggatggatgacctcgcggatgaatccggcctccagaagtcacgccacctcctcgcggatgaaggcttgacgttccggggcctggcgccgcactttctgccggaccggccttgcgcccggccgtacggcgagacggtgctcaatcacctccctggggaccccgggcatatccgccggtctccatgcgaagacgtcagcgtttgcccgcaggaaagagacgagcgcgtcttcctatttgccatccaagagaccaccgatccgtgtggtcttggacgggccgtcgcccaggacaacctccttgactgggacctcatcgcacgtgactatccgctgcctcggggcggcgggggcggatgtgccaagcctctcgtcgccaccctcgggcttggacacgacggcgaggcggtccgcgcgctgctccatacaagcgagcgcgactttgaggtcgccatggacagagatggggccatcggggcccggcatcttcatctggaggtaggcgtagtggaccgccgccatgaacttcaccaacgcgggcctccccaggaccgcgttgtagggcagactgaggtccgccacatcgaagttcactcgctccgtgcggaaattggcgggtccaccgaaggtgaccgggaggtcgatatgacctagcggccaagtgtgccccggcgtcacaccgatgattggctgggacggccggagcatcatccccggggccttgatggcatcaaaggctgcgggggaaaggatgttgagggctgctcctccatcaatgaggacacgccccaacttcacgttgcaaacggtgggagaaaccaccatcgcaatctgccctccccgggcaacgcacggtgggtggtcggtctggtcgaaagttagggcaacctccgaccaccgcgcccggcgcgtcgcctcatgagtaggggccgcggccagaagctctcgcttcatggccttgaggctccggcgagaaatgtgagcacacgctcctccatcgacagtggcaatggtggccccaggctcttggaaacctaggtcatcatcgccgtcgtcgatgtcctcggcgggggccttcttcttggcctcacttcgccgattgccggaaggaaccgccggggacttgccctctcggcgctcctgcctcctctcttcctcccacttcctcgtccgctcagccaaacttttgactgcacggcagtccgcgaggtcgtgaagggaagtgttgtggacggtgcaccacttgccggctgggcgctccctgctgggagcgccggcctttttctttttgtcgctcgctggcctccccttttgggtggcccgcgaagcgccctcgacggcgaggacatgaccctcgtcgtcggaatggactgacctcttcttcctcctcctgtcacgccgccctgtctgagcggcggatccgggggcggccgaagctgccactccggaaccggaggggttccaggtccatgcctcctccttacgagccactcggtccgcgagctgaaaaagctccgcggtagtctggggctctttggaggcgatcttttcgagcatgcggttgtgccgcacgccccccctgaacgcgtagattaccgcgtgtgcagggatgcatggtatggtattgcggacttgacagaaccgctgaatgtacgatcgaagtgactcatcgtcccttcgctgtactgcgtgcaagtccgcttcctcaccggggcgcggatatgtgccttggaagttcatggtgaactgttggcacaaatcctcccaagagtggacagatgcaggtggcaagttcattagccaaccccgcgcctgccccttcagggccatgggaaagaaattcgccatgaccctgtcgtcacccccggcggcctcaatcccggtcgtgtagacctggagaaactcggcggggttgatgctgccgtcatatttttcggcgatggtgggccggaaccttgggggccaacggacattccgaagactcgccacaaaggctctacagccgacaccaccaaccgggggcacggagggctgattcccacgtccgtgtcgaggtgacactctggacgaggaagcgccctccgttgcgtgggcagcacttcggtcattacgccggcgctcgatgctggtgcgggcgtcctgctccccacgcagatcttcccgggtcgaaggagtcgacgaaggagtgacggccgaacggcgaacagcggctgccgctcgtcgtgccctccgtcttgacgacgcggagccggtggtagcagcaccagaggccttggtggcggaggaccgcccaccagcatctaggcgctgccgcgccgtcatgaccaatttggccacgtcgtccagccatcgttgggctggagactccgggtcagggacgacaggcgggtggcgtaagagcgcgcccgtagcttggagcgcgccctggggcgtgctgccgtcgccgtagacgaggaggcgacgctccccatctcgccgttcttttccatcgcccgcgatcggtgaagtcgcggatctttcgaccctctcgagcgcctccccccgcttaggactttggcgtggagggggcggtggagtacgagctcgacggcgtgggttcggctccccgtcgtcgccactcacactcggagagaggtcgtgcgcctttgcttgctcagccatgaggctgaacaggaaaagcttggtgcacacgaaagagcgcaagagctcagaagatcactcgcagagtcccctacctggcgcgccagatgacggagcgtggggctcctcaccgggagaccgcgctggcccccctttgccggttcggccggggaccctgggtgagactctaagctcccaatctgtatgtggaaggttcgcgagaccggaagcacagaagacaccggcgatgtatacaggttcgggccgctgagaagcgtaataccctactcctgtgttttggtggatctgtgtatgaagcagctacaaagtgtgagccaacctctcccttgttctaggttccgaatctggaaaaaatcaatccaagaaaaagctcccccttctctcagtggtcaaggtcctccttttatatcttaaggggataccacatgcaccatttccctcttttttctgtggggatttcccccaccttctcagaaatagacggagatttgcatggttgccgttcgagtcaccttctgatggaacggcccgcacctacctccactttcgccgggagcaggcgcgacgtagaatcatggctgtctgctggcgacatgaccggtgtcagaatggtcacaaatcggtcattcttgtccaccacgcgtcagcttagctatctgcacgttggctctccttcacactacattttgcctgtaatggttaggatgaagcctggcatatatctgatcagggctaacgtgccatctctgggaggtaacacgctagctccagctggggacgagcgcctagaagccctcgacctgacgggatggggcgaggcgtgcgtcagaccgcctgccgccacctaacccgcgatctgaccggtctgtgactggtcacagaccggataaacgagtgcactgcactgcgctacatgcggtgtgacacgctcagccaaaccgcaattaatgtggttaggtgagccccactgtgctcacctaacccatacacgcggagcgaaaacccacgaggggtcggggcgcctcggccctcggggccgaggggggtgcagcccgaccccatcggggggactaagaggagggcgaacacatcaccctcgggcccgacgtcccccgagggtgccaggccacgtgggcgattgtgtctgcctcaaacctctagtcatgatactcccgatcccatgtcaccgacaacctgatttaagtatacatcgacataagaattatatatcgttaatatctacagccgatcaagtagatttagtttttccttactcattcacgattgccgatcgatacacagatgacatcggctcggatataaatgatatgtcatcggcatctggccgatcggctatcatttatagatttaaccacggttcttttgtctttatttcttgttgattgcaggatcaaatcaactgacacgctcacacatccgaaggcgagttttggacctgcactggagttaagtagatctcccaggcctcgtgttttctgtcaacagccaccccttctccccaccgaccaccgccctcctccacgctgtccgtcggccgttgcgcctggagggaggagaagagagaggagagagatacaatgaagagagggagatggggagagaggtggaagaagaggattgtgagaatgacatgtggggctcacgtgggccccaccggtcttaattatttttttctaactaacatgtaggctaacagtttttattattttccaaattaaattgccacgtaaatgccacgacaatgccacgttatccaaaaacctaattaaattagccacgtaggtgccacgtcagcgaaaaatgagaacaatgttggtgatggatcttgtttgcactggttttgtaagttgagggacccatcatacctagtttttccagtacaaggacgaaaatcagattcaaattaagggactttaaatgaacttattctaaatttgctatgggccaccttgtttacgggttagagagcccataacaataatggttaattggatccagccatgcatcgagcctttttatagatcgcaagtggtctcaaaggtgtggtttttaaaatgggattggtgctggagcactcattggtgccgcatccctagtgtcggttgagaaaaccgataccttaagaggtttttcacatgttctgtggtagtgaaagggtccgtatcataaagagattaccataccgtaacacacaacaatgacttatttcacaagacaagaggactaacaatttcacaagagaatttttatgtccaaaactccaaattgacggagcaaccatcaattcagtgcggtagaatccccagggccttgccgtactcgacgaggtcgccgaatatctcgtccagatccgtccacttgaactcgaacccttccctcgtcagcttctccgacgaatagcacactctcggcttctcagggaacccttcgaaactacgagcaaacaaagattatcgctggctcatcaggttctctcaagaaatgcatgtgtcgatcgatcagtcacttgaaagttgaaactgaaagtgccagttcgtgtatatgtaccagtcggtttggacgttgtactgagggtattttgctgccgcgaaacgtgcgagcgccatcacggtggtgctgaggctgctgcagatgtacctccccgacgccgactccttctccgcgaggaatatctcggcgcggcagacgtcgtccacgtgaaccaccggaatggagccggtggccgccaggcctttcagggtttttagctgcgcctcatcacctgaaaaagaaacaacgtcaatcgtaacacataatggaagtacatactctcttaattctaaaataaacaaatcaaatataaaatgtgatatatcttgaatctgaacaaataaaagagtagcttcttaaatttgacgtatgtttctcaggctctcaccagacagcaaggagagcgtagttgggatgcttgttgtggtcaacggcgtcggcgccgcgcccaaggtgaacaccgggagcacggtgatgaggctgatgtcgttctcctccgcgaatttgcacgccgccttctccaaaagcaccttcgagacaccatacgcctgcaaaacgcaaacgcaaaaacaatggggtgtgctagcatcagccagccgtcattttcatcagcccggtaaaaaatgtatatgaatgatttgatggaggaccaaaaaagaaaggagtagaatgtgacccaagatggtggcttctctctcgtcaggtagtcgacgtcggaccaggacgactcgtccaggacatggccgacgccgccttgcagcggacggagggcgacggcggccgccgacgatgtcagaatcacgcgcttcaccgtgccggctctcaggcacgatctcatcacgttcagggttccttggacgccggcttcaatcatctctttctgccatcaaacgttggcaggaaacccagcttaatttgtcatcgtagaagttaagagcaaattaatttcagtactagagactaaagagcatgcttatcatcagatgacacaagacaactgtcaactgtgacgtcgattagagaaaaccggattaattagctaagctagctgttcacctcaggattctctgactggagattcaccggagcggcgacgaggaaggcgtaatcgcagccgttgacggcttcatcgaagctgccatcttcgtcaaggtcggcacggaagaccttcaaggtgcctagtgcctccaaccccttgagatgggaattcttcctcatgtcatctgaatacacaagagtaggatcgtcagatgtgaaactgaactctgaaaattcgtagcgttgtcttgagaattgagatcataaagatttgcatccatcgtttccagcatatgtcactatatcagttggaacatataaagattttctatatggtgcagatagaagaactttttctattgttcatgacgacagttcagcaaataaactacctctgaccaaaagatttttgaatctgaatgggagaaagactgtggccctgtttagatttcatttttcttctttaaactttcaactttttcgtcacatcgaactttcctacatacataaatttctaactttttcattacatcgttctaatttcattgaacttctaattttggcatgaaactaatcacagcctgtaactgaaatcatgaacaacaaaaaagggggaagaatctcaccagggtttctgactgtcgtgttgacagcatatcccttctgaagcagcatcttgatgagcgccgaagcgatatacccgttcccgccggtcacgcacgccgtcttcatcccaaccgctgacatcgccgtgccgccggctacttcgtcccctccaggctccactacgtcctcctgagagaaatagcttactggaatgaagacggcggttgtaagagtacaagagtacagtcactgtcactgacgttcatctgataggatatgcttgtcagttgtcaccaataagaaatctttgttatttagatgcaaaggtatgtttgtattcagggagtaaactttattccatgtcacattggatatttggatgctaatttagagtattaaacatagaataattacaagactaattgcataaatgagagttaattcacgagacattttttaagcctaatcaattcataattagcacatgtttactatagcatcacatagactaatcatggattaattaggctcaatagattcatctcacgaattagtccagggttatgtaatgagttttgtcattagtctacgtttaatctatctattaatctaaagccagtggttatgccagcttttgattgggccacgtggcgcccctagcttatcaaataaatcatgaattttgtctaaggaaaaaaatacagaagatcaagcaaaatagaaaactacagtgttatgtgataattctaaaagcaagtagtaccttagcagtttcttttaagaaaaagttgtaccttaacaacacagcatccagaacatctagctgttcccacccggtaaaaaaaaaaatcagcttccagaagcttctaactgtacatcacttcgcaataaacatagagactttctagaaccactcaaatataaatcataatttaagataagtctagttaaagtatctagatccatagacttatacatctagattatagtcctttgcaacaacatcactcctagaggcattcaaatatccgatagaagaaaactcagaattattaaaaaaaaaaagggaaatccaataaaaaatatgagcaacagggtcctcagctatcgtatcaccgtgtagcaccaagtcaattgaccatttcaattcctccttttttcagtttccagttaccatcgtatcttatgaaccaagtgtacttcctccactaatataaaatattcccaatctttttcttagagagataagtatggagtgaaaaaactataatgccatttattaaataaaatatagttgaaaaatgacagaatggttagaagtaagacatgaagaaaattaaatcaagaggtgagtgatacgacacgcagtgctcaatttggcaggaccttccagcttttctgtagctaaagctcaacaaagttttttctgctctataaaaaagagagtggagcagactatagtgacctagaaaaatgaggggtggagtgaacacaaagaccgtcaataggccactacttaacttcaaattctacttctagcatttaggagttggatccttccacctaatatttgtggacatcaagagtattatggattattgagagcaagctttgtaagtttacgattttctgtaacttttttttattacaatcactcctttttttaaaaaaatattaatcttctaatatttttttcagagaaccttctattatttaactccacctactttctactttcttaatactttatagtatttaattatatcaaaaatttgttagaaactcaacatctataattaatcgtccaccagaaacatagagaacacacaatcccaaattaacattacaggagattatgctcagaacgatatgcaagagaatacaatatttaatggaacatagaagttgaacgaaatgctaaaaatatcttacaaaattttcatgtttcaaacacacgctaaacaatgtatcgggctataaagaaagtgtgccaaccggcacactaatgttctggtacttctaattagtgtccaaacatccgatgtgacatggcttaaagttttagtccctgatccaaacatttcaaattattttaggacgaggatgcaacactatgtgcggggttggaccatctatggaaagaaggatggaccatttacggaactgtccttacagaactgttcagttgatatgaaagtgggtggttgtttggttgatatctgattgaggagtactcctttcgtctcataaaaaatcaaccaagtatcgaatgtgacacatgctagttgttgacgagtactacaaataaaaaccaaatctatgaccggatgtatagatggccatccgggcggcacggcccaggcacggtcgtgtttaatgaaatatatttaatgtagtgtttaatgaaataaattttgtgttgtaaatgttgctaattttttctataaacttagtcaaaccttttactgaaaatgtttgacaaaaaaagttcaaaatgatttataatatgaaatggatgtagtattaactactataaatatgccaaatggttttattagattttttaaagaaacttaaaaacatgtccataatatacatcttttaacagtttatgaagcggctaaaaaaacaagtggcatccctaacagaccaacgaacggagccttaggtccctcaaaatggacatcccctaatttcttacgtatcaaccaaatgattcttgttaaatttttttataaaaaatatataaatgacatgcaagaacgaaggatatgctctaagggtattaaacttcattgccattatccactgtgtattaggctcatcttaaaacactgtactatttttttttctttaaaaacactgatcacttatttcgcaagcgcatactccagttcggtcctcgtgacagctaggttgaaggtagagcagcatcagctattcgttcaatgtggtagaattcccagggccctgccgtactctacaaggtcatcgagtatgtcgcccatattcgtgtacttgaactcgaacccttccctgatcagcttctccgacgaacagcagactctcggtttctcaggcatcccgtcgaagctgcaaagatacagagacgatcactcgctcgtcagatcgaacacaacaatatttatctattttggatttccaagttggtcaacaattcgatcgtaccggtcggttttgacgttgtactgcgggtaccttccggccatgaaacgggcaagcgccaagacggtggtgttgaagctgcagcagatgtacctcgccgacgactctgccgacgacaatgacgatgactccttctcggcgaggaatatctcggcgcggcagaggtcgtcgacgtgaacgatcgacacggagccggtgacccactgcaggggcttcaggacttcgagatgcgtctcatcacctgagaagtagtagtaaaaaaacagcagccaacttaaactgtgtaacacgcgttgcaaagagtgttgagacttggggtctgtttggagttttaagattacaatctggaaaaattgtgtttcccagcttcattttttggattttacaattatatcttcttataatctaaatcaaaagctgaactgtttagagcaacttctaattctagaatatactgcagcagctagaagctccccccaaacaggccctttgtgggagctagcttgttgatttgattgctgttgctggtgcttctagctcaccggatagcaaggagaggatgccggggacgctcgtcctcgccaccggcgccggcgctgcgcccaaggtgaacaccgggaacacggtgacgaggctcatgttgttctcctccgcgaacttgcatgcggccttctccaaaagcaccttggacacactgtacgcctgcaaacgcaaatgccattgccaattgggtgcaagcttattttcgttggtaaatttaaagaacttttcggtccaatatactgagtattttaagaatttttatcaaattaaaaatggtattttagtaattttcattctagtttgcaacagcgcagtgtctcatggtggtgaaaataatgcctatctctactccctctgtccttaaataactcaacctcttatgacacatcctactattctagtaaaacgaatctagacactctaggatgttacgagatttttttttaacggagggagtatttcgctataagttgtgagtttacataattaccctcatccaatagtatggaaagacaattttaccccctttaattttatactataatatattaaagcacaaggaaatattcataaaaatctttgaattgtttgtactggcagcacatactagtagtagcatatattagtatatattgtacggtaaaagttttcttgaatttatggataagatggagatgtgaaaatgtcaagagagaggaacgtcacccaggctggcggcttctctgttctcaggtagtcgacgtcagaccaggactcctcgtccagcacatacccgtcgccttgcagcggccttctggagatcgctgcgtccgacgatgttatgatcacgcgcttcaccgtccctactttcgcgcacgatctcatcgcgttgagcgttccattgacggcggcttcaaccagatctttctgccaccaccatcaacatcgcaaaaaaaaaaaaaaaaaaaggaaatcaagattagtagagcacatcagttacagagtatcagagtcaatagtgatgttaattagctgttcacctcaggattctctgaattgaagttcatcggagcggcgacgaggaaggcgtagtcgcagccggcgatggcatcgtcgaagcttccttcttcgtccatgtcggcgcggaagaccttcaaggggccaagtgcctgcaagtccttgaggtgggagttcttcgccatgtcatctgaatacaaaccgcagcaattagtggaatcttcagagatgaaactgaaactctgaaaattcacaccatcgtattgataaagtcgcatcatattttgatccatcatatgtcacgatatatatatgtaactatcggttggaagttggaaaaggataagatttgacaacttctccctttcgaaagatatgatattgtccacatgtgcggctaagcctgccatttgctaatgagtggttaagcgaaaacactcgctaattagctcatatggtactagcaggccgaggatatgatcatatgaatggaagaaacactgcaaaaaaagtaaaaaacacgaactagagagtgaaaaaaggaggagaatcttaccggggtttctgaccgtcgtgttgacagcatatcccttctccaacagcatcttgatgagcgcagaagcgatgtacccgttgccgccggtgacgcacgccgtcttcctctcgaccgccgacatcgtcgtcgtcgatcggtcgctacaacaacccaccagcccagatgagacgaagaggacgaggaatttatgtttgttgctgtactttgggaagagttcaatttgtctagtgaggtggtctggcgtgcttatcagtaagattttttttaagtactaccgaaaagaaacatgctgacatcatgcactatatccagaatatcaccttattgtaaaataaaaccggtgcggtgcgagttgggtggttgattgagacatgtatagagaattagctaagagttattttaaaaactactaatttttaagaaaaaaatagccatccaataaaatagtctcaagttgtttagatccaagggttattttaagagctatttaatctttaatgcactttctcatggagagagataaagagaaaagacattttttagtgggccccacctgaaatagccctaattagtattcttaagggggatagtttttttggatgtgttattttcaaatagccctgaaatagctcacctatttataacttttagattatttgcagctatttgaaagaggactgaaaagtaacccatgaatctaaacaggtcctgagtcggagcgtcgattacgcacgtcagctgggttaaagtgtcaatatggagtggacaacaagatcgtcatatcacgctctcagcaatggtatgcgtagctggtagagtcaaaggagcatgcgtgcgtctggaccgatggattcatggccgtccatcggcatccaactgacgttaatacggccgtgcgtcatacacgttgtccataagccgatcgagagatgggacggacggtaggtacagtgctactgcaatcgcgccgtgtcgtgtgactatccctgtgcaccgtgttcattggggctgatgccgagcaggcaggggcagcccatcgcgcgcgctagaaagctagcaggccgaggtgggccgcgagcccgcgagggaggagaaaattgcatatgtactactcattaaaaactggcttcgctataatatcattctcaagatgggatttgcccaaacgccactcataatatatgggtattcgctgaaatgccacttcaggttttcttccatttcgaaaatatttttcatcaatttcaatttttctcagactattatgcccctgagactctttcttctcctcggttcaatctagcgagcgtgagaaggtgagaagagaatcggcagcgacaccggcgccgcccaccaccactgcgccaccgctacctcagctccagccgccgcgccgaggtcctccccagctgtgccgctcgtcctagtccgcgcaattgtgccgcctcctcggtgacatacaccatgagtccatgacatacaacctcaattcatgagttcatatatataacttgcaagcggtttaattttcatttaatttcgcatcaagcagagctgccgacttgtttaattttgtatgagcaagttcgttcgctttggttaacccaaacgaactttaaaaagaagttgcaaaatgtttttcgaacatacaagaagatactactagaatagaagtcgctttgtgcttgaaaattatacacagttgttgatttcagaatgtaaaatcggcacatcattgacacaaaatgtgaacaaaaatatttaccaggcaccagaggaaattacacaggaggcaaaaaaaccactatgaattcagagaagagaagaaaaaaaaatgaaagctaagctcaggggtcctcagtgatgcacgagaggtgcggctgccacggcgaggcatggctcccggtgctcatgcgccgccggtgttggtggtggtgttgcttctgcaccctcatcatccttgtcgtctccggcgacgcgctgcactggctgcccaaccaatcggcgacggcggcgttgccctccgacttgctgcggacgtggtgcccgtggccggcggcgccgccggtgctcgtccttctcttggcgtcggggacggaggcggccgggatgaggaagtagatctcgccgcactccagcttcgactccggcgacacgatgtgtatccggcccatcgccccctgctgcgacgagcactgccggctaagcacgtggttggggtgcgccgccagcacctcaccggcggacacagcacggccgtacgcgtcgatgcggccggctcggtgcctagggtttcgctgaggataggcggcggctggggaggagactcaccggggagaggcggcggcgcagctgttggggggcgggaccggtgaggcacgccgcggcggcgatgcagtggtggtgggcggcgccggtgtcgctgccgcttctcttctcgacttctcgcgttcggtcgctagattgaaacgaagagaagaaagagtccgactgaatcagttgactcaggggcataatagtccaagaaaaattgaaattgatgaaaagtattttcgaaatggaaaaaagcccgaaagtggcattccagcgaatacccacgtgttaagagtggcgtttgggcgaatcctatcttgagaatggcattatagcgaagccagtttttacgagtggtacatatgcaattttctcgcgagggaggggatcgggaatgggcgaccatgcgccgagagcctgggagtgaacgggaaggaaagcttacgcggcgccctcatgcgcttttttttggctatttttttgcgaattttttattttagaaattgaatctttcatcttcaatttcatttggaagttttgaatttgagttgaaagttttaaattttgaaatgaaagtttcaattctgagttgaaattttcaaatatagatttattttttttcaaatcatggttaaaagttatcgaatttgatttgaaagttttaaatcttgagttaaaagttaaaaatccttatttgaaaatttttaaatctgacttgaaattttaaatattaatgcgaaaattttcaaatcttcacatgcaagcttttaaatctgagttaaaagtttttaacaagaaaggaaattggataaagtgttgcactacgtactttgctagcgcatatacactaaataaggaacccccgaggctgcatagcacgtttctttttgggcaaagtggatggccactatccggataagctcttttgggctgagtttggatgtggtgctagaaatttaggatttttcacaaatgctaaatgagactaaattattagtgtcaggttaattgaatactttctccattttcatagtattgttgttttgaattttttttctattctacctttttaaatttaatcaagtttataaaaaatatagcaatattttaaaacaaaacaaacacattattaaaatatctttaatgtagtatttaatgaaattaattttttttacatgttgctagtttttttttataaacttagtcaaaccctttacttaaaaggtttaactagatgatttataatatgaaacggagggagtattaattactataaatatgacaaatggttttattagattttttttaaagaagctttaaaacttttcataatatacatcatttaacagtttgggaagcggctaaaaaaacaagtggcatccctaacagaccaaatgaacggagccttggtccctcaaaatggacatctccttatttcttacgtatcatccaaatgaatcttgttaatttttttaaaaatatatataactatttaaatgacatgcaagaccaaaggataccctataaggtattaattttttttgccattatctactgtgtattaggctcatcttaaaacactgtatttttttttctttgagatgtttaaaggcacagaccacttatttcacaagcgcatatatagtttggtcctcgtgacatctaccccctctatcccataaaaaccatcctaaaccatcctagtactgaatgtgacatatcttagtattacaaatctggatatacacctgtccagattcgttgtactagaatatgtcacatccagtcttagtttcgtttttttggacgaaaggatatgtcacatccagtcttagtttcgtttttttgacgaagggagtaggttgaaagtagagcagcatgagctgttcgttcaatgtggtagaattcccagggccctgccttactccacaaggtcatcaagtatgtcgcccaaattcgtgtacttgaactcgaacggtcgaacccttccctgatcagcttctccgacgaacagcagactctcggtttctcaggcatcccgtcgaagctgcaaagataacagagatcatcactcgctcgtcagatcgaacacagcatgcatgtatatctatgttggatttcgaagttggccaacaattcgatcgtaccggtcggttttgacgttgtactgcgggtaccttccggccatgaaacgggcaagcgccaagacggtggtgttgaagctgcagcagatgtacctcgccgacgactctgccgacgacaatgacgatgactccttctcggcgaggaatatctcggcgcggcagaggtcgtcgacgtgaacgatcgacacgtagccggtgaacgattgcaggggcttcaggacttcgagatgcgtctcatcacctgagaagtaataaacagaagccaacttaggtgtgtttatattcagagacgcggtaaagttttggcgtgtaacatcggatattatatagggtgtcgtaagagttgttggggcattaataaaaaactaattacagcatcgctaataaaccgcgagatgaatttattaagcctaattaatttatcattagcgaatgtttactgtaataccagattcgtctcacaaattagtcgtaatcttgtaattagttattttctagcctatatttaatattttatatagctgttcaaatattcgatgtgacggggtgtaaatttttaaggtgggatctaagaaccacctgcaagtgttgagactttggtgggagctagcttgttgatttgatcgctggtgctggtgcttctaactcaccggatagcagggagaggatgccggggacgctcgtcctcgccaccggcgccggcgctgcgcccaaggtgaacaccgggaatacggtgacgaggctcatgttgttctcctccgcgaacttgcatgctgccttctccaaaagcaccttggagacacagtacgcctgcaaacgcaaacgccattttcaaccatacaatatttatttttggtaaacttataaaaaaagtctatgtttagtttattgctaaatttagtcaatatataagaaatcctgccaaaattttgataatattagcatcttgccaaaattttaacattgccaaaacttggtaaggtttatttttgttacaatctaaacaggccctaaatttagagaacttttctatacaatatactgagtattttaagaatttttattaaattaacaatggtattttaataattttcatccattgtgctagtttgcagcggcgcggcacctcatggtggtgaaaataatgcctatctctactccctccgtcctaaaaaaaacacaacctcgtactctctccgtattttaatttatgacgcggttgactttttgactaacatttgaccattcatcttattaaaaaaatgtatttatcatttattttattgtgacttgatttatcatctaatgttctttaagcatgacatagatatttttgtatttgcacaaaaattttgaataaaacgaatggttaaacgttgataaaaaagttaacggcgtcacacattaaaatactgagggagtgctagaatgtgacatatggttttttagacggtgggagtatttcactataaattatgagtttacagaattaccctccaccaatagtataaaaagacaattttatcccctttaattttatactatattatattgaagcaggaggaaaaaataatatttttttcgattatttgtactgtcagtataatactgtaaaagttttcttaaatttatggataagatggagatgtgaaaatgtcaagagaggaacgtcacccaggctagcggcttctccgttctcaggtagtcaacgtcagaccaggattcctcgtccagcacatgcccgtcgccttgcagcggccttctggagatcgctgcgtccgacgatgttatgatcacgcgcttcaccgtccccgccttcgcgcacgatctcatcgcgttgagcgttccattgacggcggcttcaaccaaatctttctgccaccatcaacgtcggaaaaaaaaacgaaatggagagcagtagagcacatcaaagttggatgaacatggattggaaacggacgaaaactagctatctcgtagtcagtagggatcttaattagtggtgccaagtactaccttgtaaaaaaaaataaattcctatatacaatcttagatagacacatgttttcaggtttgtaggtaatattagttttttttttttttaagacgaagggtgtaagcttttcacctcaggattctctgaattgaagttcatcggagcagcgacgaggaaggcgtagtcgcagccggcgacggcatcgtccaagctgccttcttcgccgatgtcagcacggaacaccttcaaggggtcaagtgcctgcaagtccttgagatgggagttcttcgccatgtcatctgaatacaaatcgcagcaattagtagaatctttgagaggtgaaactgaactctgaaaattcacaccatctttttgagatcatataaagtctcataataattcgatccatcatatgtcacgatatgtatatatgtaactatcagttggaagttggaaaaggataagattttgtcctcatgtgcggctaagcctgccatttgctaattggttaagcgaaaacactcgctaaaaagctcatatggtactagctggcctatgatttcacacctgaactgaatggaagaaacactgcaaaaaacatgaacttagagagtgaaaaaatgaggaggagaacctcaccggggtttctgaccgtcgtcttgacagcatatcccttctccaacagcatatcttgatgagcgcagatgcgatgtagccgttgccgccggtgacgcacgccgtcttcctctcaaccgccgacatcgtcgtcgtcggtcgctacaacctctccagcccagatgacgaagaggacgatgaatttatttttgttgctgttctttggaaagagttcaatttgtgtagtgagccagtgaggtggtctggcgtgcttatcagtaagtattcctaaaagaaacattctgacgagcactatatccagaatatcacctttattataaaataaaaccggtgcggtgcgagttgggtggttgattgaagtgtcaatatggagtggacaaatagatcgtcatatcacgctgctctcagcaatggtaagcatagctggtagagtactacacaatactacggtggtgtttgaatattgaagatgaagatggagattaaggggctgtttggttcagatactaacattgactaggtttaccatgctttcttaaccaaacttgccaaagatgaggccatcaaaatccaagccacactctagccaacaaaatgaaaccatgccacactttttagagacacttacatgtgggacctagattacaaaagaggaatcttgccacacttgtggaagccaaccaaacaatcatctaacatggtcaaacttgtctaaccttaagtatggcaaagtgtagtaacttatggccatcaactaaacagcccctaagtttttatgcaaaacaatatgctattaacgtatgattgattgagttttaattcttacaaacttgaaaaatagattaatatgatattttagtgcaacttttatataaaaagtttttgtacgaaacacatcatttatcatttaacagtttgaaaagcgtgtcacgaaaatcttaatatttatctaagtcttgtggaagaaaagaactggacctgagtcatgcattcgtgcgtctggactgacatgtagattcatggccgaccatcgacttacaactgacgttaatccgggcgtgcgtcatacgcattgtccgtaagccgatcgagagaggggacggtaggtaaagtacaatcgcgccgtgtgtcgtgtcgtgcaccgtgttaattgggggaaaaagtacacccaaggtccctcaacttgtcagcgagataaaaaaacatacttaaaccataaaaccatatatatatatagtcccttaactaaacaaaaccgatcacccgagatccttcggtggttttgaccccgatttcggtctatgtggcggctgagtcagcatgggaccaacgtgggtcccatatatcaggatgccatgtcagccggtcctcggttcctcctctctgttgagcgcgagcgcgaggcttgcaggcgagcagatggttgaggactctgcgagctcggaccggtgcacgacgcggaaggggtccgggtgaccggcgagggcgcggtcgacggctgcaacgcccacggcctcggcggcggagaggaggagatcggcgaccagcgccgccgccgccgcgcttcctccacgcgctagccaccaccgcctccacggggacctcgccgtgggcggcggccatcgtcgacctcgccgcccctagggccctccacgccggcgcacaaggggcttgccgcggaggatgagcggcgtggagctccagacgcgccgccagcgggaggcgagcgcggcggtgcgagtcgcgcccttgaagggaggcgggcgacgaggaggtcgtcggggagcgcgctgacgcggtcctcgccgtcgtatccctcggcggcggaaagcatggcgccgttgtcggaggcgggatggccggggaaccaccggaggcggacttggacgtggcgctgtcgtcgtcgtcgtcctcggcgtcggggaagaaggtgggcgcggcggcggcggaggctagggggttgccgcggctagtgtggatggaaagctgaacattgcttcttcagctccaatatattgtaattcacgagcctttttattttgatggttgcttcttcagttcgaaagatgtctctgtttttattcttgttcaagccattggcaagtctgaagaacctagactgaattctatactgtagtacagttctaccatcgtcagtacagtataaagaagcaatcttttgaatccttttcaagtaggagtatagtatgagattattatagcctgtcaacttgctgtttgtaactagccaatgctaatcttttcagctcgattatgatatatatcacgtcgtcagatttgtgcaaaattggtatagagacattctgaccgggttatggtcgatgacactgtccatcatctgagagtttgcaagtctctgaactctgaacattgcccagaatctcttacaggaatctttttgttggtcttctcatacagtatatatcattggccccttgcaagcagaggacaaattctctttgcattcgtatgcattttaattctgcgaaacctgtagcttgtcctgtgtataaacaacgagaatatcatctgtttatcattccaatttccaagtatcaacttctacctcgaccaggagtaatacagattctgaagtttataaacacatctctgcctgaacaagatggacacctactgttttcagttcaccatttgatctttaccagataaacctgaagttcaaaccgtgcagcactgcagccatgtttcccaagatagaatgacgcgtacacaagcttccagcgtgtcgagggcgaggtcgacggcggcgccgcaccgcgtgtgccagcaaccccaggcgccgcaccccgggagcggcccgctattgggagccgccaccgacgcctgcctgctgtacagaaactgcagcacgagcacgagcaccagcaccttgtaccgcaccagccgcggcaaccccctagcctccgccgccgcgcccaccttcttcctcgacgccgaggacgacgacgacgacagtgccacgacctcctcctcctcggcaccggcgccgcccacctctgccgcgtgccccacgcagcaccaccctccccggtggcgccgccgcgccactatgttcgttgccggccggcttccaacaggagaaaagagtgagagagagagagagagaggaggaagggaggatgctgacggcggcgttgcctccgccggcgcgacgccggctgccggaccttctcctctcccctccccccggcggcctcctcccccacagcgccgcccgtcgccggctgagaaaagtgagagagagaaagggagaagaggggaaataagagggaagagatgaggtggcgtgggttccacgtgggtcccatgctgactcatccgctataaaccgccgaggaatctcgtatgatcggttttgtatagttaaggaatcccgcatatctggttttgcggttcgaggatgattttgtatctcgctgacaagttgagggaccttcggtgcactttttccgaattttttttatttttaattttttttattaaaagttttacaaaaataatttttcattttgaaaattgacagaagtggtcgcctaccgccctctgggagggcgatttttaaaaatcgccatcccagagggcggcgaaaatgacgtggcagacggccgttcgctctcgggcgacggccgtcaacgaaatttgcatgcggcccccttgccgccctccgctagggcgattttgtactgtgcggggggccgcctgcaaatgggcggcgagggggcatggaattttgcaggcggcccccttgctgccctgggggagggcgattttatactgtgctatatttttttttataaatatcaatagttatcaaatctttttatattgaaaactatacaagattaaaatctccaagactggtaaaatacaattttattattttttagggcatagttggaatgttaccgtacaaatattttgttagtgccaaaatataagcaagttttggcactaccaaatatttggtaaggtaaaattgcatttgatcatatttggtttgctgccaaaatgtaaaattgtagtgaagaatgttctacataatctcaaatctagattatgtattaccaatgaataggcttccattttcgtgtgttgtgtgctagtgggaaagaagatatgaagaggttgccttcagattgtcaattatatagcgtcgttttcactgcaatatatgtgaactcaatgagatacattattcattagatgtgacaagacgatcacgcgtgggcgtgattcactttatgtcaacaggcagcgccgaaagttgatagtgataactcgagctgccgcttttcatgtgtgctgttgtggactgtacgcgctactggatctgacactaccatgaagcgccgaaagtgcgttgtcgtgagcataagttgttctagcaccatatgaatgaaaagaactatgtagacgagacaaacacaagtagtactgcagtagtaatagcaaaagtagtactgctttacaagtttgtaagccaaaagaaacggtcacataaggactgaagaggtagaacactactgacgaggcctcttacccctgtccctcctaccctgcgccctaatgtgcccctgggagtacgtgagtcggtccgggggtacggcacggccaactcgtcctgcctgtacaggtgtgacctctggctgctcctgagtgtgcgcctctggagctcctccaagctgagaggagcctagtacgtcgtggtggtgtgcaccgtgcaagtcgtcgtcgtagaactggctagtaggaccagtcctaccggcgtgagacgaagaggccccagtaccgaagatcccggctgcaaatcctgctggacaaggactatcagtttcatacaggtatttaatagtattaataaaaagtaaagtaccgtgtgggcgagggatcgacgctccgtgagaggaagagctggcgaacgcgcccgaagaggtggcgaacgcccctgcggagctcgcggaagtgccggtcgtgcctgcgaacgcgctcgaaggcagacgaggtcctgcgatgaggaaacgtgcagttaaaacatggtgacatattcgtgcaaaagctgaaacaaaaatgaactaatatctgggctgaactgtaccgtgcgaaaccggtgctgtaggtcgcactgctccgaagctaggggcgctcgaaggcaaacgaggtcctgcgaggatggaacatcaagttacgacggggtgatgttttcgtacaaaaacagaaacaaaacttaagaaacctctgggctgagcagtaccgtgcgaaacaggtgccgtaggtcgaggtcctgctccgacggtaggcacgcgaggccgtggttgcaccggaccagctggaggtacgacgtccatggcgctgcgacaggagaagacgcgcatgaccgcacgcatcttctcctgcatccggtcgaaggtcaccctctgctcaacgtcagtcaagtgcaaacctctgttcaacctcacttggactgcggtgatatcggcactgatatcccgtgcggcatcagcctatgcaagatggaaataaaaaattcagtagttgtcctatattatgcaagataaatgaaataattgtaagaagtaatacaaattcgacgtacccccacgaagtagtctcggtcacggtgcgtgggatacgcgtccgtgacagcggcaacgtgcggctctggggcgtctggagtgaaggtcacacgcgcacgagtgcgaggaaggtaccagcgaaggtagtcacggtagttctcctccgtgtgtgggaagagctcgttgatcacctcctctgtagctaacacccagtcgtcaacgtactgctgtacacgtggagcccaaagtgcgcctgctagctgtccccgtcgagtcaacatgtgaagagaggtacattatatggctcgatgatcgcttaattatcataaaaatttagaaatgaacaatccgaactcacgagtggtcggcaaggaggacggtcggctgcacgttgcccggaaacacctgcctaagtccgaactgtctcatcacatgctgcgggcagtgaggctcaacgaaaatgtcgaacaccatcggcaggatggtgagccagtaagcctggtcgcgtgtgcacaaggacgaaagtcctagcggtgctctcgcagcgacggcctcttctgtgtacggctcccagatgacgtcgctcggcaggagacggtcaaactcgaacacgaagtccgggtaacctcgtctcacctggacgtgagcgtaacgacgctgcaataaacatgatcggaattagacatgttatgtgaagaaaaaaagaagacgactgataaacttataacgcagcgaagttgcactaaccccacgtcgacaccagtaagtccccatcgtgggaccgtcctctggccactgcgcgctgcgaccaaccccgtagggtgcgctgtccaccactggtcgacctatggcaaacctctcggctgcccaaagctgaagcaacatagggcagccagcgatgatcgctcccgcgtcagtcttcgtgcacgcctcacagagggcacggtacgtggctgctagcacggcagaaccccagctccactgtggcacgtcctgtggctgagcatccgcgatgaaccgtgcgtagtggaccagccggaagtccacagcgtgcccgtgggtgctagtgaacatcacccacccgaacaacaacaacaggtacgcctcaagggagcgtcggaccgagtaatcatcagcgtcagggtgcagaaggtccgcctacaattaagaatgaaatgttagtacaaaacactctgttgatcgcaaataagcatgtatgataataacaacttatttacttacagtgaactggagcaaccaagccttgctaggcccgactgtagagtacggaggaagggtgttggccggtcctaggtgtggaaggcgcatcacctgctcgaagcgcgcagtgatatcctccttccacccaaaaacacagtccacgggaccaactggtgctcccgccagcggtagcccgagcaggtacgacacgtcctgcagtgtcggagccatctccccacagggaaggtggaacgtgtgcgtctcaggtctccagcggtctaccagagcggcaaggagtgaccggtctgcatcccaccgcttcgctgggtcacggtcgtccgccgccgcctcaacaagcctacaaagtggtggaaggcctgccgcacgcaacctgtatagagcaaacttcaaacataagtacaacacaaagcaaagttgagttgaaatgtgaacatacgcgtaccaaggaacgtgacgggggtcgacacgcaaccactcgcgcgacgtgcgtggacggaaggtgccgagctgtgcaccctcgactgctgacaggaacgagcggtggttcctgtcaatcccacggttcaacagcgccggtgtgtcgtacgccatacctgcatcaaacagattgatcagaaacatataaataattagttcaacataagtaataaatgttcataagcgaattactaacacattcctgcacaagagtacaaacaaacaaaagtgtcaccatacggaatatttctgattacaacaataactgcagttacacgatatgagtacttagtccgaatactcatcacgataacattatgatacaacaccgaatagttcgcaatactactagtacaacaatagtcggaggtactcattacaacaacattcaattgaaattacacgatagaaatatttagtccgaacactcattacagcacaacagcattttatttcctaaatcgatagcattgttacaccatggaatcgcctgctgcgcgacgacgccttggccttgcgcgcctgcttgttgttccttcaccaggtggtcgcctaccctcacttgcctgtccagatggactagcatctgcgccgcttggaacttctgcattctttgggcatttcttgtaagtatggccgcgcagatcacacttgctgcagcgtaaagtcctcccacctgcttctgactcatccatatcatttctgatgcgtctagtttggcgtcgaccctttttcacccttaacttagatggatctggaatataaaaaacttgggcactcagcgttgtgtaagatcctgagatcccgaacccatatatctcctcactccatgtatgaaagattgcttctttcctgaaataatttgagacgtacacattggagatatgccacaatcaccggcagcagcaagaacgtgtgagcaaggaaggtgatgaagcttcggcttcatacaactgcaggtacatccaccatccgccttcaagacacattcctgcacggcttgcttgcgatagataccacgcctgctcctatcaacacacattatttcataccgatgcacttgtgtgccttgagcaacaactctatgtctccgtgcctttttgattttatcttccatgtactttgtcactacgttgccaaacactatgttgttatcggccatggacggaccaattttcttgtatcgatccctaaagtacgcttgcgtgccgtgaaggatgaattcaacaatagcaaccaatggaagtacccgaactcctcgcattacccagttgtacacctctgctaaattggttgtcattatgccataccgagatccatcggtgtcgaacaatagagaccacttctccttaggctcattctcaatccactgagtgaaatttctgatggacgaccctgacctccttctcattgttggtgggtcatcatgtaatgcaccaagaggtatgggaggctcgtcaccttcaacttgtggtctgcgagattgctcatctgtttgcttcgttgtcaactcatccaacttgtcccacaactcattaaatttcttctcttggttctgtgcacagagcctcttaaagagctccataagatgcttgttcttgaattgcttgtagaaatttgcacccatgtgacgcatgcaccaccgactccgaacatcaggccacttagctggaagtcccttctcatcccaaccgttctgcaagtagtcaatagcccgcaacatacccgcatgacgatcatgtataaggcaaacgttgggcctcatacgcaccactgcaatgtgcactctctctaggaaccaataccagctttcagtgttctcactctctacaaatgcaaaagccataggtagaacctggttgttcccatcacacccaattgctgtcaatatctgacctcggtatttacctgtcataaaagttccatctatgcatagaacaagtcgacaatgcacaaaagcattgatgcaagcacccaacgagaaaaaggctctttgcagcacactctttgttcgatcatcaactgatgtaaatgtatgtaggtcatagtaagtattattattcctctgggcaatggtggctaacaaacgaggcaaattatcataagaagcttcaaatgtgccatacctcatctcaataatcttttgtttggctctccaggcctttgcatagcttatggtgtacttgaatttgttctcgatgtgcctaataattgattttggttcaaagccaatgttaccaacaacactgctgtacatctcacttgccacaaaaagctgaagtgatgtttcggtgatacttctccaccccttgtaagtagcacttgtgctcggtcacaatgctaactttccaataatcattccatttacccttatatgcatggacacgccacggacaatcttccttcatgcacctcacttcatacacataatttgttgacttgaccaccctaaactctctctgcaaggaaactgcccaatgcttcaccgcctccttcatctcatccttatgagcataccttgcaccctcaattacctcgttctccttatactcccagggtacatgatcaccctctgatataacaagtccagagaagtcctcatttgcccaatcagtggccattacatcactttcctcatcggatgatgcgtcgtcgtccgcttcctcattatccgaatcttccctctccatttcatcaacaattataccgactctctccccctcatccgccatgcccatggcctgctcctcccttggttgattttcctcattttgcatcgatggtccaacaacatcccctgcattgataggaccctctacatcttcggtttgcattgaaacatttatatctttctcttgtaccgacacaaatataacgaggggccatgaccgttcaaaagccatttccacataccgtctccaagcagcagtgctgtccatcggcattagttcccaaaaataaccttctgttgcacgactcactacaactgatactgacattgtgtagacttcttggtctattctaaatcctctcaacaaccaactataaattgactgaaatgttctctccgcaggcctatcgatgcccttagatgtcattacaaaatctgacagatcaacaccatctggaccaaatctaatatttccttcaccgtgaactatctaaaatgtgaccttatttgacattgtgcctgatgaaaacaataactgcgttaacctcgcatttctgtactacgccctaagttacattctctacaatattgttctccaaaattctaaaagtaggttacattctccagatcaaactaaactacatcttacaattaacactactgtctatgtctcaattcatactattatattctatgctctggatctacacatatgtgctgtgtgctacagatctgctaaaatatatggaactaaaactaaaacgcaacatatatactcaaacataacatattagtacaaatgtaaaagatgtatgggagcatacctgtgatgaagtgagcgaaccagcagggcttcgccgctccccttctgctgccctcccctctctctctttcgttttttttggatttttagtgaatataatgaaatttcagagaggagggactgggctttataggggggaggcaaaaatcgccctcccccagggcggcaagggggccgcctgcaaaattccatgccccctcgccgcccatttgcaggcggccccccgcacagtacaaaatcgccctagcggagggcggcaagggggccgcctacaaatttcgttgacggccgtcgcccgagagcgaacggccgtctgccacgtcatttttgccgccctctgggatggcgatttttaaaaatcgccctcccagagggcggtaggcgactacttccgtcaattttcaaaatgaaaaattatttttgtaaaacttttaataaaaaaattaaaaataaaaaaaaatccactttttcctaattggggctgatgccgagcaggcaggggcagcccatcgcgcgcgctagaaagctagcaggccgcggtgggccgcgagcccgcgagggaggggatcgggaatgcgcgaccacgcgccgggagtgagcgggaggtcgcatgcgcgatccgttgactgatttctctgcactaatttccaccgttcgccttgtcccacgtagggatggcaatcgggcgcgacgggcacgggtagtgcctacctatacccatgcccgtgagattatttgtgctcgtgggtatacccattactacatgacgggtaaggatggttacctatgcccattgcccgcgggcgtgcccgtttacccgccacaacaaaagcagtggaacaaaaagtctacaagctactaagttcgaatcgaacttaaaacatcaaatattctccacctcggtgtcgtgtctctcctctggcggcgatagagtaagaggagagaaataataagggaaataaaagggaaaccgaagaaatcaaagaactgggcttatgtattctagtggattttgctcctagcctacatataagttagatttcgtgggtaaacgggcaaagcgggcatgggtagtgattacccatacccatgcccatttactcatcgggcatagcttttgacccaataagatacccatgggtataaaatggagaacaaacccaaccctaatagggtttttacccgcgggtaaacgggcaaacgggcacaattgccatccctagtcccacgttgacgaccggcggaggttgatgccaaggatattgtcgttgccggcttgccgcgcatccatcgccccggtgcctggttacgtgcccgtcgcgctcaaaaatctcgtccacgcactgcacaaaagatcaggccggccaccgtgcccaggtgaaacacgaggtggccagtacgtgacagagccaggcagcgtgtgacgtctgtggtttttgcatgctcgcattgcccgcatccgcatgccgtcgtgtagcgtgagcaattgaccgatcgatttgtggccttggccttctcaacctgctcggctgcacctgacagcagcagcagtgtcgcagcaggtagaaacgctgttcagagagttttttttttttcaacgcgtgccagaccacaacattcccattacggattcacatggatccatagtaaagagggcccacatgttagtgactcaaagtcatgtggcttagtccgtgtttagattttttttttttgctaaaaaggtcacatcgaatgtttggacacgtgcatggagtattatttgtggaaaaaaaccaattacacagtttgcatgtaaattatgagacgaattttttgagtctaattacgccatgatttaacaatgtgatgctacagtaaatatttactaatgatggacacattaggcttaataaattcgtctcgcagtttatatgtggaatctgtaatttgttttgttattagtctacgtttaatacttcaaatgtatatccgtatactaaaaaaaatttggccaagaaactaaacacaaccttttttttgtggcagaagtttttacccggttctccgggaaaccgggaaagtacgttggtattgcaaaaactattagaggatttcagctaatcctttccggagaattagacagcttaccccctaagaggatctcaaattctcaatcctcctcttacatgaacagaacgaagtacagccaaaccgccaaatgtattggaacttggtactagtactactagcaatgtagcaatagaatgctagacacaatagtatttttgaaagcaacacacgtttggtcgtaatcgccaaagcagtggaattacgccgcccatcatcaccatcagttggggatcaaccccagggccttgccgtacgcgacgaggtcgtcgtacatctcgtccaggttcttgtacttgaactcgaacccttcgccgatgagcttcgccgacgagagcgagatggtcggcttctcggggtgatgctcttcgatgctgcgtacatagcaacgcatgatcagattcagataaccaaatgcacgaatgcataaagcttaatttcttaattaccaatcgcatctgacgttgtactgggggtacttggccgccaggaagccggcgatctcggtgaccgtggtgttgaggctgccgcagatgtacctccccgacgccgactcctcctcggcgacgaagatctcggcgcggcacacgtcctcgatgtggaccatcggcatcgaccacccggacgccttctcgatgcccttgaggatgttcatcatctcctcgtcgcctgaaaaaaaaaattcacagatcatcgatgcagcgacccaaaaacgttcagaagtcgagttcttggattgcttcttgtttcattcattcggtgatcgctagatagttcctcaccggttatcaacgagaggcaggccgggacgctggtatcgaccctcaccgccggcgatgctccgacggcgacgaccgggcagagggtcaccaggctgagaccgttctcctccgcgaacttggtcgcctccttctccgaaagaaccttggagatcgagtacgcctgcagtgcatgcagcaacaatggcgccgaactcatgttctacgagacattgctgtggttcagtgacatggaacagctcgtgtgtatatatgtgtacctgcgtcggcgacagcttctccatggatctgaggtactcgatgtcggaccaggacgactcgtcgaggacatggccggcgccttccagcggccgcaggctggagacggcggccgtcgacgacgtcaggatcacgcgcttcaccgtgccggctctcgcgcacgacctcatcacgttcagtgtgccctcgacgccgccttggactatctctttctgccatggccaagttcagaattcagtaactaactaactgactacagatactaatcgagcttgcaggttgcagcagtggtcacctcgagatcgtcggacttgtggctcttgtcgtacaccggagcggcgacgaggaaggcgtagtggcagccggcgacggcctcgtcgaagctgccttcatcctccaagttggcgcgaaagaccttcagggggccgagtttttccatgtccttgaaatgggagaccttctccgggttatctgaaattcagagttacaaaagcagtttcagaggccaaaccaaaattgtactgacacaatcaatcccaaaactgaacgtgcaaatactcctctgaaacaaattatgaactgatgacatgttcttcgattttcagttaaaactgaacactggaaaaacatgtaacaagaaagaaagggagtagaatctcactgggatctctgacgcttgtctgaacagcgtatcctttctccaggagcatcttgacgagcaatgaagcaacgtacccgttgccgccggtgacgcacaccgtcttcctctcaacctccgacgacatcgtctctctctctctctccggtcagttaatacctctcctgtgacagagaaggtgacttgggtttactcccaggtagaatccgagcagcacactgatgatgaggtttcttttgctgattgcgctgttgtggcacttgccaggacaaatcccggagagcaggaacataatacatttgacttagccaacactattttacaagcgacgacgccagtcgccagacagagaggcagaacaagaaatgcttttcgtgatgcatgcaccatacctgctcttctgattgattttccttccttagataatgacctgcactgatcgattatgtcgatcgatgaacatctcacgcttcacatttttaatgcggtcgatcgtgttttcaaaaggtaaagcttttgctccaagaaaaaaggatcatcttatcttcccagatgacgtgtgtacaggttcattcttagaattgaacttttttttttaggatagaggtagtacatctgacgctgaagcctgtgacgatttaacatcgttgaaaatgataggatccgtttctttctctatgcaaacaaaagcgagagaggaacagcacacgcgccattgaaaagtaacccaacgctgcatgcctgcgaattggacttctcgtttgtgtgtgtgattaatcataccaaaaagtaattcctgcgatgcccgcaaagttgagctgagagagctagcataaaaaaaaaagctagcaagttagttcatgttattagtactccctatgtttacaccattgactttttagcacatacttgatcattcatcttattcaaagaaatttgtgaaatatgtaaaactatatttatacatgaaagtatatttaacaatgaattaaatgatagaaaaaaaataataattacatattttttttgaataagacgaatgatcaaacatgtttaaaaaaatcaaacggcgtcaaatatttagaaaaggaggaagaagttgtcttcgcatctctgtaataactttcccacactaaggttgtgtttagttcacatcaaaattagaagtttggttgaaattgaaatgatgtgatggaaaaattagaagtttgtgtgtgtagaaaagttttgatgtgatggaaaagttgaaagtttgaagaattattttggaactaaacacggcctaacacgacctgatcttcagatgctgaactggggaccttgaaagaccttgtgaggcttcgttgttccaccagaatattttctttgctacttaatgaaatgacagatctcttgcttgtttcaaaaaagaaaatcatagagccacaattaggttgtgttctttagtgagggttgtgaatcctttcctcccgacacataaaacggagtgacggattagcgcatgattaattaaatactatttaactgaaaaacttgaaaaatgaattgatatggttttttaaaacaacttttctatacttttatcttgtaaaaaacatattgtttaatcgtttggtaattgtgcatgtgaaaattgaggggtagaaattgagaaaatgttgaaaggagcacaattttattgaacagtttgacgtgtcaataggcacgtttttcataaaagcggatgggaacaaattcactgctgttttacacatacttatttttgcaagagccgtttggttgcgaagctgggtagtaacagcattgtcgtcggcgtcagtagtgcagaatcccgagtgccatgccgtactccacgaaggcatcatcgtacatctcatccaccgtcttgtacatgaactcgaacccttcactggtcagcttctccgacgagaggaggatcgtcggcttctcagggaggccgccgccgagtctgcatgttccgccgccaccgtcggagtcagctcgcagtggacacgcataatctttgagaccagttcatgattttgtcttacgcatcgatgtcaacgttgtggtgcgggtatttggcggccagggaacgggcgatctgccgcatggtggtgttgagggcgcagcagatgtacctccccgacggcgacggcgacgctttctcggcgaggaatatctcggcgcggcagaggtcgtcgacgtgaaccagcttcagcccgccggagtactggtcaatcattctcagggtgttgatctcctcgttgcctgaaatcgaatcggacacgtgagtccgaaccagatactccctccataccatgaaaactctcgttatactaaattatattacattctaatactaggttgggtttttggaagaaggagtttattctagcacacttaggtcgtgtttgctactgagggttctcaatcttctctctcgtttttctcgcgcatgcttttcaaattgctaaacaatatgtttttgcagcaactttctatatgaaagttgcttaaaaaaattaaattaatctatttttttaaaaaagttaactaatacttaattaatcatgtgttaatgaactgttccgttttccgtgcggagggaaagagtttccatccatgatctccaaacaatactgccggtgcttacgtactcaccggacagcaaggagaggacgttggcgacgctctcgttggccaccggcgccggcgacgcgccgacggtggcgaccgggcacaccgccactaagctgatgccgttctcctccgccagcttgctcgcttccttctccgagagaaccttggcgatcgcgtaagcctgcagcgcaaacaccaccgctgtgctctcacgcaagcgactgtactatcaactctgactgaacatgtaaaattttgtaagtttgtgtgtacctgagcaggagatatcccgttggttgatctgaggtagtcgaggtcggaccaggacgactcgtccaggacatggctgctgccgttgccgtctccttgcagcggctggccggagacggcggccgccgacgatgtgaggatcacgcgcttaaccgtgccggctttcacgcacgacctcagaacgttcagagtgccttggacgccggcttccaacagttctttctgccattaccaaataatactctagatcgttatttcagctggttattatggagaggatttactagacaaaccaagtaaattaatcgtgacgatacaagtaaaagtactctcccgtttcaaaataaaacaacatagtattggattggacacgtacataataaagttgtttattattattattattattattattattattattattattattattattattattattattattatttcagagacaagatttttatgggaggaaatattattccttccgtcctataataaattcagttttagacttttctatttatcccaaaataaatttatttttaaagtaatcattacatcatgtgaaagtatgataagcctctcccatttatcccaaaataaatttatttttaactaatcattacattagagttcttgaaaatatgatagtatatatgtattgagaataaataaaaatagaaataattatattgggatttaataaagtgagtatattataggcttgtaggtaaatattggtttgtgtgagataggtaaaaaacaaacttattttggaggaaggaatagtaattaatgtgacataattgatatctaatcaacagtggcctggcagcgatcagagacttgacaagtggcaattactacctaggacaagtggacaacatcgagtggcacttggccccacaatggcactgagtttggtgggagatgtgctacgtgtctgcatgcatttacctcaggattctgagacttgaggttcatcggagcggcgacgaggaaggcgtaatcgcagccggcaactgcctcgtcgaaactgccttcctcttccaagtcggcgcggaagatcttcaaggggcctagtgcttgcaactccttgaaatgagagttcttctccatatcatctggaactcaaaatcacaatgcgctgcagtttcagaggccaaaccaatggtgttcttgtgaattcccgaaatagttttcttcggtcatatcaacttgaaacaaatcaaacatcagcatttatcttctaccaaacagaacaccgcaaaatcttctatgcacacagcatgctgttactgcccggatctatcgtcaccgcatacacacaaaatcaatgaactgaagacgatctacagaccattgttggggtgagaagtaagaagaatctcaccggggtttctgactgtcgtcttgacagcgtatcccttctgcagcagcatcttgatgagcgccgaagcgatatacccgctgccgccggtcacgcacgccgtcttcctctcaaccgccgacatcgccgcggttagttggctacttcgcctctcctagtagacgaagaaagagtgagaattgcttcacgcaccaaataggagcagctaggaccccaagcactgagcagagcgtactgaggttgcttttggtcggggtcattgttggtgttgtcatgtctcgtggtcatagatcatcatattgggaggtacaactactttgagaaaagagtactccctccataaaaaaaaagacaaacaaaccctgatttccgtgcctaacatttgaccgtccatcttatttgaaaaaattataaaaaaaagtaaaaagacaacttacgcataaaatattaatcatattttatcatctaacaacaataaaaatacgaattataaaaaaatttcatataagacggacagtcaaagttgaacacggaaatccagggtttgccttttttttggatagagggagtatgtgtattagaatatatcacatcatatactaagtgcatttatattatgcattaagtgtatttatattgggaccaaaggagtaggaatatatacatagcatgctcaatgcttacaccctctgtcctataaaaaaacaatttagcactggatgtgacatatctataactataatctggagatacctttgttcatgtttagattcgtatacatccattactagatttatttttttcggaacggagggagaacgtgtcttgtgtgggtctttgattagtagcaaacgtaggtaccctgatttatcctagactgagatcctttgatttaaatcaagtgattttaggatcactaacatgtggatacatactctattcgttccaaaatataaatatttttaaacttcgacacagttttcgagatgctattttgatcaataatatatatatatataatgttttaaataaaaaagagttgcatattatgatagtttgtttaatgataaatttagtaacatcaattttacatgattgatcttttttctactaatagttaaagttaaaaaaaataacttgacactattctaaaaatgtttatattttggaagtaagaaggatctatatgttggtgactcaaagtactccagtagaaaaaggaggtcgagagtattcgttcaacgtgtctttttttttaaaaaaaaaatccgggaacagcaattaagccatctaaccaacatcgttgctcctctccccacccaccctatagacttaggggctgcttgaataggaggcacttatatttctgtgaaatcagtctctcccattcaaatagggcattatgttctaacgagccatttggttctgatcaaggttttgaatatcagttttaaagagcacctaaaaatcagtttaaaaaattattgtatgaagtagtatatatgcatctcatacaattaatttttgaacttgaaactgttctcgctgttgctgctaccggtggtaatgtacgctaagatttgcatcttttcgttgtgatcactgttagatagatctctctccccttgagcccaacggctcaagggggccttgaccgcgccctgatcgggggcgcccagcccaatggctggtgggcccccgtcacactgcgccatataaaagaggggtggaggccggcacggcacatggtacgagattcaccgccgccgccaactccaccccacaaaaccctaatccgatcgagagggggcgcagccagtgacgggaaacgccaccgccgcgccacgcctcatcgccgggacgtctacgaccaccactgccgcagccgtcatcaccgtcgacctcaccggcgccgcatccacgtcaagccgcgacgacaacgacgatgtccggcgcctcttcctccacgaactcctcaaccggtcggtatctaaaccctctccctttcatctacaatgtcgttcatcaaacccaaatagaaccacccgactagatctaacctaggtgatcctagagcaaagtctaacaatggtatcagagcaaccctagtgtttagatcgtttcggggaaagaaatccaaagaaagaaaagcacaagatccgcacggatcaaaagaaccaaaaaccctaaccctaattcttacctcgtcgccggccgtcgttgacgccggcaacggagggggggaggggcaaagaggcgccgcctaggagccactcgacggccgcgcgcgcacctgcacgcgcgtgccggcgagggggcccgcggcggcgccgccatctccgtcgtcgccatctctctctcacacggtgggggttagagacggtggggggagcggagaagagaaaagaaaggagcgccggccatggcgcggcggcgcgaaggtcgccggcgatggcgacgccgtccacgcggtcgcgtgagagagagaagagaagagaagctagggttttcggcggccggccgggagaggggggtttttgatcctccgatctcggcgcccggccgtccgatcgaaaccctagctgatcggacggccggcggcggccggaccgaaatcggcccaagtggggagcgcgcggcggcggctttcccggcccaggcccaggttgcggcctgggggaggggagggggcgcttgcccgcgcgcaaagtggccataggccgaccggcaaaggccggaaaagttcaatttaggtccctcggggccgaaaatgaataaaagagaacagtagcaatttttccattttattttgtcgatttttcatgcaaatttcaatagaattttgaatagatttttgcatgttttacctctgtttaaatttgaaccaacgggagaattttcacagagagagaatta

SEQ ID NO: 5236 - DNA, 11251 bp, Oryza sativa
attagaagatcaggacctattgcctcatcagagtcagtctcaacgactacatatgccattaggaataccaaatgatgacaattaattgcaacaactgctgccaactaagctatgattattttgacgaaaggaaaagctatgtcaactttgtgtcgatggttgaaacacttcaagctacagttgatgaaatagttcatcgtaccttgttcgatcaatctggagttttgacggatatattgcaaaattcgatcaaaaggatagttgatgagttaattgtccaaagacgccagctcgggtggcagattgaagaacaacaacaatatcggctcggggggaaaacatatcagtatcagcatgatgaggcatatcaacaatatcggccagaaggaattcaaagacatcagtgtggaggacatttggccaatagaattgcaaagataatagaggagtagtttggattcaagcctaaagaacatacttcagtgtatcagctaccatatcctgagtggtttgatagggttccatttccacaccgatacaaggttctagacttgtccaagttttcaaggcaagacgatatatctacaatggaacatgtcagccgattcttagcacaatgtgaggaggcatcggctgaagaaactctgaaagttagatttttccgattatccttgactagatcggccttcacatggttttcttctttaccatcaaattctatcaaaggttgggccgatctagaaaagcaatttcatacatacttcttcgctcgcatcgatgagatgaaactttcagatttgatatcagttcagcagcaggaaggagaatcggttatggaatatattcacagatttcgtaatgtccgcaaccgatgttatagtttaagtctaagcgatgagcagctagcagatcttgcgttccaagggctatcaacacctatcagagaaagattcttttgccatgagtttgacagcttagcttatctaatgcagacagtatcggctcatgaaagccgattggaagaagcaaaggaagatcaattttggaggtaccaagatcggacagaagataattttgaagcatgagacctcatactcaaaaattggggggcatgtgttaacgccaaaatttggtaagcccgaagtcaccatcggcctagagtcagtgtcggcttcagagtcctgggatcggccgatgagagttatcaaatcgcccgttgtcggattcttactatattcggttaaggaaattaatctactaaaggaagcttatccagaagtgatcgaattcaaggaggatgcggcatggcgagttatctattaattaggaatagtttgttagtttccttttatccttaggaaagtgtgtttagtgtcctataaggactttatgtttttatttttttaggaaagtttctttcttgtcctacaaggactagtatcttaccatgggtataaatatgtacacccggggtcattgtacaaatatctctcgatcaatacaactactctcggcccatcgccaccctcttttttgaggttttttcttattcaaccggcggaatttggcacctgacgcggggctatatcggttcagttcgatctccggcgaaggggtaagtcctacgttccgccggccctggcgaatctatcggctgcgttggtgttgttcaaggctgcatcgctttgatctcctggatcgctctggtttggttgatatatttgcctacctgatatctcaattctatctctaattgcattgtgtttagagacgcatcagtttagttgggactgtctcagttaggtccgatcttctgtcttagccgatatatctctacaatcacaatgttgttctaaatagatttgttttatccatcacattagacagatctatcggctcatcgagtattagattatcgtatataatctcgtgctgtatcggttaggttcgacctactatattgttgttgataatataaatcttgttgaactgataggttcatgctttatcggggtgctagccgataagttatctggatgttgcatcggcttataaggattacatataagttgggtttagccaatcgcaacaaatgttacactgtttaatctaatcttgtggattttacgacatcggacctgcagccgatgtatgctttaaccgtcggatcagtgcttattctatcatgtcaatgtcagccgattggtttatactggattaaattgttgctttcttgcattatcatcagccgattgcctttatgtcaatatctacattggacatatagccgattgctcaaaatcctatcgctatcggctggtatcggcatcggttggaattaatacatcggcttgtcagccgatcggcacattgatctgctatttgtatatcttatcagttgtagggtcaaactgactggtatgcccacatctcaccaacatttggtcctgcactggagctatgcagatctccctggccagtgtgtgttttttcgcgtcaacacattttttatcaaatgcttactgctgcaataggtcattggcccccatacagcaagctgaatatgccctcactctaacatcgattgtcacattgctttgattagatatacaaattaaattgtaccaaagtacccctaataacaaaagggttggctaaatcggtcctatattacaccatacattacattagaagagaagatatgaaattacctctccatcatatattataaccatagtcaaatagcaaggagatgggggtcgacaagacagagcagtgggcagctacaaacagcaatgggtggagatctctgcagccagtcggcctccctttgcaccccagctgcgggccgcccttcactagagagccaagtcgcacataggcctccctctgtccaaccccaccccttccttcctctgttcctgcgatcggacgagctccgaatgcgctcacgcccgcaccagccaacttccctctgagctcgtgcgcactgagctccatccatgcccgcaccggctgagctccctccgccctgtgcccacacctggcagagctccgtccgccttcgcgaccgtgcacctagcatagctccatgccggcgaccgcacactgcatcttgctccgcgccgcgacctccctcccggccacacgctgagccaccaacacttcgctcaccttctgctcgcctactgcccaaagcctagcttcgtcaagtctaatatgggatgacggaagcagtggcgaatctatgatgaaaatgtaggtggggttttatttatcatcgtaatataaaataatcatatatctttgatctatatcaacaatatttgaaaatcctacacggatagaaaaaaatacagtggattaaagaatgaagggaactgaagagtgaaaaagattaaaagatatatatagggatgggctacacactgacagctactaaaacacgaaagtaaaagtaatccacatcgtttctttcaccctgaacatctccagccaaatatagtcatcatcggttggctgtttgctgtaattaattttgttggcactatgaactcactagtcactacacatagacatagatatctgggatcaatccctgtcagccagagctggggctggagcctcaaccagccccaacagtggattcgccacaaccagccccaacattggattcgccactggacggaagggggaggaattagaatccacccactcctatgttatttcctaggagcatttcagtctttcatcctgaaaatgacatacacccctaaagcttggtttggaaagggtcagtcggcaggtttggtattttaaaccggggttaaataaccaaagtttaaaagcagggctaaactcatagttaggttttaaaataggtacaatggtgccattgcccctactaattatgaaattaaggattacgtgaccaaggaaatctaaaattaccatgacttaactttgtctttaaataatattgttcatatgtccttaaatgttttccatctatctatctataagtttactaatttgactctgaataagctcctaagttaatcataaatatcttacgatcaattagtttgatcgaatgatcatggccttagatagtcaaattcgtataaaataaaaatatataccttcaaagataacaccaattgaaaacctatgcatacggtttaatttgaattgaaaacctgtccagaccgaaaaatcatgtataactttgtcaaggttggccaaactaggtatacgtagtcataagccaattaattgctatagaactagatctttgtctgaatcaatatcaactatatcaactattcctaattaatcttagtgataggtatgaaagattaatctatctgctttttatttagaatgacttgaccgaattcatttgtgttaactaaatataccactgaaaatttcaaactattcagattttttatatatgccgatacaattaagaaaaacaactaatatttttactaaatggttaaatttttaatatattataacattcacaataatagtccatgtaatacttagtctggctactaatataaataatgtatctatacaaatagcccgtgtaaatacatgggtttctgatgcttctactttggtagtacactcacaatattcttgaatagatgttactctaggatatgtgtaggcagaaattgaaatgtttaataaatattgtacaggaaaatattaaggtttgagacatagatatgtaaaatagatatttatatatttataaatatagctactcacttctagaaatcggcaataagaaaaaggggtggcatacgaaatctaaaagtggataagtaaatggaataatgatttagacatgcttaaaccttgtcgacaagaagtaatactctactcctgattggggattgtatccgtcgagtgtgtattgatttgacaatcgagtacgttgtgaatatgctctttgagggctccctgtccaccttatataggatcgagggcatggttacaaagaggaaagcttagccgaacatgagattggtttccatgccgtgggaaagaagggaacataattctcatgtcttaaagaaattacgtaatacatggatccagctcacctcctatctctctttttagtagtcttttttaatgttgatttgagaaaaaataatgatggaaaagatgcatgtcactactacagaaaatctcataggttgggaatgggctataggtgccagtttcccaaccggcacagattggtcggtacctattctcgaaattattggtgcgggttgtagagccggcacctatgaggcatatggaaaaaaaaaagagaaagaaacgccaccagtctccgccaccctgccgcccgccatgcgtctcgccttccgccaccgccgctgtaggccatgtgtgcggccacttcactaccttctcaaccaccaccatcccatccaatatcacatcatccccatccaaaaatcaacagcaaactactaaacaagatggacatggaggaggagaaagcaatggagaactcaagaagtcaccacctcaccgaacgccacatcgctcgtgccagcctccaccgccgccgttgccaccgccgtcgcgggatccggcggttgccgccggccaccgcctcgctgccttgccacctctccacgcgtgcgccggccgccaccacccgggcctgcctccgcgtcctccgtcggccgccgcaaccacctcgccacgcctgcgccggcctccgcgtcagccgccacccgggcctgctgccgctcctccatcgaccgccaccactcctccgtcagctgccgcgccgttcgataggtaaggggagaggaggggcgaaggaggagaaataagaggcggaagatgtggataagagaaacgataaggtcgttgtggataagaaggagctgcgaggttgcattatatgctccggtttttttaataggtgccggtttttcaacagagccgacacctatgcttatattatatgtgccagttttctttagaaccgacacctataatataagagtaggtgtcggttctattaaaaaaccactacctacagtattggtgctggtttttctctagaatcaacacctatattaattaaaggtgtcggttctatatttttttcatcgtgtggaggtgggaaaaggctcataggtgccggttttaaatgaaccggcacgtataaggccggttcctattagggtttttgtagcagtgtgtattgattagtgcttgtaatacttctactcgatccctctatgacggaaaaagtctagtacagaagatggatgtaagttcagattcatctatggaattgaatactctctccattttaaaacgtttgacaccgttgacttttagtacgtgtttgaccattcgtcttattcaaaaatttaagtaattatttattcttttcatatcatttgattcattgttaaatatacttcatgtacacatatagttttacatatttcacaaatttttttaataagatgaacggtcaaacatgtgctaaaaagtcaacggtgtcaaatattttgaaacggagggagtatttttttacgtagggaagtacatggagtctccttactgaacatatggaactcaattcctgattgaacggtactggcatgaacggtagaacgggacagtagggataaggatcaggaagttcggcagagatgtttccacgagtttagtacggtagtattgttgatccacatcactaggcaccggaatttctgcccggtcattctcctccacacaagagcatacaatttctccggaaaggacccggaccagtagagattgagttggcgtgtagctcttgcctctcaaactctcccaatcgttgtacttagctcaggtacaggcactgtatttgtgtctctcatactctcacaatcatcgtattaattagcacaggtacaggcatactgtacgttcttgttctggaagacacgtgctttaggtttatcatgcacttgccagctggttcggtagagcagtagccaacggcaacttccttcttatcacgagcacgtctcctgtatgtttttcgaaaataacaattatgaagaagttcttttcaaataccaaatgaactattttttaaaaattttactagttaatacttagttagtttgcctcgtttcatatatcaccgacttatcaaatcctactgctctatcgaactaagggcatcagcaatgtatcgtttaccaactaccactactacaaaactgcatacagaggtcggcgctaaagttgctagaagtgttaaaacctgcacttataggtcttctcccactttcgcggccttagaaaacagaaaacaacacctttaaatgattataggtgccggttttgtttaaaaaccgacactatactacatgtgctatgttttattaagaaaaccggcacccccataaaatcgaggcgagccgaactccacacattgcgcgtaccctctcctccttatctccgagccggccttatcctcaacctctctcaccctctctcttcctcctcctcctcctcaacctcgctctctctctccccctcccccctctctctctctgtctcgcgggagaggacacaagagccagtaggcgatggcccagcaatggtggtggccccctcccctccgctagatccggtgagaggggaggcaccggcagcccgacgggaagggaggcgatggttgccaagaagggaggaagagaggcgcattcaccgagcggtctccccgtacgcctccgactcgttctgtcggtgctctgtctccctctctcagctctctctctctctctctctccctctccctctctctctcggtccctttcaactgtctcccgctttcagcctctctccagcagcccggcggtgttgctgtctcttccgctagatccggcgggaggtgaggtggtggcgacggttcggcggtggcctggcattggcgccctcccctcctggcggcggggctctgcgggacaacgtcggcagcatccgcagcgacggagcatcggcggcggggcctcccactgcggatccgacgttatcagtagttaatttaatcatttgtgttcatcttgtgcatggtgtcaatccgtgttcatttgttcatatattaatctgtgttcatttgttcaccttgtccatggtgtcgaagtatcgactcgagccgggttccttttttgtagctcgtggattccactttggtgccggtttttaaatgggattggtgccggtgcactcatcactgccgcctctatggtgccggtcggcacctatgtgggtttaccaaccagcacctttgatgttttgtgttgtagtttactatctcagtttcatattataactcattttgacttttttagtataatttcttttaaacttgataagctttagaaaaatgtaacaatattttaagcacaaaacaaatatattatcaaaatatatttaatatttctttcaattaaactaatttggtattgtagatgttgctaaatttttctataaacttagtccaaattaaaaaaaattaaaaagaagtcaaggcgacttataatatgaaaataaggtgggttctaacaaaaaataggaaattgtttttcaaaatctcacaatgtgtaggggaaaatatggtcacaccgaaaagtgtgttacaatctaacagtgtgtaataacatattaagaaagaatcaacacacatagctaagagaattcattctttgttatttcttgccagtaggttgtagtgctatttcatgatattcgttcataatgtttattatttggtataaaaaatgtatttaacacttattgcaccctcgttataaaagtgtttattttttacatattccacgtactagaacaaaaccaaaaacaaccataatactcttactttttcaaatcccaatgcaattattccttgctaaggaagtaaatgtttttttgttccttgttaggaggttgtagtgctattgcctgataaatgttgcttagtacctccacaatgtttgtcgcttactacaccctcgtctgaatgcaatatactatctcctaaacagtgcttgtcaatggcaaaatttggcaatttccattagtcaaggccaaatcaaaggtagagttctaagctgaggaagtcatgttagaattggactcagttagtttctttttgctacatattagctgattagagtttgagttggagttgtataagtagtttcttgtttaggatagagtgctaagtcgatccgatcttagtataaccagacttagttttgcctatgggtataatatgtacacacatagggtttttgtaagataacaacagttcaaaacatatttttcggtgcatcgccaaccctattattagttttgacgagttcttgtttttaacatggtagagagctcttacataagggacttatttggcgaatagttgatggaaattcagttgatgtaatcaaggataactgggacaagaggaacagccttctcaaaccacttggttttatcaatgctttactattcatcattctatagttaaaattttacagttttctttaaaaaaataaactgcactaaagcttttattgagatggatggtcaactattatttcaaaactcaacaacttttcgcacatggaaggagtactacataattatgttgcaaataaaggggatacacagctacatatgcatagattaatcttaaaaacactcaataaaatcataatatatatatatatatatatatatagactgcgtgtccttgttcaaaacactaaggcctcctttaatggttgagctagtgcactagcaaaaagtctacctttttaatagattgtctcatagcacattgttcaaaatgctttgggttccacaatccctctcacatttttttaggagcttagctcttgaagaagagatagtgcattctctctccttatcttctctctcttccacatcatacaaaaactgatgtggagatttatgagctagctgactcacccttgttggaggaggcctaagtactaccaacctggagggagtaccgtgtttttttttaaaaaaaaactgcactaaaccatttagtaaaacaaatggccaactattattgcaaagctcaacaactttgtacatatggaggagtacataactttcaaaacggagggagtgggtacgcaatttctccctctaggtagataatacttaccattttggataaaactgatatcaaactttaaaatctttaactaagaataatttctaaaatatttcacttataagtattgagaccatatgtatagatttgtcttaaaaagcacttcaataaattcatatattcgttgatattactatatatatcataatataaaatagttgtcatagttattttttgaacatcatgcgtatccttatccaaaaggataagtactccaatctagaaggagtactgtgttctggttcatctatatattagaggcatggtgctatgcattcgcattcataaatatcaagccaatcggcaatcgctgagatttactagtacttactgtacctgcataaatacataaacacataccatattatggcctcgagtgatactcctacccatgaggaggcactcagttttgagccctcgatatggggcgacttctttatcaactacgaaccacaaccattgcaggcatcaccactactcattcctatgtgtacatctgcccttctaattttaattaatgccatgctaactagctaatagctagctaattcgatggatctatgctataatttcatgcagagatcagagaggtggatgcaggagagggctgagaagctgagagggcaaatccagacactatttgggacctgccacgacatgtcggcgaggatgaacttagtggattccgtccaacatctcggaattgatcacctcttccaagaggagatagaagatgctctaacaagcatccatggcagtgaattcagaagctctagtctctatgagattgctcttcggtttcgcttgcttagggaacatgggttttgggtgtctccaggtatccaaatgcatccatccacctaatatatagataaatagtttattattccgagattaggaatttttgtcttcgagatttgctgaagcttacttttgttcgtttgcgacattatagaaattttttagtctaaaaccatacgacacatgcaa

SEQ ID NO: 5237 - DNA, 42707 bp, Oryza sativa
  unsure (1)..(42707): unsure at all n locations
tggttatgttggttgtcaccatcacattgccgccataatcaccctcattgttgccatcgcatccaccggctgttgctgcttccgcaaatgccgtcgccgtccgtatctgcagctcgagtgggaatggagaagaattgtccaccccccctccccgcgcgtcgcgatcaccgccaccgtcaccaccgcagatgctgacgccaacatacattgccacgctccaggagtcgattcgacgcacccacgcggtgccttgcccttcgaacatcgatgctctttggtcattgagacgcggttggtagcagcctaggtgataggcgcacaagcaagcagccctagcatatggcccactaagggctagacaaaaaactcgtggctcattaacttactcatctcgtgactggctcacttcgctcgggtcggctcattgggaattactaacaagtcaagccaagtattttgctcgttaggcataacgagctaactcgacttagcttgcaacctaaatgagctggaacccaacagcaggcaaccatgaaagcatggcctagtaacagcccaatcagccacaaggcccatcacaacccaagtaacagtgtcaaaaccctatgcaggcaaaacaacagacacaaataaaaaatgcggccggtgctggaaagtacaatcgcaaagagcatcaactgccacatacccttctgaattactatagcatcgatttgtaaaaatacaagtctcgtgatcatcacttttcctatctgaatgatgcgaaaattaactattttaaaattctaaaaatcatcccaactcggtttgatattgcaacctattttgtttggcatatagcaaaacttgctgcgacggtaattaaacatcttttagtaattctatctatggtatctcactgctgaagaatccttttgtactccctgttcataactgccaatagtcccggttttccaaccgggattaggaatccgggactaaagatgcccatctttagtcctggttaaaataacctggactaaagatgccaaccatgtttagtcccggttgatgttaccaaccatgaggactaattttttttcttttttttctccttcggttttttcttttatttttcctcctttcatatcttttagtaattctacctatggtatctcactactgaagaatccttctgtactccctgttcataactgccgatagtcccggttttccaaccggggctaggaatccgggactaaagatgctcatctttagtcctggttaaaataaccgggactaaagatgccaaccatgcttagtcccggttgatgttaccaaccgtgaggactaatttattttctttttttttctccttcggttttttcttttatttttcctcctttcatatcttctcattcacagcacgattcacagattcatcacaaatacatcacaaattcattcacaaacatcacagattcattcacaatatcgattcacatattcattcaaaacatccacaaatcaccacatccacaaatcataaacaaaataaaaaaactaaaaaaaaaatcaaatcaccgtccgaccaccgcccggcctcccatcctgccaccggccggccacccatcctactacttcccctccggccagatctggaggaggggagggcgaggctgccggtgaccagcctctatcccgccgggccaccgccggccggcctccatcccgctggcctgcgcccggccacccccagcccgcgcccggcctccatcccgccgccggctgcctctgcttccgccgccgcctgccggagggtagtagggggagggggaggggagggaaggggaggaggagaggaggngagagaagagcaagggtaggatggaaggagaaggatggagatgagggaggagaagaaaaagagataaagatgggagatggaggctgcgcatgcacaggatggagagagtgaagcaccggagatggtgcactcgtgcgggtggacatttttcttcctggttggtgttaccaaccgggtataaagatcaacttgatcttcaatccctgttggtgttaccaaccggaactaaagtttccatctttagttacggttggtaacatcaaccggactaaagatcccctggggcctgacaaactctaacacaatcccaactgggactaaaaatcatctttagtcctaattgttattaccaaccgatactaaagatcgcatagtcctggttggtattaccaaccgggactaaagatcacatagtcccgttgcacttataaactggaactatttagtcccggtttataagggaaccgggactattgtgaaatttggtcgaccgaccaaatatcatttctctagtagtgtctccaaaagaagtgtcatgactatacttctataagtatttaattttggtaaaaactatattcataactcacattttatgagaacatattgattcggctaagcatgtttgaactggggtggttttacaccacaactaagtagtagggtggacatttgtaagaaaaagacttatgaggtagaatgtcagaacttaagttatttttagagtggtttttataactttaagtcacttgtttcattcctactatgttttttttccctgagggtttagtcgttatcatagtgatgtctctctgccgcttcaagaataaaaaacgaaattataatttattttccatttctttaaattaatcattttcaccatttaatagattgattgtgggcctcctccgaagaggataaattataaaaacaaacgatattttaggtccattgtacatgagaacagtgtaatgcacattttcgtggcggaatattatatacgagtacctattattacaggaaatcgtcggtatcttcttaaacaatgtacatatatagactgataaattaaatcatacaaaattttacttatattaattcacggctttcatatcaatatcagaaagttattagtaaagctacaaatattcatacttattttgcaattagaaatctttgttttaatcgggtaaaaaatttgaaatcccatgttaaacaggaatacaaacatgttataaaccacgcctatgccattttttatagacatgaaaatttgattgttggatccacagaaaaaattatagcatcgattcctagttttgtagcactactacgaaaacattttttttctagatgataccccgcacgttgctgcgggacatgctcaaaattcagctattggttaagtaaaaaaaaagaatatgctatccattgggtaggacatgcatcctcaagctggaaaatttaaaagataataataaatagattttttgaatcaatatttttttagtagaggaacagaagttcttaaaaacaatatatgttaacacattttagctaaaacttcaaaagatgcgatattgtttgggatcatgagttaacatacaatgttgtgtgtttactcataaaacgttgtcacaatgtagtttacattatagagggatagtttacattgtacagtgacaatttatattgttctgtgaacgctagccaactaaaactcatttcaccgtcttcctgttaaatggtctacatattataattttggtgaggctttcaaatttattgtgtggatctacatataaccatgaatccaataaatattatttattaatccataagagaaaaaaatcaggaaatacaggaatttcagtaatacactctaatggtgatgacaccacaacacttaatcaacatttaaattttttattgttgggatctagggaacacataaaaaaggttgtggtaatctgcttgctttgttgcactgctccaactctagtatttgtttaaccgttcaagaaaaaaaaaactctgtttaatgaagagctgaaaggttgaaacagaggatcgcataacgataagagacggtggtacgaacaaactgaaaagcacagtgcctgcaatttcagaataacatcagaaattgacaacaatatatagaatgtgcaagcaatttaacatgtaaaaaagataaaattgaagcaagaaataggtgaatgcaaagcaaatatgtggccaactaaacatctaatagaaacttccaagtgatcaatctaacgaaaacatgcttcacaaaagataaaactgattggccaagcatgatcacaagtagcgatccatgcgcaatgggagatcgaggaccgatgaacgaacccgtgcggccgtgccaccgattgagcaaagaatagcgtgtgaatatatcccactggttccttacattggcgtgtgggtgtggatgactcatctggtcgcactttttataggttatgggtgttgccgtcgagtcgaatcctattgcagttacgaaagtccaatcaatctctaatggctaacggttccaagaagaggaagcgcaagggaggagatgggggtggcagaaaggcggtagccgaatggcgcggttggcggcgacgctcgcacgcaggcggaaggatgctttgttgccgagaatagggaacggcataagggtggtgggctgggccgatgagcaagatgggctaggagagaaggggaaagggaaatgggcttggagaaatacactggatggagcgatctaggccatccaagcttcatcctatggctaaatctaattagggatggaaaataggtattaattgcagtttttggatcaattgtacagatatataggatgtacgggcaaaaacagtttttatgtgcggaggtggcgcccgtctgcccggaagtgtcttcaaaaatcagggattctctgtgcgggtggcgcacccaaatgcggaaattggatttttgcgtgcgggtgcttatgtcgaccgtacgcgaaaataaaaatccgaaaaaaaattaaaatcacgaaaaaaaatagaaatcgcatattgccgttttccgatcgttactgcgctgctttaaataataaccgtcacctccaagaaacttcacaccgtcacttccgttttcaccgcctagaccatagctgtcttccacctctccggcgatcccctcggcgaagaaagcaatctcaaaagcaactcccgttccagcaaacttctgcctgcaacgatgtcgtcccccgctagttcatccgcagctccatcgcctgagtacgcagaggtaagcccttaccggccaaatcccttttcttgtgcagcagatcggttttcctcctctcagtttgttttcttctttgcatctgtagcacctttcaaatttggttgcgattccctgcttagcccacgaacatcagtttttcctcggtccgattagtgatctagatccaacagagctcatcatcgccgaaaccagtaggatctcatacagaataggcaaccccaacctaaaccattggaaaaacattttcaaatcttggccctcattggagaaaagctggcccgcatggtataagcatgtatcggctagcaagcaggttcactggaatgaactaggaatcagccaagcactagcccttaccctggaaaattcagctaaggacgaaactttgatggcttctgccacgtacttctggtccaacaccctcaacgccttcatgttcaaccaagggccgatgtcacgccttgaaaattgcataatttaataattcattctttaatgcatttttagaaattattttaaaaacctacaagttaaactctaattatctaggaaaaattgcaacataaaattgagttagataaaatttctttaaatactttgcatgtttatctattttctagatttttctgggaattatttgagcaagtaaagtatttttaataaatgaaacattatttcactaattattttaattgaaaaagtttttaaatcttcccctaagccgttgggctgattccacctcatctccctcctttaggtgcgcagctgtgcagcccaagtcagcccagccgagcttccccttctctttctttctttgttttattttcagccagccaaaactgaaagtctactttgcctccctttgcactgttcttcttcaacctctggcagccgatatgagaccgagttggttcggtttttctcctccaaatccggccttttctcttgtgttttcctaaaattagttgaggggaaatatttcccttatctccctctttcgtttccctcaaaaaccgaagtttaattccttgtattttacccgaatcaaattcgttttcgagtttatttctccaaactaaccatcggattttccggctcaaatcctctcgtatggagtccgatctccctcacccatgcctatataaagcatcccctagtcgtcctcttccgtttgcctcaagtcttagccgcagccgttgcctgtagcgccgccgccacgtgagccctagcgtcgctgccgccgtcgctgcttcagccgcgccgcagctgtggtcgccgctgccgccttccgtcgccaccgtcgggttcgccaggtggaggagcatcccgtccgccccttcgccgctgctgcatctcgcgtgagcgccgccgccgacatcaagccgagccgtgccgctgtcggagctcgtcgccggtcgtcgttcgtcgtatttctttgcaccggtgagttcgcgtcgttgtcctcttcgtgtaggtgccttcggtttagccgcccgagctctctatcgtcggcggagtcgtggtccagtgccatggctgcgatgatgtcatcgatgacatcataattcccttctaaatctctaaaagcttttctgtattagatgaaatctgattaaaacttcggaaattcataactaaatcatcgtaactcggattcaggtggttcaaattgctaatttcacctaaaatcgagatctacatgataaaaatatccacatgtactgtttatgcttgtttttttactgttttattgattttattcatttgctttagtttccgacgttccggaggagagcgtttacgttgaggaatgttcagaagcgtttgaagaagatcaaggcaagtcacacagatcccaaacaaccctttgagcatgttgaacatgtttaaagctaatgctttatttcaacttatgcattatttttcgaatgtcatcgggtagtgagactttcccagttaattatggccgaagatgactttattttcctatgggtaataaattgattagcttgaaccttatatattggtttggttcagctaaatgctatatatatataattgcttagccatgcttagaaacattagctcattaatgggatgattacactacattattacacatggatatatttaatggtagctcacgatggttaatcgtgttatgaaaattaattgataattaaaatttaatgaatgatgggttgtgagtacatggttttgatggtcatgctcagtcgtgagctactgttgtgcaacattaaccgtaccaacctcaagccagcgtgggcaacggctttaccttttgtgtagcatggttcattacggggtgccagactgagaagcggcaagaaatccatgggggtcgctggggagtccatgcctttggttgtagagggggttattatgattcaggtatggtgcactatggtgagttgtattgtacgaggggtactgtcacagttcctttccgaggtaccgtggtggtattgaggtgcatggtgacatgttgtggagctgtgtcttgtgggtacagtggtacatctctggctagagtaaaactattcaaatagccgtgcccgtggttatgggcaggtctaacaatgtttttcatgattagtctcacactacttatcattggtgataataatgtgataattaatttgactcctggtttggaatggtatattcctggtatggaggtttgatttgtacagccggggttggttgatttgtactcctggctttgttgtatagtgtttatttaatattgcttaattactcaactgttttactattctctcaaatgtttattaaatgttgtttatgcaaataagctatattgtgccatcctttgttatcttgtgcacttgcatatttgctgtgtggcttgttgagtatgtcatatgatcattcttgcaatattcattcatcagagaaggagtacttcagtgaaggtgatgatcaggaggattaggctttgttcgggtcaagttgcttgtggagtggagtcgccatagctgtttagtcttttgtttattttccgctgcgtagaattttattcttttgagaggaactatccacctctgtaataatttattattttgcgaatattaattagctgtttgatagtactctattatcaatttgttattgtgtgcctcggctgattcctggacgaggatttaacacacatgtaagcttttggaatttttgatagaaattctgggcgtgacaaattggtatcagagccaccttgaccttaggacaagtcaaatggtaaatcttaagtagccttcaaaatattttgaaaaataggactgctcttctctattatcttctaaattaattaagttggcagcacatgcaagttaggtacaaaattttctaaatcctactttaccaaaacagaacctgttcttttctaaaaaaagactttactgttcagggtattaaatagtttaattttatgatttcattggttagtcggcactgtagtatcgattcaatcaagatagcactagtactactcatccctgttaatggtgacactgtaccgtgcttatgatagatcctaagtatttagttttattttattaatttatctaaagcaatttatctctgtccattgttgatttttttcttccaaaacaaaaaattttgtttcgttatgttctggcgagtactgtacaaaaaaaatatatttgcttctttttgtctacttccaaagtctatactcctgtttaaataaaattctcgggaaaaaaagttctgaaaaagaaaaaaagaaaaaaacgaattgatttctgagaatttatgtttcggtcagaaaataaaaattcgaaatttaattaaaaaaacgaaaaaaaaattagttttgtttgctccttttcttttatttttctttttggttcaaattaattgagtctagattgtgcagctaacttaagtatatgcattaattcttcctttctatgttcctttagatgccgccccatccaccggaaagcttgatcgatgcggtaggattcgtcagggagctgagaatgatggcatttgaagtaggctacgacgttgcccccgagtatcgccaaatttcatgtgaccccaacgaggagaagtgtcgtgttcacgtgacattgactagtgatcgtgaagaccttccgtcaatgatgtttgaagctgggggaagaaagtacagtcatgcttgtcaggaggcagccttggtggccattcgagagctacgtcatcgctttgatgaggaattagtcatcagctttccagtatcatccacacaagcatcatgatcaaaactatggagaatacaactgctctgaagatgaagatagcaccactctgaagcatgccgtgtatatgctttgcgccatggatgcagttggcgtggagcgggagaaagcagctcatgagagggaaatctggaaccgtggcaagattttcaagctagagagcaaggtgtatcgcttgcagaaggaacttgccaagctcaagagagaagcaccgccgtcaactaccccaaaggaggaagatccagaagaaagagagctagctaccccagaggaagaagatccatctcttcgctccgacgcaaggcgggattagtgcctcgttagaccgttatcgtagttcgttgtgttagtttgcttgtgcgtgtgtgggtttagcgtgttgcttacatcattggtgggatgtaactacatgagcttagttcttttgcttgtcagagagtaaatttgctggtgagatagtgttaattcgatttaaatgtaatcatacacagttaagaacaatagaaattaaattaattaagttatccgttctaagggtatctctctgtcgttctcccctcttgcccgtgttttcttcagatggtgaacactcgcaccggaggaagtggaagtggaagtggtaacaatgaaggaattcctttcccatccaaacttatcttgctagaatccaagatcttgatgttatcttagggatggatgggctaacctgtcacagaggagttatagattgtgctaaccataaggtgactttatccagtagcaatgggcaaacagtgtctttctttgtgtcctcccctagatctcattgtttgacattaaatcaagttgctttgcatgagatcccaatagttcaagactatccagatgtattccttgaggatttgccaggtatgccacctaagagagacatagagttccggatagacttagtacctggaaccaaccctatccataagagaccttacagaatgggagctaatgagttagtagaggtaaagagacaggtggatgatttgcttcagaaaggcccagtacttcatcgtggggagcaccagttatcttcgtggagaagaaagatcatacccagagaatgtgtgtggattatcgagcgttgaatgaggtcactatcaagaataagtatcctctacctaggattgatgacctgtttgatcaactggaaggtgctacagttttctccaagatagatcttcgttccggatatcaccaactccgaatccgtgaggaggatataccaaagactgcctttacaacacggtatggtttgttcgagtgtaccgttatgtcgtttggactcactaacgccccggcctttttcatgaacttgatgaacaaagtgtatatggaatatctcgataagtttgtcgtggtgtttattgatgatatccttatctactccaagacaaaagaagagcatgaagagcatcttcgtcttgctttagagaaactacgtgagcatcagctctatgccaagtttagtaaatgtaaattttggttgcccgaagtgaagttccttggtcatgtcatctcagctggaggagttgtcgtggatccaagcaatgtggagtcactgctaaattggaagcaacccaagacggttaaagagattcgtagtttccttggtcttgcggggtacaccgcaggtttattgagaacttctcaaagattgctagaccaatgacttgactgcttcagaaggatgtgaagcataagtggacggatgagtgtgagcagagttttcaagaattgaataaaaggctagtgactgcgccagtgttagtcttgcatgatccatggaaaggtttccaggtgtattgtgatgcatctagacttggtttgggttgtgttttgatgcaagatgggaaggtggttgcctatgcatctaggaagttacgccctcatgagaataactatccaacacatgatctagagttggcagctatggttcatgcattgaagatttggcgtcattacgtttttggtaaccgtacgaagatgtatacggatcataaacgtttgaagtacattttcactcaacctgatctgaacatgcgtcaacgaagatggttagagttgattaaggattatgatatggaaattcattatcatccaggtaaagcaaatgctatagcggatgctctcagtaggaaaagctactgtaatatgtcagaaggacgacatctaccttgggagttatgccaagaattgtaaaagttgagcttgggaatagtcaagaatggttttgtggccgcttgagaagttcaacctactctttttgatcaagttagagaggcaagtgaatgatcctgatatccaagaaattaaatagaacatgagaagagaaaaagccatcggttatatagaggatgagcaaggaactgtgtggctaggagaaagaatttgcgtgcccgacaataaggagttgaaggatactatcatgaaagaggctcatgaaaccctgtattccattcatcctggaagcactaagatgtatcaagacctgaaggaacaattctggtccgcatgtgacgagagatagcggaatatgtggctctatgtgatgtgtgtcagcgagttaaggcggagcatcagaagctagccggtctgctgcaaccgttgaagataccagagtggaaatgggaggaaatagggatggatttcatcaccggtctacccagaacgtcgacaggacatgattctattttggtagtggttgacaggcttactaaagttgttcatttcatacctgtcaaaacaacctacttaggaaataagctcgcagagttacatatggcaagagttgtatgttcacatggtgttcccaagaaaataatgtcagacagaggtagtcagtttacttcaaagttttggcagaagctacaagaagagatgggtactcgttttaatttcagtgctgcctatcaccctcaaactgatggccagacagaaagagtgaatcaaattttagaagacatgttgagagcttgtgtttagatttcggtggaagttgggataagaatctgccgtacgctgaattctcttataacaacagttatcaagctagtcttcaaatggctccgtatgaagcgttatatggtcggaagtgtcgtacaccgcttcttcgggatcaaaccggtgagcgtcaagtttttgggacagacatgttgcgagaggcggaagaaatagtgaagattatccaagaaaggttgcgtgttgcccagtcgcgtcagaagagttatgcagacaatcgtcgcagggatttgactttcgaagaaggggattatgtatacctacgggttacgccgctgcggggagttcatcgttttcagaccaaagggaaattgtcaccgcaatttgtgggaccttataagattgtgagtcggagaggtgaagtagcttatcaactagagttgccttcgtcaatggcgggaatacatgacgtgttccatgtttcgcagttgaagaaatgtttgcgtgtacctacggaggaagcagatcctgagcgtatagagcttcaagaagatttaacttatgttgagaagccagtccgaatttcagaggtaaatgagagaaataccaggaatcgcgtcatacggttctgtaaagttcagtggagtaatcattcagaagaagaagccacttgggagcgagaagatgaattgaagtcagctcatcctcatctttttgccagttcttctgaatctcgaagatctgcttaacttcagtgcaggtccaaaatcttgcctttaggttcgtgagcgtaccggttgatttgatcatgcaatcaacaagaaatcgtttgtgtagtagtcaggggtttttatattccgattaatattcgtcaccgtattcgtttcgcttcgtattcgctccgtatttgtatttgataatattcaatttcgtttttatatcagagtttccgatttctatttcgatttcgaacaaaatataaaaacgaatatgatagagctagtttctaaccgtattcgatccgttttcatccctaaatgcgtgtaggctgccctcttttttctcagttggatgggatgctgctatcgtcgttattgctgtcagtctctccagcccagggttttctgtttcgaaaaagcaagaaaatttcggtgggcaccgaaattctgaaattttgaaaaattcggatattccgcacgaacttttttgaaatttaaacacatttttactgaatttgattaaattatgaccaaattcacaaatatttggaaaaaaaatccgaaatttcgcttgaaaaaatctgaaatttccatccctgctccagcccaccatgtcctcatcctctatgcctcatatcagccacactggagtcctcatcctctacgcctcctgctccagtcaccggcaaaaagcgtcctcagcgatctctggctgcatgtgccacgctgcctgccaccaccagccgtgagctcctatttctgcctccgtcggcttcacctgcagatgcacactcgctgctgccaatgatattggaatgtaggatgcctccaccactcgccttggctctttctgccaccgccctcgatcgactccggccatcgtcgccacacttagtcagttataacattaatattagcaactaaattctaactttcaacgaccaaaatttcatgtcattattaccggcacttgacaaatagcatctgtgaaatttgaatttaaacctggatccattactgaaataacatgaataacagaaatcgaaagaatatttgatataagtatatatgtagatggattgccatgttggctggaaaattaacaatcaaggtctagatgggaacaggcttgacaaagagagactcaacgatctccctaagaagtgtgccaaatgtgtatgcatccttcttgtcatcgtagaagagtgccatggaaacggtaaagttcacaattcgctgcaccatgggtagcagtgtacgatgctcaagtcgggtctggttcgtggatctccattcgtcttcgactagtgcattaatcttcgcaaaggcagcctcacttgtgaccccattctcattcatgtagcactctacggagctcgcgacatctctcttattctttccacgcttcacgtgtatattacatataaaaatataaaaagaatagaagtttaaatagaaaataactattggaaggcaatatttattttacttgttttgttcgtaatcagatcatgtttttaattattatatgtagtcaaggctcaaaatataactcactaatatatgcaaatatattaagatttattatgtgaaaatgccattataacttgtatgcttattgtaacaaataccttcatattgtaatgttttcataattttcatgaacatatattgattagaaatggcaatgttaaaaatgtgtattaattagaggttattgatttcataacacacaactaaaatagaaatgcaaaagtagtgacatatatgtaccttaaatgcagcaatatcattcatgaaacgcccaatcttagcacatgctatgactgcagcgttgccactagctacccactcgaatgcttctgtcgtcattgtcccaccccagccaaccatagcagccacacacaataattgcacagctgaggatttggtagacaaaaccacctggtctttgaagccaggcttgtatttctggttcgaccattcagcttcttgcagataataagtggactgcttttgaaactataagcaaaaaattaaatcaaaatcaataactacaggataatgccatcagaacatatatgtgcaaaaaatagtcttatctccacactcgaaaagtatgtaatatctatattttggtgtgtgtgcgcgcgcgtgtgtgaggaatatacagagagagagagcgtgtgtgtttctacctcttcttttgtgcaagcaaccatgtatttttcattgtctgtcacttgatcctgaaactccttaaagttgatcagcaatttactataatactttttgaggtactccggcagaatagaaatagcactcttgtcccatctgcactagttttgcacgagagttagtcgtgctagatacattatttctcattttaatgatccctcaattctttctttcttgtcaattaagacatttacatcaactgatccagagcatacatttaatcattatcttttctaatgatatgtccatacctcaaagtatttgaaatataactgcatgaaagtatttttcacgacaatctaatactccttctgatcccaaatataagtcgttttaatattcccaaatatttgccaaaatacaattcgtttcaggaattgtatgaacttcttttatattttcttacctcgacaattctctcacaaataattgacgatttctttccaatgcagaataaatgaaggacaacaaagtcatttgaactatttattagttcttgtatccaagtctaaaacaactatatttagaatcagagggagtaatgtcacgccatagaaatttgatatcttcttcgatatatttattagtaggctaagatgttacaatttgtcttcacttgtcaggatgttatctattttggaatggataaagtaccaataaacaattaaacatactgaactaatcctacctttgtatcgctgtgttaagctagtggcattcctcgatggtggcatgagcatcatatgtatcatccatcacagtaaccagtgcaattaatttggcaacaaacattctcgtgaatgcaaagccttcctcatagaacatcatgtaggaccaagtgtacccctctattgtacgatccctaatgtaacttagccccatgtatccataaagatctttccaccatctggaaaataatcattccaagagtgtgcttagacctttagttatatgaacagataaggagctaatcattgttttacagtgctagcttgtgggtattgggtatcccatggataatttttcaaaatatatacaatgtcagtgtagttttgcacacaacaagagcattcttctgctccaagataataagtgtatttactccgaataaaattgaatgctgaggtgacatatattcttaagaaccagatagtatatgataacatgcattcctacgaacacctcttgccatcaagtacatatgtgaaaggcatggactgttaatttatttgcacttaacaattttagttatttagtgcattccaatattatctcaaatgacctgttaattatccttttagataatggataaaccagttgttgtatctaagatgcacaaaaccatctatcatttatctatagtcaacaattatcaaagagatcgatcgacaggcatactcagaaattgctttgagttctttcaagtgaatatgttgcaggaggttaaaatccagccttgcgagatcaagaagaattgggatatttccttcctctagttggtactccaacatgtagcaaatagtctcaactctcttgaaagtccttggcagtggtaaggtaagtgcacgcctgacttggcaagctaaaggagggttgagaacattgtcttgactcatcaatttaaggtgctcccgtgcgaaagtgattgcttcttcaagctctggctcgccatgaatgaggaggtgagccgcgttgtataaacttagtagcccccttgggtcattcgctatctcatttcgaaacctcccatcatctcccttaaatttgttgaatgcatctgcatgacaaaaatatttctcattgataactagaaggttgggttattttttatccataatgcgactagtttttcccgcaatctacaaaacgctttttgctgtacccaacatcaaattagaaccctctgttaattttcttacgttgtgtaagctgtttgttttagactgacaaaaataaattattgtgtcttaaacaaattaacaaaatgtaagttttagcaactatcagcaaatgcaaagataaaaatatctaatcagggaataataaattgttggtatatataactgtagatacaaatagaaagagctgcaaacatctcctaaaaaaagttttaggttggctactaataactgtatatttgatcttattgaactacagaagaagcaaaaaccagcaagacctgtcccacaaagtttggatcgtctatggtgaatcagaatcaataacgatttttgttcggcacaaatttatctgttccatattcgtagatggatgtatgcagttggatacctggaggcacccaaaacccatgctccctaagcaggcgaaaccgaagagcaacctcatagagactagagcttgtgaattcactctcatggatgctcattagagcatcttctatctgctcttggaagaggtgaacgattccaagatgttgaatggaatccactaagttcatcctcgccgaaatgtcattgcaggtcccaaacaatgtccggatgtcccctttcaacttctcggccctctcctgcatacatgtctctgatctctgcttgaaattaagtatagattcatcagaacagttagttagcatcgcattaatcagaatgcaagggcaatgcatatatgggaaataacagtgtggtaatgcctgtaatggttgtggttcatagttgataaagaagtcgccccacacagagggctcaaagccgagtacctcctcatggacagcactgtctctcgacaccataatatgtaatacttacgagcaaatatgagagattagcttgatctttatgaatgcaaatgtgtggcacctcaccttatatatagacacaccagaatactgtagttatgtgctctgtccgtttttgttgtatgacgtgcttttgaacatgacattcaaccgtttatcttactcaaataaatattgcaaatatgcaagaatataaatcatgttgtttgtcaaagaacaacactgctcttaaggatatttgtaaggaaacaactatagcgtattatattttcaaaaacctgcttattatggaaccatgggataatcctagagtttcctttacaagttgttctacattaatatcaattgattgggaaggttaaatggatactcactttctagccttcatggatctagtgggccgtagctgagctgcttctttttgatgggcaaagctgaaagctactttcctgtggccaactcatccgtagcgatcttgcccgcctatggtggttttcatcatcttcggtggtgcttcaccatctttggtaacctttggcatcctcaatgtccttggtagccttcgccacctttggctgccatcattacctctggtgggatttgccactcttgatggtcttcgtgatctttagtggtttcgaccatcgttagcggtctttcttaccttcggcctctacattcccttcagtagctgccagctgaagtagttcgtgacctcccaaaacaatgctaaaggacactgaatgataaaagaagtaaaagtaataataatatgggtggtcagacatcatgtccaaaggtgaaaaatgttatacatttgtaaattagagttatcactaattactttaaaggatcgtcaaagcacgtgtaggggcggcttatgcgggtgggcagccaattattgcttgcttgtaccattacccatacatgagagttgcaatcatgtcatatatcgagtcaaatgcgacgtctcttgtactccctccatttcaatctaattacgattcgagcaaccaaaagacaaattaggagtgtgattgaaaatgactttagatagctgtcatgacattacatatgggattgtcaggaatgggagcatgggcgaatttaatgttggggcttgttggggctaaagccccagctccaacaggacagggaatagcgtgtgctagagcacaaggcaggagaagcaggttgcagggaggagcactaagaccctgtttagatgagactaaaacttttaagtctctatcacatcaaatgtttggatactaatgataaatattaaacgtagattattaataaaacccatccaaaatcttggactaattcgcgagacgactttgttgagcctaattaatccatgattagcctatgtgatgctacagtaaacattctctaattatggattaattaggcttaaaaaattatctcgcaaattagcttttatttatgtaatattagttttgtaagtagtctatatttaatactctaaattagtgtctaaataaaaagactaaagttaagccctgaatccaaacaccacctaagaagaagctggtcaactagtttgctagtaggaagaagctggccaggctccatagcttggctttatccatttagacctgctaggcttatagggtgtaggtcatgataaaaatatgaaatcatttttttgggctttaggcataaacaaacaactaatttattctttattgtcaacatcacaaaccatttttatcttttttggtgttttgatactgatttgaaaatttgagtattacgttgctagcgtaaaaattatcttatgttatgtattaaactcaagagccccagcttaattttcattctagattctccactgattgggagagtgattgagaatatgatggagaaaattttgaataaggagaagttacattgcaagggaaaaatattactgtaagaatatgcttattttagaagaaagttctgatctaaaaaaatgcactttattagaaatgggtgtagcacatgaaacatcttcaccgacagctgtggatttttatatgcttttaattttggcgagtagctacaggagacaggcgactaaagtaacaagatacaggctgcacacctgatatgattggctgaatgttcacacgtgatatgaatgatgtattgtttatagctactgacgcggacggcgtctgctggcgtttctcggtgctgatcgacaggccgcctaccgatttctcaatccagcactacttaataaaaaactaatagaagacacccatatatatttggggaaaatccaaatacccccctacaagtcactgctctttctactctcccccctacaacttaatattgttcaaaacactacacataagttaatttctcttccaatttcccacccctattcggttttcacgctttctcgtgatgcgctcaatttctcgttatcatgggccttcagcgcaacccatggatggagttgcctcgtgccaccttggcggcaaaagtgcgcgcatctccatccgcttttaattctgcgagccatacgggtaggacgacatgacgctaacataaacacaggaaaacaatttttagtccaccagtgcaaaacaatagtgtctgcctcatgatttgtgattccacatcaatatgaagaatggcaacaccaagtcaaaaacacattccagaatatttaagacatgcttattgaagtagaatccccttaaaaatcacaattcaaatctgatagttagaagtacagaaaattatttgtcgtaaaaaagctggtactgagattaagaagggaccaacatcccctactaattgtagctaagaattttgatgtaaataatactactgcataaaaataggagatcagtttctcctaatttgcaactttcttccagtaggaccgatataaggcccatgtggcacatgatggtagagaccaacaccaaatgcattgtacatatatactggtggctatgtggatgttgttggaatatcatctcttgaactagaactaataggctgggaattgctcctcttcttcctcctagttatttgtgttttacactgagagaaacagacaacaaattgtgagaagtagcaaagtacaatgtctttatatgataaattagtagtgtactcacattttgagatgaagaactttggttgtcttttccatgctttctgctgttatgaccaaactctttgcagacgctacatctaattgttgtctttgcaaccgaccttccttgaaccctaggttcatcagatgctctagttctctttgtttttggcctccctggttgtgtcctagccacaggtgggtctacatctggaaatggagttttttcccattgtgtctcatcaggaacgggataaatcatcccacaatatgttctcgcatatgcatcctttgtcaatatgtcatcaacatagctctctggcctttgcatgaagggtaccgagctcgaatagctgaaacagcatgcaaacatgggattccagttaaatcccattttctacacccacaagtgtgcttgttcaaatccactacatattgattaccaaatggggacacttgccaaatgcccctaccagcacacacagatttgcaatatcttgcctcgttcttctctgcctcaagcttctttaatatatttggtgggatttgccaattgtccctttctgcaccttccctcttattattgaaatcacccttcatttttgtccttatgtgctcaaccatggtaattatgggttcatctctagctcccagtatctttgaattgtatgtttcacttatgttgttaagaagaagatctgtctttgctctagaactgaacatatatctacaccaatgcttagttggaaccttgcttagccactcccatgccctcaaattgttagcctttagttattgcatagcagcattgaactcagattgtctatatgcatatgctgctcgttccatcaaacccttcagatattcccctctaaatcctgcttgggaaaaattggcatgtaggtgcctaaggcagtaacggtgctcagctcctgggaaaacttcagccactgccttgagtagtccctatatatggcagcaaaatgttaaaaaaacagttgacatgtattaatgcaaagtagacatatatgatagctattaccttttgtctatctgacatgaatacccagcccccaaactcttctccttttccaatggccttctccaaacatagtaagaaccatgtccaagattctgtgcactcagactccactaccgcaaaggcaatagggaaaagattattgttggcatccctaccttgtgctgctagtatttgagaaccattgttgagtttgatgtgacatccatctataccgatgaagggtctgcaaccacctaagaagccagtaatttgagcatcaaatgacaagaacaacctttgaaacctaggccttatttctggctcaggtgatacttcgcacttaacaaaaactttgcttcccggattagcagatagcacagcatgagcataatcttgaattcttttaaactgcaaatcatgatctcccataactttcttgtaggcctccctccttgccctatacgccttacttatgctgacttctacattggtatctcgcctgacacaatcttgaaaggcatgtgcatcccatttcttgtcagatctaaagaattccatgtattcattagtaagccatctccagtcaagctgtgctatattgtgtgatttcccacagctatgttttgaaacatacttctttattttaaaggtgtcttcaccaggcaattttgaagcatatatgtaccaaggacagttatctgccttacacttgacagaaacttgattcctatcattcttgcccttgaacacctccctccccatgttgatgatcatattcttcaaagcagctctaaaaagatcaacattactgaacaacatgccaacttgcatgtgtggacgccgtagggtggactcataaaaaattatatcttcaattcctcttgatctgtgcacatagataggtgcttcgtcattgaaatctattgtgtcatcattgggctcatctgacaaataatccacctcagctgattggcctatatccttctcttttctcttgttagtttttttccctactagttctttttcctgtgtagtttttccccgatgtggttctgcttggttaacctctacatctacctggttagtaccatataggtcctcagtatcagagtctccttggaagaacattactggctccttgccaataacaggttccttgccttttttcttttccctcaactgttgctgtacatactcttcatgcaatatcaaatcatctttatcaaaatcacctgggacactattatgatgtccaattaatgggatactacttgggcttacaaaccttgatgtgcttccattatcagtcaccaattcccgaggccttgcaaaaaagtacagtgagcactctgtttccgtcttatgatcatccaacatcatcttgatttgttcatcatttagaatctgtacaagaccttgtggagggacataagaaggcttcaagtagtatacaccatctcctttttgatatccatgtataagcaatgactcctccaaatcgataaatttcagagaatccctgtctaaaagataaatcgatgaacaaatcctttccccaccagatttcctagagcttccaccagttgtacaaccagtatgaacaatgaaggaaatactagttcgacccatctgcagagattataccaatttattggtttgcaacctaaatcaaagagcaaatattcgatgatctgaatctagtaagacaactacatgcataaaacatgatctaaccaaaaccagggagaaaaaacgaacctgtagaatgaattgacgaggtgatcgaagtacaggctgctttagtgcttccttctatgacttctcttgccgggcaggagatttgatatcccttctctgtactatgcgatcatcgtcgtacttcgccgttgtaccgctgttctttcgccgccttagtgttgcagtagagatcgcgaaattaaagcagggaaagatggaaagtggaaggaggtgcgcgcgcttttgctgccaaggtggcacaaggcaactctacccgtgggcggcgctgaaggcccacgataacgagaaattgagcgcatcacgagaaagcgtgaaaaccgaataggggtgggaaattggaagagaaattaacttatgtgtagtgttttgaacaatattgagttgtaggggggatagtacaaagagcagtgacttgtaggggggtatttggattttcccctatatatttcggttcatctaataccagcataaatgaggcttttccttgttctcctgaccccttaaatggatgtaaaactaaaaaccagcacctatatataacactttcaagttgaattataaaaaaaaaccaactataataataaaagtgctatgttttaataaaccagcatctatataagcgttggtttaaaagaaactaacacttaaatggagccaagatgagtcgagtgcgtggagtgtggaagaaaaaaataattctttgttggtcttatccttatcctcccagagtattctcattcttatcatctccatctcacttgatccccccggcacggcgaggcctccttgatctcccaggtgcagcggtgtccgtgtcttcttccgctgcttcttcctctcccctgcatggcgaccatcgaatcaggctaatgggagctcgtccttactctcccagtcaatcttccctctgtcaatcttccctctcttctctagtgaggtagaggaggaggcacgggtgcctctggtggtaatgacagcttgtgctgaaggattgggcggcgacggcggcttgaacaggcaggatctagcggtggcgggggttctcacgtgtggatatggcggcaacgacaactctattagattaaatgggccaagcataatttaattctaataaattccatgccgcttaattaatgttaagggaataataccaccttagtaatcaacatggagggatctcaactaaaataggctgctatccgagggtaactgttgagcgcttgatctggtggtgggactgccacatgtgcacgcatgcgccgagccgagctgagccgtgggcgagggtgaggtgtaagggacgggacgagacaggacgggatggattcctctgtcgatgttatgatgagggagttaggtcccgatcttccgatagatattgataaacagtcgatttgggcgaagtcacgacacaactcgatccggcttttgaacgaacacgctactgagccctacaatcgcggcaccacgtctcctctggttatcaaccgtaccaaaacccggttgaactcaccaagaaggctaatcgctgcatgcgaatcgaagaacacaagcaagaacaagatagattgcaaccaaattgcatatgaatgattaagcactcgaatttggggttccacaaaccgatctagcggcgaaactgttcttgacagaataatctatgcaaaacccaactctaaatgatgatggctacaagtatgattagggacgtcctagggttgccctagggcgcacacccccatgggctaagcccacgacacaattaaaaggcccaaaaccgaaatcagattcggactggatgaaatacgtggcttgttttgcagatttccggcagctcggtaggaattttcatgtgggaccaaaaccatctgaaagtagactccataagctttccatcaagtactcatgggccccaaaattccttctagatcagcggctaggtcggtttgaagttgatgctgtcaggaggcccgaatccgaatccaaaacgtgtagaactttatctcttatcttctatggaccaaaagtgacgtggtgagatggaagtggacttggagaaggtcttggtttggtccccaatcaacttcttcaatcatccatgcattccttacgcttggtctcttttctttcgcccaagcaagtacctctgcgaacgaaaacacacgaaactcattgtgtagcaacgtttgttcaaatatataacaagtaaatctaatatagaatatatgcacctttggttgattaatacgcaaggtagtcatggttatattcgagctagttgtgtcctcatcattctccccttcttgatttgaaaccgtcctcagttttaccttgtcatagagcgtattgaacttatcattatctgtctcaacatccggtgaggaacatttttcgatggccatatggttggatcctgaaatcttggtagtcgaaaaaccaccacactccccttcttgcagactaacatgtaactcatttaaacagctagaggaactagatagagaattacttatacgcatgtggtcctctagacaacacatttcatcatcaaaaggaggtatagtcaaattcgaacaaatatatactcgatgcacattatattctcctttactatcataattgccaataatatgaaaaatcacatcagaagggcatggcagttgagtggacaaagataatcaaattaaatataaccccaagtatttaaagaagatagcaatttaagctcttcattctcgctagcaatgtgaataacatgtttaaaatcaacacatggtggctctactatagaactaacatattcattcactagttgtggtatggatataagtgaagcatcgcacaactcttctttatcacaagaaacatgaaacaaattgttttgtgacaaaggtatttcaacaattgtttccactatgggttgctctaatgtagcataagtagtggacatagttggcacattataactatgcataccttgagcagttgtagcaccgttatctttaccatttttctcatcttcagaaattgtaggcgcttggtcaattaaacattcctcaagcatgcatgaagctatggataggtttttttcctcctcatctttcttctcttcctcattaccttggtttttctcagatgcttgcaaaatattagtattcaaagcaataggcacaacaatacgttggtttggtaataactcatacttagttaaaggcatcgcaatattagtatcattccaaatatctctgaaagtctcattgattctattcttcaacctttcaagatcatctttgaaaagtttagaaacactcattggtactaattttatttttcgaccattatgcctaaatgtgtatgtattggcaatatcattatgcaaaacattattatcatatatccatggttgacgaaacaacaaagaacatccttgcataggtacaagatcaaaatttgcaatatcatggtaacttccaatcgaaaattttattctcacagttctatttaccttgaacttaccacacgagttgaaccatttgatgtaatatggatgaggatgcagttgtatagacaactcaagttcctcaaccaaatctgaactcacaaaattattgcaactctcactatcgattataacacgacatgctctatccttaaccacaaacattgtttcaaataattcgtgatactgcctttgctccgctttctccatttgagaacttagcatttgttgcaccaaagtactttcatcacgtgcatctgcggaaggtgatgtagcagctatggtttgtctcccatccaactttatctcatgtccataagagatgtaacatgccattgtcagtagaaaaaagagaacaacataacattattgttcctattaactatagaacatggattgtagtggaggctagcaaatggaagcgtcttaccgagctcttacaagtgtcttaccagcaatgctaaggacagtacaaccggtggcaggttagtgacaccttgaaggacgtgatgtggcgattgcaaggatcaaagcggtgctgaccagaagaatatatgtggagcttgggaggcacaatatatagtagaaaaggaacgcaattgtgctaataagaaaatgcaaagttgaataatagttcaaagtactagtcaatgtgctggcctagcctagactcaactctagctcaagcaagcacccgacaacactaaggactagatatgaatcaatgcacaactctgcactctgaaaacatactcaaaggatgaatgattttttttctttcttggtgcaactttttttaagcacctttctgcctttttttcttttctttaggtgcggatttttctttctttttctttgcacctttctgcctttttttctttttttttattttttactattttttttcaacaagcactaacaactgacctcaaacagggactcaaatgtaaatatgaatattatagggactcaaacgcaaagtgaaaaactaaaattggatcacctcaaaaatggaatgctcatgtcacgtaggttctgtttttataaaaatatctctattctacaaccaccaaaatacccaacaatgtggtgaccgaggaggaggcagggaagaaaccgtgaagaggaggtggggtggttggccgtgaagtggaggtgttcggccaaagaggaattcggcagaagcactggcaaaccctagccgcaactccaaactcgaccgacaaaaacttctgaaaattacaaaaacggaatctcgacgacgaaacgattcaatatttcaaggtcccggcatcaactgacgacatacaaaactggtcccaaactgacggataactcacacgggcttgagtgatgaaccctagacctaagtgaagaacatatgcaatactcaaaagtagaaattaaatctaaaaactaaaccagcacacgacacgacgatgcaatctagaattcaacaaagcaaaatctaatagaacaatgcaactgctcaaattgtctaggtaaagaataactatttttgtgtgacaattttctggttatgggaagataaattacctaacgggcaacaacgctctgataccaactgatgagggtgttaggccccgatcttccgataggtattgataaacaaacgatttgggcggagtcgcgacacaacttgatccggcttctgaacgaacacgctactgagccctgcaatcgcagcaccacgtctcctctggttatcaaccatgccaaaacctggttgacctcgttgagaaggctaatccctgcatgcgaatcaaagaacacaagcaaagaacaagatagattgcaaccaaattgcatacaaatgattaagcactcgaatttggggttccacaaaccgatctagtggcgaaactgttcttgacagaataatctaagcaaaacccaactctaaacgatgacggctactgattaagtatgattagggatgtcctagggtttccctagggcgcacacccccatgggctaagcccacaacacaattaaaaggcccaaaaccgaaatcagattcggactggatgagatacgtggcttgttttgcagatttctggcagctcggtaggaattttgacgtgggaccaaaaccatctgaaaatagactccataagctttccatcaagtactatgggccccaaaatttcttctagatcaggggctaggtcggtttgaagttgatgctgtcaggaggcccgaatccgaatccaaaacgtgtagaactttatctcttatcttctatggaccaaaagtgacgtggtgagatggaagtggacttggagaaggtcttggtttggtccccaatcaacttcttcaatcatccatgcattccttacgcttggtctcttttctttcgcccaagcaagtacctctgcgaacgaaaacacacgaaactcattgtgtagcaacgtttgttcaaatatataataagtaaatctaatatagaacatatgcacctttggttgattaatacataagatagtcatggtgatatccgagctagttgtgtcctcatcacgttacgatttgctttgatgaacaacaacgtaatctggtttctcgggaaaggtctctgttcttctgttcctgagttgcgcatttgtttccccggtgttcttgagttgtgcatttttttcctcagctccgagcatatatgcatacatgtacacaggatgagcaggcctctagaactccgtctgcttgagtacatgtataggtaggcagtcgatcaagtttttgggagcacgttctccgcatgactgctcgcggtactgcatcttgttcaccaaggtattctcctctacatcacgatgtctaccaccagcgctggcgctactggaggaggagggaacattagtactggaggaggcgaaactgagaacatcaacatcaacagaggcaataccaatgcctcatcatcctctgcagcttcactggtactagaggaggcgaaaccgagaatgtcaacatcaacggaggcaataccaatgcctcatcatcctctagagcttcactgcgtatttcactaccctcatcttagtgctaaacatattttcagatgctttgttccagctagcatattcatgtttatcaccatactaggatctagtgtttatgtcatatttattatactaatttctagattgtaatatgttgaattatgactagatttccgaaagactcgtgtggccaaattagttggcgcctggtgagctattgcggcggcagagttccccacagctgtggaggcatgaagttttgattgttgtattatgtgagtgacttcgtgatttgtttccttgcactggttgattcacatatatgctattgattgtaggatattcagttctgtgattgattatatgcttttgttcttgttcttgtgctttcactactaaaaaaacgttcactggtggccaaaatagcttgtcactggcagccgactgtaccgccagtaaccaaaggccagtgaaaataaattcatttgtgctgacggtacagccggccgctagcagccacgcaaagacagccgctagcgaaaatcgattttcgctggcagccaagctaagacgaccaccagcaaaaataggattttgttggcggcaatgttaagatacccgctagtgaaaatattttcttggagaaaaaataattccaatcacaaatccccaatccccaatccccaatcacaaatcacaaatcacaaatcacaaatccccaatccccaatcgccggttgctgtcgtcgagctgcgacggcaaaggagggagctcgctgcagatgtcgctgtggctgccgcggttgcaattgtcaccgtccgcggagccgcagttgcctcccgccgagccacggtcgtcaggtggccccgaactgctgcatcgtcgggagaggggagggggttggaggatcaatcgccgcggctgaatccgctgcccgcgccgctcccgcagccatctggcggccggtcgaccatcgccgcggccgaatccgccatccgcacgcttccctccaccgcccgcgcttgtcccgtgactgaatccgccggctggatccgctgcccgcgcaagccgcatcggctccacggggatggctcgacgaggaaaggggccatccaccgtcgccatcatcgtccctgccttggccgccgagaggaggaggagaggtgcggccgtgggggtcaaggacaggaggagggcacaggggagagggattggggtgaggaggtgaggcgcagggagagaggggttgaggaggaggagtcgaggaaatggggagatgggggaacgggaaaaggtgtgagtgaagttttaatgtagtgaaataaatatttgttggcagtggccattagcagccacgagcgaaaatcatattttcgttggcagtaagttaagaggtccacttgtaaaaatacctctatttttgcaagcggatctcttgagtgaccgccaacgaaaattgattttgctggcggttggtaaccggaatccattttcataagcgcattttcataaaacccgtcggtaaaaatgaaacggtgatgctatgaaaaatgatttttttagtatgtttcgttctggatgtggaagatgaatgtttggttgtagagatactccaagaaatgccattgacaagcgtccaagtcccagaaatgccatcgataagtgtaagttccaagaaataccatcgtacaaacgattttgtcccaaaaatgctatcgtcgttagggttctgtccattttgcgtcgttaaatacactgttcatcctatagaacttaatggcgcgaaatagacggaaccctaacggcgatggcattttttggacaaagtcgtttgtacgatagcatttctgggatttagacacttgtcaatggtattttttggattatctcttgattataggatttttcaatttatttttagtggatttgatgcatggagcctgctttttttttcaaatagtacgaaccagatgccttggttcttaaaccggcaccgttagacctcttatcagtcgcctgacaggtgctagttgtgaatccgacaccaaacatcgatttctatccggtatctaagtgggtttgtgtacaatagtgcaggctgaccaaaagctccccagcagttgaggtttttcgagtatttgtttcactagagtatttttccatgtttccagggtacacttaatcgttcagtgggaacagtatgtttcccgcatatcagaggcttttagtcctacaagtctagatagcgtatgtatccatggttgtaaaaaaaaaagaaaaaaaagaaagaagaagcttcagaatcgatcccactattgaggaaaaatacaataatattattttctatatcaagtaaacccgtgcatattaccattacatgcaacacagacaaaatgcattcagaaatacgtctcattgcaaagaaaactatagaatgttaacatccaaatttaacatctaagcacgaaataggaaatcattcgaatttggaaaggactgagttttcttcttggtgatagtcagaccgaagcctatgggctagtctgactagctggtggtgtgcagtggggctggtcggacagactgtatgtagctggtcagactagctaagttcggttccaagtcgaatttcatcaggtctagagttttcttgcctgcactgaggtttttcgagttctacttgatctctaccacaagtaaaacatggagaagaccatgcagaacagcagaaagcaagactaacccctttgtaagagctatgaccggtataatcgagcacacattctacttccaacttagccaattgaattattttttcaatattgtatatttttcttttgctagttctagtctagattttgtggccataaaagttgccaacacttaattacttaactagtggccatattacaacacgaaaggataaactatcatgatccatcacaaaatattgcactagtacagaaaccccctataggtgccggttgggaaccggcaataggtgccggtttcctcgccggcaccaattggtcggtaccaataacactaggttattggtgtctgtcatataaccggcacctttgtgctctccccgattaaaaaaaaaaagaggaaacctactcctagccgagccgatgctttaagtctcacagatcacaaatcaaatccatcacagatcatcatcaacaacaataaagctttcacagtctcatatatcacaactcatcatcagcaacagcaataataatccctaatccaatccatcatcaattatagatgaacaacaatccatcaaccaatcacagatgaacagcaatcactgatgaaagaactacacaattaatcaaagatgcacgaaatcactctcgctggttcttggttgtcgttgttgggatacgcgtaggctacgatagcataaatcaaaattttctatcgcgtaaaccaggaaccatgcaagtattagatcatagatcattaccactcgacgcgctgtgcagcggaagaagacgccgagaagtcgaaggaactctcgcgaagtagcgcgcgtcgatgtagaggaagtagtcgatcgcaccggctcgaccttctcctcctcgtgcgttctcctcgccgtactctcacgccgatcagctccgcaaaccagcggcacctctaccggtatccacacgtacagggacggaacgccacgcacagatgtgctagcactcgcgcgcggctagagtttagctcggggagggaagtgacggctagggtttctcacgtggtgcaatacctccgccggtcacacccctcacgaatatataggatccatcactcgggcctccaaggcccgtaggactcctattcggatccttatccgaattaagctcatattggatctctatccaatccccttattccggcccattaagcgtgcgaccctataggttcatatatactcggctgtaacccgaaaactccttttcggtccacgcgtcaacagcggcccctagcagaacgtattgacccaccgggcatacataaagatcatatcggctgaacctctagtgcatatttgtatgaacccctttgcctcacgatatcgattaagctcaaggctagatatgtgtcatcctctaatagctcaatcatttactcgaatctgttgatagattatataacttgtgattgactcctaaatcacctttggcatggccatgcacttccataatctacaacatcgaggggcccagagatatctctccataggaggggtaaatcacatcttgattattcatatcccactacatgtttcatagcatacccgaaaactacttttataattacccaattacggagtagcgtttagtagtccctaagtaagctactacacatgttgagagccatgataatctcaggtctaaggattcaacaccaacactcaatgagatcactgatgacacaacacatatggctcttgcagtgtctcatgttgggtctatccaacaacatgttcaccaacatgtgtccatattattaatttggtatctctataccatgatccatgagacatgatcatcaattaatacatgtgctgatcatataaacatatttgttccacatatgatatttgatcagggatcctttagaaatagtaacaaacaacataaagagtctcatgaaagaatcacatattcattaaccaataaggagctatctatttcaaggaacaatgtcggataaatatgtaaacatagtatgtgatataatcatctctatgattgcctctagagcatatcactaacagtcgtcaatcagccggggtccctctccacgcgaggtcgccgccggccgctaggtctctctccatgtgccgctggtgggaggccaacgaagatgaagaatcgcccgtgggccctccccgcgcgaggtcgctgctggccgctatgtccctctccgcatgccgccggtgccaggctgatggagagggagaatcgctcgtgagccctctcctcgcaaggtcgatgccagccgccgggtccctctccacgcgccacccatggggaggccgccgattgcgcgtggcggaggggaagagggaggggagggtggcggaggaggcaaggggggagggggcggaggggaggcggaggggaggcagagtaggtagaggagggtgcagcagaggagggggcccgaggtgaggcggaggggaggcagaggggtagaggagggtgcagcgagggggagggcgctgcgacagagtaggagcgagctagggatggcaatttcccccgtggggccggggacccgcaagggatccgcccctacgggggcggggacgggtggaattttcaacccgcgaggagtcggggttggggccccggccataggcggggatgggggcgggggaggacaaccacccacgggtgacccgcggagccccgagggtgtatattagactattgatactaccatattgcaagcccaaaaagcccatctaacctatcatatataaaccaaaccctaatatttccaccaccatctacccatcctcttttcctcaccacccatttacccagccgtcactctccagtttcctccaccaccagcgcttcctccggcggccaggctcgggcgatggcgtcggctgccaggcgcgagcggcggcggcggtggccaggctctggcgacggcatccaggctcgagcggcgacggccaggcgcgggcggcggcggcggccaaggcgcgtgcgacggcatcggcggccaggctccggcgacggcgtccaggctagagcggcggcggccaggcgcgggcggcggcgtcgccggccatagcgcgggcggcggcggctgccaagcgccgtcatctgcgtcggcgttgatggccatggagcttgtagcggcgggagtggcgacggcaaggggcgcggccaaccgcgtcggcgtcggcgtcgacgtcaagggcaagcatgtgcagcggcggcgccggcattcctcatctcgcgaccacctcgtcgccgtctgccatgggtggtgcgggaccccgctcacccgcgggtcccctacgggggcgaggacgggtgatgtttcccacccgaccacctctacgggaccggggccggtgggagaagtcggggagtagggcggggacgttctagcccaacccgcccccaacccgccccgttgccaaccctatggcgagcgctgcgcgtgtaaataagggccaaatgggatcgacgcgagtggataaggttggtggagatcgcgctagtggatctgtggaaataggcggccggctcggccggctcggctcgctcgtgtcggttcagtttggtaggcactggttgtttaaagaaccagcacctgtaatatattaataggtgtaagttcttttaaaaaaccagtacatatagtattggtaccggttttaacaaataaaccggcacctttaattattaattattaaaggtgtcggttctttatattttcatcatgcgaggtgcaaaatgcctataagtgtcggttttaaatgaaccgacacccataagatcgacccctatgagggttttttagtagtgttgatccaaacatgatggatgtcataaaacctgtctggaaatataggatcaataatgtgtcaataatgtaggcattaataaagtgtcaataatgatgtacgttgtaacgggaagaaaaaaacaagaatgtggagagacagacccttattcgaacaaaaaagaagaacgaggatatatacaagagagtggtcatatacggccgagtgagacggcgacagcacgctagatcgatcctagcttagccaaggagagcgagaaggggagagtaatgcgacgaaggaattaaacatgcggaataatagtcctaaattatatcacggttagtcaggaaatgatcatagaggaaacataacattgaatttgtcttgaacttttcattggtcagcaaataatttcaagtcataataaaattttctaactgaacttttcattggtttcatttagtaaaaaataattttaaatctggaagcaacattttatcattttccctgcaattataaatcgtcaggacagatggaagtagctcattctgtaaatagaaaaaacattcaatcagatctacaaaactaatctatctatttatctatctatacctatattaattgaacactttgcagaaatccccacgttagccaaaaatatctagccattgactaataaatgatattatcgtcaccatagattgtaaaatccattcctgttttactttgtgagccacgtgtaaaccaatcttaaaaacaccacgtcacaaaggagctgattttttttttagaactacaaaggatctgatataagagagtgtggatacgcgagacgcaagataaattatttgtattgctgtcgatcattaggaacatgattagatatgtttaattcacaacacaagaagagacgaagaaaatcagcaaagcatgcaacaccttgcagcaagacgattagttcttctggcacgccgttcacgtttatggaaagcacagcgatcgatcagcaatggtgttcagaatgacgttcacgaagcggcatatatacgcccgatgctcacatcaagtcacgctcgacgccgatgtcgccgagtcggctcggtcgtcttccgccgcgctgccatgtccgtgccagcgccgacgtacgccgaccgcacggacatatgtccatgcaggctgccgctgcaggcagatgcatattctttttcatcgtgagtaatttctctgtatcaccgttgaggcagatattattaataatattaatataatcattagttgtaaggttgatgttaattgatattattagactttgatccttgatgtcatttgtcacaaaaagtaataggttaactttgtgccatcatatatcacaaattaatttgtgcatgcttcatcgaaattgagttgaacaacttttttgtttagaaagtacatgattcctctaacaaatataatttagcaatctaatttgaacacttttcttttatcaaagttgatgtttaaacatggcgaaaagttattatttataatccaaaaataatatatgagagtttatgtcaaataaaccatgtcatcgaaaaaaatatcatactaaatttttctaaaatttactaattactaaatacataattaatacaaattgataaaaaaagttatatccaacttggactctccattaagtattttattaattaggaattagtaactttggtgaaaaactagaattagtaattaatccgtaagttattagtcatacaagctcttctttcaatttgagccattgtaattttaatctttgtaatgtatcgataagttgcatgggttgacggccattaaacataattcagcgcacaaactagtgagcggcatatgcatggcccacttaagctcttgggcccattcgagtggcccaggcagatgcccccagctcctgtccttttctgccactacgataaagccattcttatactctccctttaatttcacaaatcgactataagaaaaactatatgtaaaaggttttgggttgttcggtgaagaccaaggatttaaatctctggttaagaaatactacctccatattttaatgtatgacgccgttgacttttcatcacgtttgaccattcgtcttattcaaaaaatttatgtaattatcatttattttaccgtgacttgattcatcatcaaatattctttaagaatgacataaatattttcatattttcacagaaattttaaataaaacgaatggtcaaacgttggtcatacattaaaaatacggagggagtaccacttttgccgctacataatctactacgctaatagctgggcttagctggagattcggccttcagttacaggtagcaaaaacttttgttctgggctgaaattagctacgggccaaggcccatctacttctcctgtaacgcttgttcgccagcgcccacgcttttcccacacgcgtttgagcgcaagccgtccgggtggggcccacctgccagccggagcgagaggccgatgcccgtgctcccaatcgacccgcgccctttgctcgcgcatgcacgcgcacgcgccgtcttgggccgtcgccacttggaccacgcgggcctgccaagccgagccaaccaccatcttgggccacgtgcaaaggctcgattggctcggcctccctgccaaccaatcacagcacacgtgcacccttgggccagctaggcctgccctggcatccctgccagcctagcacgtgccacgcagcacacgtgcacgatggcttacgacagtacacacgactgctgtagcaaccatgcaattcctccaattttcgtcgcgaaatccggcacttgcacatccgaccatgtgaaaccgttgcgaagatctctccagaccgtgtcagtctaccgtgtgccaccctgtatccaatcttgttacttggtttcctttatcgttctggatctcaactacttcccgagtctagtcccgatccgctgttgacctaggttgaccacgaaggatcctgacgttagtcccaccttgtcatatggcttcttgaccgtgccggacctctgctgctccttgagcatggcctcggtcctcgctattgactaaggctgacttcaatcaaactgcatgcatgtaaacaaacaaccaatgtcttggcacagatattgcaacttgacccacaaaaatcagttaatgcacactcctacatttccggcactgcactagccaattttccatcacacgtgaatcaaacccacacatggtttcacagttcgagtatacacaagattgaacttgtgttcatttgtacacgattgaacttgtgttcatttgtatattggatcttttccaaaatctcatagcaccggagcggcagatttatttatgatcaattaggtgttagctaaaaaaacttgaaaaagtgaattaatatgatttctaagcaacattcatatagaaattttgaagaaaagaaacactgcttagctgtttaaaaactatgtgcgtgaaaaaaaaagagaacggaagttaggaaagtgtactaccaaaccctaggtatggtcattagatggtggtccgccatcctgagacttaaaaagaaattctgggtcccactgctatgagattgattccaacgttaggggtgacaaaccctagcttaaaaagtaattgtacaacgatataaacaatgaaatacgcaataactccatgtcatctagaaattggcaacaaaactgaccaattgagacacgattagagagaaaaagagagggagagagatcaggatattattacaagtagttacgaacaatatgagactattttctgccctcgagagcaatacactttatttgttgcctgtgatcaaagtagtctttttttttcctcaaaaaaggaaggtgaaaaatccaggcgctgctatgggaaagtttttttaagttagatttgtagtttcactccatttccatgctttattaaattcacacctatcatcaatttcaaatgtttaaaataattgagaaggtgtggcttcatgggagacaagagacacattgaatcgcatatcaatcatataaatgctaaaatatttttgatgatatagcttcatcagaggaaaacatacaatttgcctcattgatcaatcatcaatagctagaagtaattagtgtgatatggattcataagaatagaaagaaatataattacttagtgggaggcaacttaactatataatgttttgaaataatcagacaatatacatttttctccatatatacctccaaaagttaaaaaaaaagagaatatttgaccatacagtctacataagaactatatgggaatgggattgacaaagagactcctaacaatctcttgtagatgtgtggagaatgtgtatgcatcctttctcttgtcataaaagaacattatggaaatagccatgttcagaactctttgcactaccgggagtagctggtggtgttcatagcgagcgtggttcatggttctccattcatcttctatcagtgaatcgagcttggcaaaggcaacctcacttatgaccttgtgctcattcatgtagcactcaacagtgctcaccatatcgcctttgttcttcccacactatatgaatgtcaaagataaattgcaatatctcatcctccactctagtttagcagttgtacaagatataaagagttgtatcatctctttttgaaggaatcatgtacaattgcgtatagttaaatgttgataacaatgtttttagtgtactagtgtgatttttttatgatttctctatatgatgagttggacaaatattgtgatcacttaggaacaatgtcattgtgggcattgaaaatgttacatttaataagaaaatgattagttaattagattgtaccttaaaagaggcaatgtcattcatgaaacgtaatatctttgcacatgatgtcacggtactactgcttgctgcccactggaatgcttcacttgatattgcgtcaccccggccaaccgtcgtagacacacataacaattgcaccgtcgaagtctttgtagacaaagccacctgctcttcaaagcttggcttgtaattattatgtgaccattcagcttcctggagaaaataatgggacagcttttggaactgcacccaagcaaaaggaaattaattaccacaaaattagcaatacatggcaatattgttgttctgatgggccactcacaaacgcttgcacatctaacacacactcaaagatgctaagaccagcggcaactctctagcctcacaaaatcatattgaaagtgcagtcgattatccataatatttgtgggcataaggacctctagttggtgaagtcatacacacacatcttcaccatcacaccaccaatacatcccacctccattttttgcttgacttcatagaattcgtgatgtcaactaacgttgatcattatttaaaaaagagtaaatttcacagaactacatgttttgtagtccaagttgcagaaaaccacacacactttgacacttggtacttaagtacatatgttttggtagctgtagtttca

SEQ ID NO: 5238 - DNA, 38209 bp, Oryza sativa
tcacacgaaattaataggatgccacgtcctcatcctagatggaacaaccatgtcatctcacgggtaaatccattcatcgatagtgtggttttgtgaaactaaactaccaaaacatatgtacttaagtgccaagtgtcaaaatgtgtgtggttttctgcaacttgaaccataaaacatgtagttttgtgaaatttattctttaaaaaaaggctaatatgaaaaatataccattatattgtttgctatgaaactcatagtgtgaagtttatcatcatatatttattaagttatgaaaaataatagtcaaatttgaagatcaaagttggctgaaagtcaaagaaacaaataagaaagcaatcccaatatagacagatcaaaaatatatatcattgctgtacctctttcttagcataagcaacccggtacttgtcgttgattgccacttgatcctcaaactctttgaagttattcaacaattcattgtagaacttttttaggtactcaggcaggagaaatagtgcactctcatcccatctgcaaggcacacaaattgttaatatcaatcaaaattagtcgggcaagcatatataaattagtttaacaaatactaatacaaagaaaaaacctttgtatggcttcatttagcttccgacattcttggatggtggcatgggaatcatatgtgtcatccattataaccatcaatacaattatcttggtaaaaattatccgtgtgagtgctaatccttcctcgtagaacaacatttgggaccatgtgtagctctccaccaaacgatccctaagataacttagccccacatatccagtaaggtctttccaccacctaaaataaaagcacttaattaggtacaagcctagatagtatgtttaagattattattagcattgcacataccaattctggtaggatcaatatggacaatacacctttgtcagacatgtatgttcaacacattgtttacatataaattatatgtatagtgtattaagctttaataagattgagatgaatacatactactgcaatacttattttctacttggtgggtatatatcaaagagattccatactcagaaatagctttgagctccttcaagtggaccccttgcaaaatattaaaatccacctttgcaagatccaaaagaaacgaaatatgcccttcctcttgtccatactccgaaagataatgcaatgtttccactcttttgtatgtcctcggtagtggtaagtgaagggcacgcttgacttggtcagctaaagggtgtttgaggttaccacactgcatcattgattttagatggtgcctagaaaaagagatggcctcttcgagttctggttcatcgtgaacgaggaggtaagctgcattatataaacttaataaactgcttggttcatcagctatttaattgatgaacctcccatcatcatccttgaatatgttgaatgtagctgcaagataaaatatgtaatttgagactaattgattcattttagacttgtctgtgcaactaggtgactagccttctcttataacggaccagaaatttcttttgataaccacttatgactctttaatttgttgacaatagaaaatccaaacgtatatagattttccgtgtgtcatcagtaatgtagaataaaaaaaatttaagttgttgctgaagctgtatagaattttcccaacctacaattattaaatccaattcatattttgttaccaaatggctagctagtgatgagtatgcgagttatgtcagtattacttcagtccactctatagaccgatagatacctggagatacccataggccatgctccctgagcaagcgaaatcgaagagcaacctcgtaaaggctagagctagtaaattcacttgcatggatatcacttagtgtggtgcttatctcttcattgaacaggtgaccaactcctagatgttggattgaatccactaacttcatccttgcaacaacgtcacccgaagtccgaaacagtgtgcgaaccttctctctaagattatcagccctctgcctcatccattcctccgatctctgcaggctttcgattgttagcaccaaccaaatgaagcaatattagataataatgataatttgtcaaaacgcaatgcaaagcatatttcgggtggtcctcaatccaaaccaatccattttaaactaaaatctcaactcacacatttggatgggtcaagatttcatccggtttctaaccgatcgacttccttaataataatatatagagcatgcgtaagatgttaagataaattcataaaccagacagtaatagcaatataacaattatgtgtatacatgcctgaagtggttgtggtgtgtaggtgatgaagaaatccccccagactgagggcttatgattagaaacaccagattgagggctcaagcatggtgcaaggctagtggtagatctgctgcccgtgctggaaaacatttgcacgtgtactgtgtacttgggctcgatagaatgtttcaagctcagacctcagatgctagtgagcaccgtacccagccctttatataggagtagtacccccctaccaaatactacttgtcaagtggggattagtcatatttaaattctgatatgaccattagtttgactatgaatttataaatatctaaagaaagtaagcattttttaaaatacttaaatatttaaaagtttttaatgtgaattaagaaagcaggtagaattgaatggtaaaatgttatgatcggttaagaaaataaattaggtagaacaattaaacgggagatggttacgattggttgagataaaaggttagatgaaaaatagctaaattttaatataaatttgaactctacaaatagctatattttaggacagataaagtatattactatatattaaacatgaccgtacaatttctgttcagccaagtaaatacgataagagtaaatttcacaaaactacgggtattttgaccaaattatcacaaaactacagatttaaggagttgtatcataaaactacatatttagcaccaaatttatcacaaaactacagattttagattaagtatcataaaaatgcatatttaatattgaacttatcacaaaactataacttttgaagtttaaatccctagcaccattgttatcgtggagctataaacatcattactttgtgattaaattgattctaaacctatagttttgtgataatttagttagtaaatacgtagttttgtgacacttcatctttaacgtgtagttttgtgataaatttggtgttaaatgtgtagttttgtgatacaccgagttaaatctgtagttttgtgataatttggttatagtatctgtagttttgtgaaatttactcacacgataaataattttaaattattgacgatcaaaattaagttaacactaataaatgatgaccaaaaatactactttattacatttgtttacttttgggtttggacgttatatcttcgtattataaaactatatatacctgcatttgtttatcattggcctgtgtttttacatattacactaaattaaattgatgaatgattaaaagtcaactgtgtcgtacactatctctacatctttagaaatccagtcatcctccttccttccctaccatgcgcagcgcccgtgaaaatcaaaccggcccgcacctcccacaccatatttcttctgatcccgtcgcaaatgcacggtacagtaatataaaaaatggataacagattttttaaaaaaaggagggagtagaaacggaaggagtactaccatatatatctttcaaaaacgctgtatatatatattgcatttggtccaaatccctgaagccaatggtcagtcacgtgcatccagtggggagactatcgccagtgaggcggctgctatgccttcctctgtttcgttccagacatcgacgggaatgacggaaagggtgaaaaagtcatctgcctcggagcggatctcagccgttggatctaaaacggacgcgtccgatttaccgcttgccttttggaatggttccaggaagatggaacagaatctatctcacaccagtaatattaatctgaataagctccaggtcaaacaaataataatctgaataagctcagttgatcaaatcagtacacagaaagtcaaattagttcgatatgcatgcaatgattttttctacgatacttgcagtttaatatctggatagtctggtgaatgcaaaaggtttgggatgatggccgccgtcggtgcaaaagtttgtttcgattttttggaaaaggacgaacgttgaatgagagatataactagcatataattaatcaagtactaattattaaaaacttaaaatatatttatttaatttttaaagcaacttctgtatataaaatttctcgtattaaatgtatcgttcagtttgaaaagcgtactaacgaaaaatgataaagtgggtaaaccaaaacaaagtttagaatagggccttaggtttaaatttgaaattcatgaacgacggtatattttcttgcaacaccatatgtaataggtgtataaatttatgttctatttttttatacaacagacacaagtaaatttcacaaaaaaaaaatcccatacagtgtgccatgtgtgacacaaaatctcgtcttgtgaatttatttattgaactccatattttagggcaaaaagtttcataaaatccaggtcattaactatgccatctattttctttgatatatttgtgcaggatgctatatttcataaatttatatatgttattttaggagcctataaatctctggctcctgccagacaccaacttgtttgatcacctcatgacactaacatatatgggaaaacatgcagtgcataccacatatatgatgaaaacataaaaactaccattggataaaagaaatgaaagtctaatatttgttcacgtcacgtagagaaaaaattttactccaagttcaaccatgggtaacgtagataaatctcaaacgtccatttttaatcaatggtagtgaccaggttttcacaatatacgtggttagtactacatatttccaacgaaaataaacataccattaaaatatactcaacgttagatttaataaaactaatttattattatagatgttactatagtttctatagatttgatcaaatttagaagacttaacacaaaatgacttgtaatataaaatgtacggagagagtacattatatcgttgcaacacatttgggggggtggggtggggggcgcctaattttgctaagttcgtcttagaatgagaaaaaaagagtgtggagagttagaatacttatatatagcgtatcagttggcataactatatgtttaggaaacataaggttctctaaaacgataaataacagaacatatgttttttttccagttacatggaagatgctaatggatgtacacaccactgtacaaacacagcgacgaataaatcccttttaacacgtactgcctccatccaaacataaaaaaacaactgctatagtttgaatttgataagaaaataccttcgtacctacttttcacacacgaatcgagaatatttttatcccttagataccacttaccaactcacccttgcatacaagttttacatcaatgaggatctcgccttgccgccacgctcgcctcctccgccgccgcttgccacccagccgccgctcgcgcccaccccctgcaccaccctgcctcgccgccgttgctgcctcgcctctccgccgccgcgctcgcctcatctcaccactgccctttgccgtcgccatgatggacaagagagagagagtgagagagattgggaaagagagggagagagagaaactgacttgtggggtccaccaacttttttataaaagaattgttgattggactatcatgtagaccaaaaccactgcggattggatcgaggagggtaattcgtccggttttcatagttgggggtaaagaatgtccggttttcgggttcagggggtaattcggtcgaccgcgatagttgggggaggtaattcgtactttttcctttcgatcatttaatatggttaataaatattttccagttcactttataatcaagtaggataatccgtttcgataaaatggtgaataatctgaaaataacaaacaagaaataaagactcgctcgtctgcttacaaacttatgtcagaattttcctaccaaagattaatcatctgctgcctggcctgacaagccctctcatgcagaaaaacaaatgcagtgaggcggtcttaagaagcctgaagtgactgatccatccacatatcggaccacatatatatatatatctatatgaagccaagccttcaacgactcctcgaaggaggatatcagcggtgcaaccgtgcaagacaccgtacccaccgcacgccgccgacccgacctacacaatcaccgtcgataggaccaccccaaagcaccgagaaaagaccccatcagtatggatggtcaatgggccgctcggcacggcctgaaccggacacgactagggcgtggcccaaggcatgtcaggccagcacgcccggcatactcctcgtgtcgtgtcggccaagcacacaggctaaacctgtggcccaagcacggcccattaagatgctgtgccgatccgaaagcatgaccggtctatcgtgatcgttttgaaataagtctatattgcatctctcaactatttgggccgtctttctacatggttgggataagtccattttgtgttcctcattttcttaggtttgtgtcttgtatatggctggagtaaggctccgttcgtatgcgcgagtcctgatcccgggtcatgttccgtgcaccggaagcgtggtcccgcacacagtaccagaacggcggcttgtgaggcggcgttaacggatgtgagatgtggccattgcgcctcagcttttccgtcggagtcaggtgtcacgcccagaaattcactagtaatttctgaactaatttgtgcatgaaatcctcatccaaaaatcagccgaggtacacaaactgacaatttaatatatagattcatcataataataacgtacatacttacaaaagaaaagaaaaacagcagcggaattacggtctagcgaagctccggctccacagctcccacaggcagctcaactatgatataagccaaacgtcttctccttttggatcctttttcttcaactgaggttgattgattattgcaaggtgagcatataacatcctcagcaaggcacacagcaaatatgcaagtgcacaggataccaaaggatggcataatataggctcatttacaaaagcagcatttagcaaacatttgagaattgtaaaacaatagagtaattaatcatcaatattaatcaagggcgggtcagcggctcccggcgcagcggcttctctgtggctccctggcgcagcgggtgcgctgcggcgcctcgacgcagcggctgcccggtggcgcggcagctcgggattttgccctgagctcgggacctccacggcggcgaggagcagcgctggcctccctctcacccctccctctcctctcatctcctatgtgatgtgatttattctgtgatttccacctcttctctcatcttatgtttaatttattttgtgatttgcaatttccaattggattgcttcatgtgttggattattttgggatgattttgtaatgattccaattggattgggatttagtttttgtgatgatttgggattggcgccaagcacttcgcagccgcacgtcaccagcaacccgacgtgcctcctgctgcctttgtaccacggccttggggcagcagtgtcctcggcctgcgatgatttggaaattggtatcgggttgggagggggaatcgggttgggatgctattagttttcttgtggggatcaattttcgtgttgtttttggttgtctggattgattgatttggggatcttgctcagggttttttttttttactcggactcgaacgaaggaaccaaaattttgggagtgacggacgaaaacacaatgacagatacatgtgacgagtagaaaaatccaaatcttttaattagttaagatattatgttaagaaataccgcgtccttaagaaatggttttttgctagtacatagcacaattacgaaattcaatctacatacaatctattattttaaacgaaactacatgaaattgaatccatatgaaattactactgtaatgcaattcccgtttcttctcaatttttgcaaaccggagtgtgctttcttgtgtgcatctaccaattcctcccacgcatttacaccccctgcagcgcatccggcggtaatggcagccatcctcctctcgccgacagaaagtgtcggcgctccaacggcgctctgtggaaatacctaagtcctgtgaaatttcaaactgaaatcatataaaccgtatattttcttgtaacatgtgtaggtgctttggtattaattacacatgttgcaagaaaatataccattcatatgatttcaatatgaaatttagatttctagatttagacataaaattttctagcagatacatcggttcaattcacgggtcgacgatgcatgaacattaaccggtcggcaagtaggggtgggcattcggttagaccgaaaaattcagttcggtttctcggtctttttaaaaattcggtctttagaatctcaagaccgatcggtctccaacaaaactgaagaccaagaaaattggtcttcggttagttcggtttggtctcggtcatagaccgaactaaccgtgacaaaaatttatcagcaaaaaattggtacaagataaatgaattaagcaattaggccatacacaacacactgcaaattgatgtcaccactcaccagcaaatcgagcactacttagacaaaaaaaaaaagaagcaaatcaaacacgatctagaaaggaaatcggcaaatcgaacacaactggcgcacacagccacttcaacttcagcctccgggatgtagccgaccggctagatgtggagggaggaggcggcgcccggcgcggtgcaggaggcggcgccggcgcggtggagccgtgagggcaggaagcggcgctggcgcggtggaggctggaggcgccgaggcggagggtggaggcggcgagctcggtgaagggaggaggcggagggggcgccggcacggtggaggcagcaggcggcgccggcgctcggtggagggaggaggcgagctcggcgccgggcggaggtggcgagctcggtggagggaggaggcggatggggcgctgcgcggtggaggcagcaggtggcgccggcgctcggcgctgggcggaggcggcgagcttggtggagggaggaggcggagggggcgccggcgcggtgaatgtgaggagggagtacgacgcctaagggacagagggagttggggtagggattctagggtttttttactgggcttaattgggcctctaggtctattgggccaattcggtcatcttgggtatttcggttaaccgagcccaataaccgaaatacctgaaataaattcggtcttttgctagctaggactgtatagctacccgaatttttcggtctcggtcccggtcatttcggtttggtctaattctgcccacccctatcggcaagagccgaaatttggatccttgtcccacacttgcacggacaaccgcggtataacaatcttttgcgtcacaatcttgagaaaagtcttttcatatatactccatattcgagtgcataataaatatacataagacacaagttgcctgggttggatattggactataaataaagctggatgacttaattttcatcccctcctacttttcttcgaccggctggtcggccctagctttgccgacgtttccgtcgatgtctcgcaagagacgggaggcagcgacgggttgggatcccctggccaaccagtttagtttagttggattaatatggcaaaaatagcacagccatcgaataattagtttgtacggctgagatggattgcccgaatgcagatgagtattaataattagtttgtcaaactaaactaaatgatccagcagaaacccaaaaggtaaacatagatgctcatgttctttgtcattattgatttttaacttccgatcaaccttttttatgagaaaaatatctttctctcctaatggattcaactacagagtacatgaataatgtccggctgctcatttatttattctctacttgtcttctcaaatcattacaacaattatttgacatctcccatgatagaaatgaaatgtggagcagagtgtgggttgtaaactctgaagttgaaaccagcaatgcaatcagatattactgtcagaaaccaatatatagtgctaattgaaaaggctcagttgttttagatcaaatcatgctgctaaagacccctgcttgattgcggtcatttacttaggaaattctacaatacatacatgttacctcatagcctcgaagtgttgtttgataggttcttgcacatcctagtgtactgctccctttcagacctatcagcaacgatgtcttcagccactacccagtggccagtgatacccattgctccgaccgtaccagcacgggcgccgcgcgtggatgcgccaccactcgtcgctccgcagcttcctctgcccccaccacgccggctctgctcactggtttctggtcgccggcagccggctacccttcgccactgctgccacaggataaagaaatctaaaagaggaagtagctggaagcggtggagtgttaaatgccgattttttttttcggtttgatggaacaggattctctgaatctttctcctggttgtgggctaaggggaaaaaaaaacaagaaaacgctaggattgtgccacgtatacgatcggagcacgtggggagcaggcaagcccgtcgctgcctcccgtctcttgcgagacatcgacggaaacgtgggcaattacgatgagtttgaggaatttggacccaatgcagatgcttttccttttcatgtttttggtcgatctgaagatatttgttcgttcaagcatggtggtagtcgatccggtatataaaggagggtgctggagtataaaaaactaagcctgaaaccgcaattcagccagagccccagtgatatcgatagtacagtactgatcaaagaacagcattatgcaaatagtatcaaatatgggttccgccggcaagtgcgcgccaagccttgcaccaacacatataggacttggcatgatggggaagatcgctgtgagcccatccagcgttaggcctaggcctcgggccatggcttcccacgacgctattgctcctgagaagacgaccaactatgagccctcagtctggggggatttctttatcaactatagaccacaaccgctccaggtatggatgtgtatatataaacatatatatatagttgttatatattagtgcaacagttatacgtatatgctaattatatattgtctatgcatgcatgtacatgcaaatatttttatgcatatgttctgttaattagtactggatcaataggaaacttcattagtcaataccgcagctcatgcatgtctgactcgagattttaattttaataatatcaatatcggcccatatgtggatagcgccatatcgaggccatttagtggagtcctaagtttgccgccattattttatggcaaattttgctacatgacactgctattttgtggttttagcctacactgtccaaactcacttttggggaaaacactccataaacgtggtaatttgccagtggacaccacgtcgattaaaataataatttttggttgaagagaaaagatatcacgtgaaatgtcaaaaatgcccttgggcccacatgccagctcctccatctctattccaccacgagcgccgttgttcgcagagtggagcgccgacagcgctgggagtcgtgcggcaacggcagtggcggagtgtagcactgggagcgctgggagtcgtgcagcaacggctgtcccggttgcggcagcgacgccgacgataaccacgacgacgcgcggcgatggcggctgcggcaattgcagcgcggcggtgactacgccttcgccgcgtggggcgccggtggcggagggtggggacgacaaccagaaggcggtggcggagggtgaggacgacaacgaggaggccatggcagacggccccaagatcaagatcctggcgcgcggtggcggcagtggtggcggcggcggtggcagtggtggcggtggcggtggcgcttagtggtggcggcagttgcggcagctttgacggtgccggtggcgaggcggtggcgctgcgtgcaggtcatggtcgccgttggccatggcggctgcgtcggcatggtgacggcgaatgcagtggcgacgacgatgacgacggcacgaagacggacggtggtggcggccggccggaggagatcgagagagattggatagggaggagaggtcacgatggggatcggctggagatggaagagatggcatgtgggcccaagggtatttttgacatttcacacgatttctctccccacttcaaccaaaaattattattttaatcgacgtggtgtccacttgcaaattactacatttatggagtggtttcccccaaaagtgagtttgggcagtgtcttagggctaaaccacacaatagcagtgttctgtagcaaaatttgccttattttatactgcttatgtgcatgcgcactatacttttgctggttttatcaatccaaaccatgaatgctgcagagatcagaggaatggatgaggcagagagccaagaggctcaagatgaatgtccgcacactattctggacttccaatgatgtggttgtaaggatgaacttagtggatgcagtccaacgtctaggaattggtcacctcttcaaagatgagataaggcgcacactaaatgatatacaccaaagtgaatttactagctctagcctccatgaggttgctcttcggtttcgcttgcttagggagcacggcttatgggtatctccaggtatctattgttctatagagtggacttaaactaatgttgatatagcttattactttttatgctcattatccatttggtaatgaaatttgaattgcatttaataattgttggtcggaaaattctatacagctttagagacaaactttattttttaactatacattaatagtgataacacatgtagaatctttaagtttctccacgtttgatttttctattgtcaacgaaaaaatcataataggttaaagctaaggctgtgtttagatccaaagtttggatccaaacttcagtacttttccatcacatcaacctgtcatacacacacaacttttcagtcacatcatctctaatttcaaccaaaatccaaactttgcgctggactaaacacagcctaagaaagaaattttggttcttctctgtacaagagaaggctagtcacagacacatctcaaactaattagttacaaattaaatattttgtcttgcagttacattcaacaaattcaaaggtgacgatgggaggttcatgaatggaatagctgatgaaccaaggggtttattaagtttatacaatgcagcttacctccttgttcatgatgagccagaactcgaagaggcaatctctttttctaggtaccatctaaaatcaatgatgcagggcaataacctcaaacaccctttatctgaccaagtcaagcgtgcccttaacacaccattaccaaggacatccaaaagaacagagacattgcattatctttcggagtatggacaagaggaagggcatatgtcaattcttttggatcttgcaaaggtggaatttaaccttctgcagggggtccacttgaaggagctcaaagctatttctgagtacgtgtgcctctttgatatataccaaactaacaacaaaagtactacaacagtatatattcatatcaatcttaatacagcttcatacactcatacatatatatgtaaatgatgtactaaacaaacatgtctgataaatgtacaatatccggaagagctctttgcaatattaattagtaccagtaataatcttaaatatactatctaagcatgcacctaaaatgcttttattttaggtggtggagagaccttaatgaacatgtggagctaagttatcttagggatcgtgtggtggagagctatacatgttcacacatgttgttctatgaagaaggcttagcattcacacggataacttttaccaagataattgtactaattattatgatggatgatacatatgattcccatgctaccatccaggaatgcaggaagctaaatgaagccatacaaaggttttgtctttgtcttagtgtatgctgacataaactaatttatatatacttgcctgactaattccgatgtaaagttaacaatttgcctgccttgcagatggaatgagagtgccgtctctgtcctaccagagtacctaaaaaatttttaccataaattgttgaataattttaaggagtttgagaatcaagtggtggttagtgagaagtaccgggttgctcatgctaaaaaagaggtacaacagcgatataactatgttgggactgattccttatttgtttatttgattttcagccaacttaggttttcaaatttgactattatgtttcataaatttccatcaatatgtgatgataaaattgtcatgactttcacagcaacaaatatgatggcataattttcatactagacttttttttcagtaatgatcaacattagttgacaacatgaattctatgaagtcaagtaaaaaaatagaggtggaaagcatcagtggtgttgtggtgaagttttggttgcatcattccacccaccagattgatggctcaactcttcataccaatgaatattatgcaaaagcgggtgctcttttcaaaagaattttatgatgctagggagtggtcactggtctcggtctctttgagtgcatgttgggttgaatatttgcgggtgtgtgagtgtggtttggaaaatcaaagcaacaatattaccatgttttgttaaccttttgttatgaatttctttttcttgggcacagtttcaaatactgtcccattattttctccaggaagctgaatggtcacataataattacaagccaagttttgaagagcagttggctttatctacaaagacttcaacggtgcaactattatgtgtgtctactacggtcggccggggtgatgcaataacaaatgaagcattcatgtgggcagctagcagtactaccgtgacatcatgtgcaaagataatgcgtttcatgaatgacattgcttcatttgaggtacaatttaattaattaaacttgttcttattaaatgtaatttttcaatgcccagaacaacattgttcctgagtggccacagtatttgttcaagctcatcattatagagaaacggtaaattttcacacaagtaaaagaaaaacatggtgctcaacatatgactatatgctactatccatgattcccttaacaactactctataacaatgtactttataactttttacattgttaaattatgggtggaaggtgagaaattataatttatctttgacattcatacagcgtgggaagaacaaaggggaaattgcgagcaccgttgagtgctacatgaatgagcacaacatcataagtgaggtggcctttgccaaactcgattcactggtagaagatgaatggagaaccatcaaccaagcccgttgtgaacatcatcagctactcccggtagtgcaacgagttgtgaacttggctatttgtataatgttcttttatgacaagagaaaggatgcgtacacattctccacacatctacaagagattgttaggaatcttttcatcaatcccattaccatgtagttccccttttagactgtattgtcaaatattatctatttttttttctttttacttttggagggatagatgaaacaaaatctatattgtatgattttttcaaattaacttgcctcccactaattaattatatttcttccatgccatgtcacccttcttatttgtagcattccgttgattgatcaattacgcaaattgtgtttttttctctcatcttatatcatcccaattattttagcctttatatgattgatatgtgattcattgcctctcactacaagaattttgggcttctgtgacgataacagcatgtttcctgtcactacccgcctgctgtgacgaaatggctgtcatcacagaaggtgggtcactaaccagcttctgtgaccaccagaggacatcgtcattgaaatagtgatgatagttctcctgtcactgatgaatgacgagacaaattcgtcataacaaattgaaccaactaacgccacgtgtatgatgacatgtgatgttgcagatgacaaggcgagtgatgtggtagatgacgtggcaattcacattcggcccatatagcatgggcttttttattttcaattacaattggcccaaatattttttgacctagctacaaatttgcttttacatttttttcattatagtccaaagtacaattcaagcccatattatgggccagcccaattaaaaaagcaatcacagaatataaaccacaaccatttgcataatcatattataatcacattccagccataattaattttccagcccatacaaaagcaagttccagaatacagtttccaacatgttccatacaaaagcacgaaacatgaatacaaaatattccatccaccatccaactacacaagtcccagccgactatgaagttcctacaggtagtgtcaagttcctgcaccaaaaaaattccacctagcagccactactaagttttggcgtgcatcttgccagcagccaggaaaaaaattccaccaagcagccactgcactttcggcctgcatcctaccagcagccaacaactagtgccaaaaaatcctgtgttctagcaaccaacgcaaaaaaaactccagccaccaaaagtgccaacccgcaagcaaccagcagctagcaccaagttctagcagccacatacaccatacaatagcagccacatacaccaccaagttctgaagtaccaaaagcgatcacagcctcgaagttcaactacactaacacgagccatcaaattccaagctcagccacctcattcctgccatcaaaaggtgcatgttttcagttgatggtgaataaaaagtccattttgtttggacttggaggcaaacaaatgaacaaatagtgtttagagtaataatccagcaggtaaattgagtaataacaatatattgatatggctcttttccgtaaagtccaaacaaatggctcttttctagtcacaactaaatccaaacaaatggctcttttgcagctaataatccagaaaaaaatagagtatctagatcgatcaatcaaatggctcttttccagtcacaactaaacaatatctagtttcatagtaacaacaactataaacaatccagcaagtaaattgaaataggcagagtaataggcaattttgatacacaccatgaacaaaaaattcagccaccaatgaaacagtacaataggcttgatatggatgcaaaagcacaagagacaagttaaagctgtgcacctgagcatacaactagcttagggaggactgatcagaccctgtccaaatgctatcatttgtcgaaggaggccctgatgatgaagtgagggtttcccgggcatgcatatcctcctagcaatgaaagcaaggtttcagttttgcattattatataaataaaggttcattgcataaggtacttaataaaagaaggaaagaagatgtaatagttcagtacttactatagctttctttacaggttcactaaaacctttagtttgctgcaatgcaactcattgaagagatcaattacagtgggctcactgtcaattgcagtgcccatgctcttcccccttggctccacttgtctactgccaatgagggtgcctaacataaaacatttacaagtgtcaataaaaagatcctgcacttgatatgaaggcataacacatgtaaggacaaaagaaccaagaatccaagttacttgccttgttcagtagagctcaatcccattggctccagttctgtacttaaagtgaggtcgctcaatcccattgccgccacccaatatggccacccagggcaaaggccccatctgcggcgcaagaaggaagggttgaggatgatggccagctgcggcgcgccctggttagggctccacccgccgatgctcaccagtgccaccggatcttgcagtcccgaggccctcattcctgtagtcacattctgcaagacagatgaagaaaggatcagaagaaaagatcacaacattgcattagagttgcagaagcttctaactagtaactgtttttgctaggcaaatctgtgagttgagtaggattttaaggaacatatactctttgagcaagtttatggccaatttagtaaaaatctcacatcttattaacattcttaaggggatatttttgtgacagacattatattggattatagaaggaatcaaagagatgctagccatgacctttcttctcaggaggtgatgcttcccttttaccagtgacaatttctactttatgaactacaaactgaggtggagatgcagcagtagcttcccttcctacttcaactaccaactgcactaaaggatccaagctagaaaaaatttcttccttggagatatcatgatctatatacttggattgaactgagttcaaatcaatgctaccacacctaacattaacaaaaaagaaggtgtttgtttttcaagaagaatgcatgtggtaagtttggtacagagtagagatcaaaacagtaaacagcagctgtgatcggttgggcaggcataaacatcttcctaattataattagttaaccatacatttttgaaacacggtttctttctagaccaagtcaactctgacccaaactaactctttggattattttagttattaaatgtagaaaagctatattcaataggtagatgcctccctactttcccaatgaacattgttaaacccacaagtcaaacatggatcacccatattttgttaaagaaactatgcaatttaccacgcttgacctaagaagctagaccaatccttgataatactaacatgcctaaccatgctcctaatgcttaccactccaaattcaagtacgaaagctattctgttatgtaacctaaaaataatttcgaacttgagaatcatcgatatcgacactagaatacaagaagagagaagcttataaattttaagtactaattgtatgactgtcaaaaacaatcagaactatgtactgctctaattttcacaaaacaatcagaactaattactgctctaattttcacaaaggaaggatcaataggagaatggaaaaaaaatatttgctaatcactactccatttcaagactgattcacacaaaaaactgtctacgagagaggttgtgacctgcaaaactgaatcctctactcgccgtctttatctcggctacaaatcgctccagcagcagcagcaatcaagcaccaacagaataccccaataaaccaccagatccgcgaaagccagcatctcttctaccgatttcccaactcgacaagggagttgttaccctcatccagatcccgacgcgtcgctggcctgctaccctgcacccctgccccgcgccgcgtgcccccgcggcccgcgccacctgcccgccttgcgattgcaagtcgccagccgccgctggtcattgtcatcgtcgtcgtcgctgcagcactgtagccgtcgttgcagccactgtagccgtcatcgccacagccgccgccgccgtagccgctcgctccctcctacctaagcctgccgccgccgctccgtagggcggaggtgggtggatctgcgtgttgccggcgctcccactcacgccaggccgctcccgaggacggaggccattggattcatgcgccgccgtcgctcccgaggacgggaggcggcgaatccgtgtgccaccgtccttccctggctaggggagcgacgtggggaaaggcgaagatggatggaggaggagagggatgttggcggtgagggaatggatggtggcggcggcggcatatggatttagtttgggctaaggtttgggggagaggttatatgggtaggaagcaatccaacgggagtttaccaaactgtccctggtatgtcaacagtagttatgaaattgtatgaacaaaatggacatttcaccttaaatttatgagaactttaaatttaattttaggctgatttttgtgtttcaaatgcaaaaatcataaacaacaaaattgtaaaactcatcgagatctacaactactgtattggtcctttttacaaataagtttatttgaacaattcaaattttgaattttcaaaatttgataacgtcaaacaaaaattgaggttaataaatgatttaaaatggaaaagtcaccaaaaccaaagttgtagaactcattgagatgcaaaatttttattttggtcatttctccatctgactctaattaaataatttgaaatttgaaattcaaactttgagaacttcaaatagaattttttattagtgaacgacttcaactgaaaaagtcatcaacaacaaagtagtataattcatctagatctacaatttttattttggtcatttgttcatccgataaagtgattttaatattgttcacaaaatttacatatctctcttatagttttataaaccatataagagatatgtaaattttgtgaataatgtttttatcactttgtcggatgaagaaatgaccaaaataaaagttatagatattgattagttatacaactttgttgttgatgactttttcaattgaaatcattcagtatttgaaaatgttgtttgaagttgtcataatttgaaattcaaattcaaattattgaacacaaagtcatatagcaaaatgaccaaagtaaaaattatagatattaataagttatacaactttgttgttgatgactttttcattcgaaatgtcgggtcccaaaactaatgattcggaaaccgacatgtttagactgtatcaagccctggatcagtagattgatacaggttcaacaatctggctcttcattgcatacatttgaacagggctctagaggagttgttattacaaaatatatgggtatttacaaacttgtggctaactaatacagcagaagctatagaatgactcaatcctaatgttttgctatagacttaaaccatctaactaatctagacttgagaactaggttgaaatgaaactaacttatatgattgaactctcggcttcggcaagaactccaaattaattctgaaagaagggggttaaagcaagggtgagtacaacgtactcagcaagttattatattcaagtatgaatgtatgaaataatagtatttgagtagagctagatctaattgcagaaagctgagaaagtagaaggagaaagtctataatgttttgaaatgcaacaatatttaataaaatctggagttatatttctaaccaagatgccatagtgagtcccgatgctcaatatccgtgagcatggctattcgaatagtttcagagatactcatactgtagtagatgtacactttacccgcaatccatgacatgctaatattcatcagcttagtcatggcaaagcttttcagttcctaacattagtggtacctgttccatgaactatagtcctcatacgctctgaacgtaacgttatcagcagcgagaggagttctggcgttcccgaggtttttagagagaactggttgagagacccccgtcatcccaaccaggttttcacaatacacacacagcgcgcaataatcaatatatttacctacgcctcggtaaatattataatcgccctgctcggcgtaaatttgcctcctgcgcgaggacttaaagaagaaccactgtacaggggtaccacctttgctagataacatactttgctaagtctgtccccattctagaagttgcggtcgtactcgctcgttcttcacatgtacttggcaatcttatgtcggttggaacagtactagccacccggaaatcaaccatttctaccgtactgttccaatctaagttcattatattttatgcaatctaactaggcatggctaagcaaaatctagcatatatatctggtttgctatgtgttcaagttatgcatttaaaatcatgaatggctaatgcatggaataatagggatatagaatataggataataatgctcaaaggggaggaataataacttgccttgctccaacgcaaacaaatccgagataggcaacctgattatctgatcctcgaaacatcacaggttgccatccaaaagataatagactctactaagaaagacgaagaactaaattcaataaaagccataaaataacaagaaaacgataaatggttaggagggctagggtttggttgtgtgctagtcgatgctagagcataacgactaggtttggtatcttctctagccggtgtcaacaggcagcataacggctagagggataggaggtttgtgtgggtttagtggggcggaagtgttactccgacaaccgtgagtggcggtggagcggctaggatcacacagagcccgagagctaactgtgcggcgtgcaatggaggtcgaggggataatgaagctccgaccgttgtacgcatcaaggcgtggggtgccaggagcagcacttcgaccttgggtttggcctttgccaggctttataaccaacagttcgacgtcggggatagaaaaccacgaacgtccccatggaaggcataaagttccaaccggcggctttttagtggctaaaggggtaatttgggacaaaagaaaatatttgaaaaggcaaatataaattcaaacgatatttgaataaattcaaataaaattataaaatagcaaatttggtgtcaaaagatagggtttaagtttcactggaatttgatctacggtttaggagatatgagcttctaaagattgggttttgaattaaatctagaaaatacgaaaatgtactgttcatggacccagacatgtacctgctcttttccttttctctctctctccttcttctcgtcttcttcttccttcagccgatagaagggagagggagggcggttggggcgacggcgctccggtggctgactggctgcgacgtcggcgtccacgcgtgttcccgagcacgacgcacctggggagggcggtggctggcggagagagtgaaggagttggccggaacggcgacgacaggagctcgaccgtggcaacaaaaggagtggcggtggtggcttgatgtggtggctaaaagagaggggaaaggggaaaaatgggttcacctcgtcgaggcaaacacgatggcgcaagggcttggcttgtggagatgcggaagaggagatcgactgatggtggcagtggccggtcaaggcaggagagagagaagagagcttcaagctctgatgtggggagaagagggcgatctcgccggctatttataggcggcggacgtcggttcacgaaggtcggttcgccggtggtagatgaagaaggcacggcgacggtggcgtgaggaagagggacacggcgccggccctgtacgttgattggttgatgatggcggttcgtctgctgttgacgtcagcgggatgatgtgtagttgacgtcgggcggcggttccttcgcgtcgacggaaagaagacagcggtggcagagagtttgtgggcggtgttgagaggaccgaggacgacggcgcacaaatggcgcacggcggcggcgactgtggcgagggaaaagtcggctctgagagggggaggctgggccgacttgggccggtctgagaaatttggcccaaaagcgaatagaagttatttttcaattttggaagatatttgaagaaggaagtttgaatccaaattaatatttggaaggaaatttaggtggctaacttttgaaatgaatctatttttggagataactttcaaaagagatatttcctaaatatttgagtgcaataatgtggtctaaatattaaagcactcaaatgggagggaattaatataattcctcaaaatatttttgggaatgaggcaggaaaacaaggagggaaataaataggatttttagccccaaaatatatggtatggattttagagaagtatttgaggctaataggaatttggattcgtggaagagaaggataaaatatatttttttagcacaagagcaattattcacaatatctgtaataatattattcttgtgccgaagaggaaatcaagctataggaattaaattggcggctagattaaaaggaagaatttggatacttgagatttcgaaagggaactaaggataggttaacaattaactccaacaaatttggaattgcttcggtttaggttcaaggatagtgttggaggatttcttggaccatgattcataaaagtaaaaagattttcaaactaaatttgaataaaaggaattttttcaaaagaaggtttttaaattaaaacccaaaatcaagaaacaccttaatttaactaaatatatttttaaaggaaaggcacaaaagaaattaaataccagaaagagattttatgcaggttaattttaggaggtctctttaattataatatcctaggtttaggaggttaataaaaacataagaaccggtatgatgcataattagaaaatagctaattttttagtatgttacacgaaatcattagtatttgaaaatactatttgaaattgtcataatttaaaattcaaattcaaattattgaaacaaagtcatattgaaaaatgaccaaaacaaaagttatagatcttaataagttatacaactttgttgttgataattttttcatttgaattcatttactacccgaaaagttatttgatttgagaggagggaagtaaaatggacttattggcgagggaggagcaaaagggcttggccggtggcccaaagagggaggaggagggagagagaggctgtgggctaagggagggagagagtaatacttgggccgaaaaaggcccaaggacagcgagaggaattttaatttgtttttcatttattttaataggttaaataaactttgtggtattaaaattagttattgagctccgaaaattcacggaaaattttaaagaataatttagaccaacttatagccattttagtttgtttttttaagttttttcattcaatcataaaatgaaacaccataattctgtttttttattcataaaatgagactagacatgacttcaatcctaaaatcctaaaatgagagactagaattgatgtagacaagaagagttcacctaggacaaacgatttatggtctagtagcaatgtagtataacaagattttttttgtttttaaaaaatataatagttctatattttatgacgatccattattgtcatcgtgctatcgtcacagagcccatgcagagtatactgtgacgatgattatgacagatacacggtttgatcataaacagctgtcatcctgtgaacagtcgtcataaacagcctctgtttatgacagatatgtgttccgtcatcaggtaatcgtcatagaagcccagatttgttgtagcatgaagccacaccttctcatttatttcacacatctaaatggttgacgatatgtgtgaattgaacaaagcatatggagtgaaactacaaatcttatataccgattgcaaggttaaaaccctagatgttaattgggccacgtgtagggatgaaaacggatcggatacggacggaaactagctctaccatattcattttcatattttttttcggaatcggaatcggaatcggaaaccccggatacgaaaacggaatcgaatattgtcgaatacagatacggagcgaatacgaaacagaacgaatacggtgacgaatattaatcggaacataaaaaccactcaaactaagcatcacaaatcaacaatgaaatataacttgttattttttctaatagaacatatcaacatttccaaattttagtgttaataattttgctatatccaattttgtggttgagggtgacggcgtctgcaaaaatcgacctttattttctcatgcggctccttaagactagtttatcgtactcatatgaactccaaactggatgattctttttcctaaatgtttgtaaaatcatgctctattgtgttattgtgttcttactgctattattttggccatatttttcttgtgactttgttttatcaattaaaattttgaatttcaaaaaaatgacaacttcaaataatattttgaagcggtaaataatttcagctgaaaaagtcatgaacttaaaagttgtagaactcatcaagagctacaacttttattttggtcatttcttcatctaataaagcaatagtaacattgttcacaaaatttacatatctctcttataacttatgaaaccatatgtgagatatgtaaattttgtaaacaatgttactttcgctttgtcggatgaagaaatgaccaaaataaaagttatagatcttgataagttatacaactttgttattgatgactttttcagttgaaatcatttagtatttgaaaatgttgtttgaaggtgtcatattttgaaattcaaattcaaactatttaagcaaagtcacatagaaaaatgacccaaacaaaagttgttgatcttgatgcgttttacaactttgttgttgacagtttttttcatttgaaaacatttactacccaaaaaaatatttcaatttcatatattttaaaattcaaattttatatagttcaataaaactcggatggaaaaattaccaaaataaaaatggtagatgtcaatgagttctacaactttgtttttgataactttttcatatgagttcatttactatatgataaaattcgattcaaagtttttcattggattaaagaaggtgggtcccaactgtaagtgtcctcctcttccttttctttcccttcttctcttcctctttctctctctttcttatctccttctctgctctcttctcccctttcttctcgattctccatgccagaggggaaggggcgggcatggcacacggcggggtggcggcctggcaaggggcgcggcggcagggtggcggcctagcacggcggggtgccggcctggcgcggcgggagtggcacaacgcggcgggcgagacggccggcgccctccccctcccagatccagcggcggcgggctagggaggggccggtcgtggccgggagcggcagcggcggcgggcgggagctgcgcggcgcggcgtgagcggcatggcagcggcgggggatctccggaggctctgacaacaacgatgggaggggcggctctggtggcggcggcggcgagcaatggcgacggcgacaacgaggacaaggacggctgttgaggcttcgagcgacgtcgacagcgacgaggatggcgtcgccggcggtgagctagggtttcggcatttttgagatttttatttttttttcgatttttaatgtggctgatttggatttggctgttgattttgattcggatatccggcaaaaaaagtccggatagtttccaaccgcaaccgaatccgagttctgacggataccatcgctactgtattcgaatccgtttccaagaaaaactatccgaattcgtatccgaatccgaaaatatccgaaaaaaatccgaccgaagcgatccgtatccgaaaacacggtcggaattcggaaattatccgtacatccctagccacgtggcaacaaacgtcgaactcagcccatcttgccgaggaagaggcccaggcacgacccatttgttgggccaagccgacacaggtccaacaacagtcgaggggtgtcatgcggtccaggccaaaaatctctgttctatgggccggaccattgggctacgggtcttttggccaactatacaccacaggcagccgagtacgagcgaaggggagacaaggtcatactgtcgcagcaccatccctctgctgcaacagccatcgcaagtgttccatatcggccatgccagattgtcgccgctcaagtcgtctttgactcctcgtcgacgccccgttagatctacccataggcgccgctctatgtgccgatgctgcatcgtcgtttccatcctgactcggtcgccgtcgttgcaaccgctcctccgaacttctattactagtatgccactccaacggttttcaccacagcccatgggatgccctaccagatccaatgcctgggcgttgccctctacacccttggtagtggcaaaaatgtcatgcgccacaactgcaccagccagcccagctgccgcttgctaacgccaagtctgaccgcatctaccaccactgtcctgagccgtggagatgggattgaggccctctttggatggggtaaaaaatctttttattccatgtcatatgggagtattaaacatagactaattataaaactcatttcataactttggactaattcgcgagacgaatctattgagcctaattaatccatgattagcctatatgatgctacagtaatatttgctaattatggattaattaggcttaaaaaattgtctcgcgaattagcacttatttatgcaattagttttattatcaatttatgtttaatactccaaattagtgtccaaacatccaatgtgacatggactaaattttagtccctggatccaaacaccaccagaaagagcccatcaccaccgtctttgcactcacttggaacttcggcagcggcaaggtcaaggaaggcaggtgtgcgtcgcttcagctagattgagatggtgcgcaccaaaacataacccatacatagggggtgttttagatacagggggtaaagttttggcgtgtcacatcaggtattatgtagggtgtcgtatggagtgttcgggcactaaaaaaataattacagaatccgtcagtaaaccgtgagacaaatttattaagcctaattaatccgtcattagcaaatatttattgtagtactacattgtcaaatcatggagcaattaggcttaaaagattcgtctcgcaaattagtcgcaatctatgtaattagttatttttagcatatatttaatactttatgtaggtattcaaatgttcgatgtgacaggatgtaaagtattgggatgggatctaaacagggtcgtacttgggagttttatgatacactaggaaggtagcccgcgcgatgcacgggcatatgtattagtttgttaaaaaccggtctaacaaattaattttaacttaaaagtaagatgtttttcattcgactttttctttcagtgagccgagtcaaatgatgtggtgtttttttaatttgagttagaatcgcgcgtgctctctctcatgaacagaacatatacgtggagtatgtgtggctgaatcatggctggcatcattaagcaatggtggacggaatcatcttgaagtttttaagtaggttaagattaagattagatctaatgattgaaaatattgaaaaggcagtggttagattttttttaatataatttctgtgaattttacacatgatgataattacacgtgattataattacatgttggtttaggggcattggtatgattgccacgtgatgattttaggggcatttaaaggatctaaatttaatatttgtttaatatggggcttaaaaatttgatcttaaacatttatattagaagtttgagctatgtatatggatctcgaattatgtatttaattataaatgacacaataattcaaaaaaataagaaaaaatgtaacttgatatttatgatcatttagaaatctgattattagtttttgatagattgagtgttaacttaaaaagtagcaattagcttaagaaataggagagaagaggagagttaggagggtggagggagaactcaactacgacgtaggtgcgcacatatggaggtggcggtgaggatgcatgtattagattttctttttagatgaagatctaatggttaagattaataggtccatcaatttttaaaagaataatcgctaaacatttattagaatttttacgatttttttattaatctattagctagaaaattaaaagaaggaaggaaggaaagaaggagggatgtacgtaccgtgggaggagccccgggaggaaggaggcagtggagatgggttttggatttttttaaagatagatctaatggtgtataatattaggtccatcgtattaagtgaaaatcgagggcaagatgttttttttcctcataatttttatgatttctctaatttattaaagcgtcatgtgaccagttaggagtgtttataggaagtttaatgggctttagctaaataataggaaggggaagaggagaggagaaccctgagcttttcggagagggaagggtcgatcgatttaaataaaaccgatgatcatatgcatttttcccctaaaaaataggttttttttaaaaaaaaaattatatgtgaaatgtgaagacatagaggtgttgtaatggacacctcatagatgatgatacgatatatgttgtcaatttttatataacgtttcattgctgcttagttatcacggaaaggatatggattcatgtctaaaaatatatttatcatatatcaagaaaggcctatatggatcaaactaaaaactgaatatatttaaaaatataatcatttagctatctattatttatatataatcatttagactatctgacgattggccaccagctatgcctgtaacaaaggaactcacatcccgtaactatatctcaaacagctttttttttacccattagatatgagataattgcagatgacccatcggatgcctatttctatataaaaacatagtaaatagagtgaatatatgacttagctcattgattaatttaattaaaaaatacaatcattcaagcgtattgtaaaatcaatgtatatattgtccgtaaaaaaatattagtgcttgaacgttgcacagacagctcgatgctccatgcaaggaaagatataaccatttacaataataagttatagtgcatatctcataataactaccttaattagaaaaagaagaaaaaataaagagaaaatgaggggagagggattttattttgatatgatgttttaaattaccggtgactattctaaatgaaaatcaacagtttgattttttttttctcataatttctataacttcttttttttccctttactttatcgcttttatcacataagtctgtgcttatgtttttcttctcgtccgatgaacagtaggtaattaagcttcatcgtttttctttcaaatgtacataacgtactgaatacttttttttttcccttttccggcccacaggaggaaatcattaccttttttaaataatacattcaatctaatggtttaaaatacagggtccaccaatttaagtgaaaatcgatgatgagattaaacagtgcaatgtaaacagtgcaatgtggcgatctagagatgtttgtaggagcgtcacgtgacggcttcagagcgtttgtagggagtttattaaacttttagtatataatagatagatagatatgccgtaaaacctagggttctctaaaatccactcaataagacgtgcattagccaaatgtttgtgtccaaatctcactaagaactgaatacaaaactaccagcgcaagaatagatttcaaatcaaaaaattggattcaaaatttatgcagtaaattaataagcgaacgactagccgattactagtttttactggtttctttatagttgaaagcaccaagctatatatctcaaaggggaatgagtcgcatgatccaaattccaaaatagcaaggatcgttgtatgcaactggttaaaaaaacacaccgctggatactattgaaccaatcaggaggctcacatgatctacgagagaatccatttgaagcaatgaagaggcttaccagaacacccctgttatttttaactctatgtttggttaattaatcaggtgatcaaataaagaataaaaatgaagctttgaccttgaattcatacgaattcttttcctggacgtgcacatacgaacgataagtcctacatatatatttactgcgcattgagattaaaaatatatctatatttacatgtattttctaatgttctcaaattaccctatgtaggataccaagtgtttgaaatttatccaaatattcataaagtactatttgctcccatcaatctcatatgtcactacttccaattacatctcaactccaaccaaccctgactaaacgagtaatataagtctttttcttttctcaaccttaatctttattaacaacttataaaaatccttatatttaaggacgaaatacagttctcacataaaaccggccccaaaattatcaacttcaatcgtccactcgtatacgtagaaccaagtcgctagtctttttctggaaatgtaaaacaatactgttctctcacaaggtccaaccgacctttcttaaatgaagggcccagatttgcgctaattcacagatggctcctctgcagcagcaagaactagagctggggtgtgtttagtccacgctaaaattaaaaatttggttgaaattaaaactatgtgacggaaaagttagaagtttatgtgtgtaggaaagtttttgatgtgatggaaaagttggaattttgaagaaaaattttagaactaaactcggccctaatgcagagtttccgcttctactaccttcaacttcaagtcattaacaaatccacaactgggccacttaagcagtaatttaaatcctcatcccgacatatgattgatttcccaccggccaaaaccactgcacgcgccgatgcaatcagaatcaatttctattaacattgacctctcgcagctcgcgcatgctcatctcgtcaactaatgatgaatgaatcgtgaattctctctctctataaatggctactaattcgatcatcccaaggcaataatccacagacagcaaaggatgatgcaagccaagaagccaagatcaccattgatgatgctcatcgccaagaagccgctgctgctgcttcttcttctgctcgttctcctggtgttggagccaagatcatcagcagaagctaacctcgtcggcgtcaatggcggagagacggatgagaggcggcttgagagcttggtttacgacgagctgcccttctcccagctcggcttgggattccctaccaccgtcgtcgccggtggctccgaggtacgttaattacgtacttaattagcgcaaattcaattgctgtaagaaagaaaaatcactcaaatgagaggttaaatttttttttggggaaaatgagaggttaaattaggttccaattgactgaaaatgcagcaaagttttttttaattgttcgagcaaagggatttcttcgggtttttgtgctcttagatgacattggtgagcgcgcccatgcacgacacaatggcatgttcagggagtttccccgcacgcactacgatttctttaggaatctttcgcatctcaaataatctagatttttacatggattctgaagattgaaaacctaacattttgagattcttattggatagttattcgataggataatagttgcttcgcagaatctcaagcaatccaaatgggacctatatatacatacatataacggctcaattttccgttatacaaatacgtttgtgattaaaaaaattagtttaaaccaaaatgggctcgcaagttgtcttttgagaaatttcaaaccctgtttgtcgctaccaaactctaagggctctggtgatctgttgcgcgaatatcatcctaaaattttgccgaatatttgacacagaatgatgtggaggaagttgtgcaagcatggtacatggacgacgacgacaacgcggaggaagaccagaggcttcctcatcgccgccagcctgatgatcttcttcctctcgccaaattgcttggtatatatatttatctacatatttatcgagcttttttttaaaaaaggttaattttgtttagcctcgtaagcttgttaattaatttctttccagtggcgccgatatccatgcgatgtttaccactagtgtgtatgtatgtgtgtacacacaaagatgacgagtttttaattagtttttttgcaatttgcagacctcggactcgttgcaatgcgattagatgcagataaccatgagcacgatgagaaccttaagataatgcgtgaacagagaggctacttgcacatggttagtcttcttgctattaggtcaatctttacttttaaaaaaagatgcatatgcatgcttaaattagtttttgtttctgctttcaaaatatacttgctattaggtcaatatttacttaaaaaaagatgcatgcatgactaaattaggttttcttttttgtctgctttcaaaatatactcctcatatagacataaatattagatgtttacgataggaactggtcaaactattgaaactgttcatctattttattttaaataagtttatcaaatctacttctgctccagaatataaaaatttttagagtttgatacggttattaagaaaataggtagaattatatggggagaggttgtgattggttgagaagtggaggtatgtggaaaaaatgaatggtggagggttgtaattggttgggagagaatattgatgaagaaatagttatatcttagattaaattctaaatgctagaaattgttatattttaggacggatggagtaataagtttatggtggtattgtgatagcccttttcaagataaatatatacatgtcattttttttgttactaagtattagagaagttggtggtgtaacttttaaaatttagatcaaatcttgttgtaaatgtcaaatatttatgagagggagtagaagctttgaaatgattaccttgttgttacatatctatactatctatatagttgataccaactaactcctaaaacttaacatctaaatgtgcaacattatcagccactagcaattactccctctattttttaatatataatgccaatgatttttttaaatacgtttgatcatccatcttattcaataattgtatgtaattatgatttattctattgtgacatgatttataaccgaatgttctttaagtatgacttaaaatagttttatatttgtacaaaaattttgaataagatgaatggtaaaacgttgatttttcacatattaaaaaatggagatattattatctagagtattttaaataccatgcaagcatggcatcttatttataattttgttgtatttttagaacttgatatacaagcaatgtcaaatcattattttcatattatttaaatgtatacatctatcatttatataatgtataacatgcattcatctacatatcacatagcaaatcacggggtatcaactagtatatactaataagtaaatccacgtcctatcacttaattttttggcatatccatatgccattcattattatttatatgaaagaaaaataataataatgtggtttacctctttcggaaggcatcatagggggtgtttagatccaagggtgtaaagttttggcgtgtcatatcgggtattatatagggtatcgtatggggtgttcgggcactaataaaaaactaattacataatccatcagtaaaccacgagacaaatttattaagcctaattaatccatcattaacaaatgtttactgtagcaccacattgtcaaatcatggagcaattaggcttaaaagatttgtctcgcaaattagtcgcaatctgtgcaattagttttttagcctatatttaatacttcatgcaggtgtttaaacgtttgatatgacaggtgtaaaattttgggtgggatctaaacacccacatagtttctctttgcagcaaagctgtgattaatttgggccagctctagttagatctcaatggccatggattgtaatcctacttatggctaataatgatcaatcgattatccaatctaaaaaatcgaacttaagtatatgcattttttgcattttcgtaggacatcgttgaattgaccccagagaaaatgccaaattatgaggtgatgatcaagagattcttcgaagaacatctccacacagatgaagaagttcgctattgtcttgatggtagtggtatgtgcgaacaatttactttaccttgattttttgttataacgaaacctttcatctcaaaaaacaaagaaattttttatttcactatattgctgattttgaattttggaattaatgaaggttacttcgatgtgagagatgagaatgacaagtgggtccgggtttcagtgaggaaaggggcactcatcgttgtgccagccggcatctatcaccgcttcacacttgataccaacaactacataaaggtaattaaagggcatagaattttcaattaatggaaccaagaaaatgtaatctgattggtttctggtttatttctacaagattttatcagatttaacttttgaaggtagttgtgctaactgcatcacattagctccgaaaatagccaaagcgatgacaaatatctctactattggattcataaagagcgaatatatagttggtcagcaaattccccttggtccttaacaacaattttatcctaaccatgatcatgacatggtaccctttcaaatatttgtagtcattttcttttgtttctgagtgggtatcaaaagaattccttgcagttcagtaatcctttcgtgattaattaactgacagatggggcctgggggcctcttgtttgggtttttacagaccatgcgtttattttcaggtgggccagattggacggcttacaatcgtcctcatgatcatctgcctgaaaggtactctatttcactatgcagggataaatttcggggttaatctaagctaattaacctgttccctccctctgttttttttttcttcaggaagaagtatctagaagcgctgcataacaggaccccgagatttggacaactgcatcgaattcgctcaaaaatggagtaatttttattttgaaaatagcattaatatatacccatctttcctcatcattaataaattttagattttctgcatccgtcaactgatgttgcgaagtgattaagatggtggtgttagatagggtgcaatgggccaatgtttgatctcttgatcaagcaacgacaagatatatatggatcatgtatgtatttttttttaaaaaaaatgtatcatgtatgtagaacaattgctccaatgcaagtgtttgcactactgtagacctcctcatgtataacatttcaaaacaatctatctataatgggtatgtcaactgatacacattccattgatcaaaggaacccttatctatatatagcggctcagaattacgaacccttagatttcaggatttgtcaattgacgttatacacagatatactcttgttagtaacggctatacaatggcctattcatacctgccgttatagatgagaggtaataggtgacgtcgaaacctcatctataacggctaggtattagcaaccgttacagattattataactgatacccttaaaaaaatacaagtacttgagcatacctgccacgattgtaatggccatcacggcaccatcgcccttgttccactaccacttgtcactagatttgtaccctctaattaagcatagagcggcggattcacatattccctccgtttcacaatgtaagtcattctagcattttccacattcatatatctatctagattcattaacataaatatgaatgtggaaaatgctagaatgaatatatctatcgagatttattaacatcaatataaatgtagaaaatgctagaatgacttacattgtgaaacggaggaagtagttctt

SEQ ID NO: 5239 - DNA, 39405 bp, Oryza sativa
agaactccagaggactaacaactgaaaacttaaaggagctcagcctattcctgcctgcgggtggaaccttcttgtttcctcaagcagtgacgaggtcacaaaactccaagcctagggcgccctttgctctcactagtatcttctagtgctgcaaaagggaaatcacacgatagattatcgtgagcggcgacccaatcaatttatcacgaaaaatcatgtcattcctagttagccagagttgccagctcacagctgccaaaaacatccaactcagagtattatgagaattgtcattaggtttcaacattgatgcaaaaaagtgatcaaaggatgaaggaacaaagttccagctaaacccatctctagcaaaacaccatataaaagatgccatgggacaagtaaaaatgacatgttgagcattttcagtgacaccacaaagctcacaagcctctaaaccttcccagtttttttgtcacaattgttcagtggtttggatccgatctttcattgctagctagagaaagtgtttttgcttaagaggaatcggtagtctccacagcatattcattttggggtcaagtatacctctaaaatttaacaactgatataacgatttcgaggtatagactccattctttccatgaacccatttgagcacatcagcctcgtcggtgcaagcaatctcttgtgttagttcagataactccactcagtcagctctacattaccaaaaagtcttctgaaagtaaggcattctaacccctcttgagccacctctttcacaattattctttgttggttgcaaatttcatagagccccaggaacctaattctcggggggcaattacctatccaaacgtcatcccagaacaagatatggtccccttttcctagagcccattctcccccaagaacaaaccactttatgatatttagtaatcctctccagaattgggagatccctacctctgaaccatagaaaaagcctctatctctcatatacttgtttcttaaaagatcaagacacaaactcttttcttttgattcaagtttaaagatccatttggccaggagggctatattgaaagctctagtttcagtgaaacccaggccaccaaactctttagggaaagctaaattcctccatcttatcatgtgatactttcttttagaacttaggcctgcccaatagaatttgcctctaattgagtccattttctggtgaatcccttcaggcagtaaatataagcccattgcataagtagggatagaagagagacaagagttgataagaacagctctaccactatagtacaaggaacatgttttccaaaaaccgagtttcttgaccaacttctgtggtaagaagtctaggtctgcattcagcaacttgtttgggctaataggaagtccaaggtacatcataggaaactctcctaggggacagttaagcatatttgcaacactctctctgataatttattttcatcccagaaagctcttcaaaacaataaaggaggaactttgttatcacaatctctctgtcaatgaaaggaataaagatcacagtgtcgtatgcatattgcaggtgtgttaggccttcagggatgagatggggaatgagcccaaacagaaggttagcagcttttgcatccttaaagatcttcgcaagggcatcacttactaaattaaacagcaggggagagaggggtcaccctgtctaagccctctgtaagtccggaagaattcacttctttcaccattgatattaacacacactcgtcgtcgctctcttcatcatcttcagcgccatcggcttcatctgctagcaaaagttagggatttgttccatctcgtcttttttaagtttttttatgtttacttttggactttttgtctatgtgcccacaagcagaagctggagatataatacatttttatcattttaaaaaaatcagcttcatctgctgctcagcagctgctgtgctggaggaccaccacacggtggttagcagcagtgaggaaagcccggagggtgcaccctgtcgacgacaccgccgccgacgccgcgccgttgccgcctgcctgatagaactgccgccctgcctgctaacgtgatttcttcatcgacgcgtgtgtatattttacagtgtgctgaacagaaaaggggaaaaaaaggagttatatatattccctccgttttaggttacaagacggtttgacttcagtcaaactactttaagtttaaccaagtttataaaaaaataataatattttttatcaaagataaatttattatgaaaatatattcaattattgatttgatgaaactaatttagtattataaatattacaatatttgtccataaacttagttaaatttaaaatagtttgactttgacgaaaatcaaaacgtcttataaacctgaaacggagggagtatatgcttagtgctggggtgtgtgtttaagttctgtaataagtgtgtacggccgtgtttagtttgtgtgccaaaatttttataagtatacggacgcacatttgaagtattaaacgtagactaatgacaaaacaaattacagattccacctgtaaactgcgagacaaatttattaagcctaattaatccatcattagcaaatgttttctatagcatcacattgtcaaatcatggcgtaattatgctcaaaagattcgtcacgcaatttacatgcaaattgtgcaattggtttttttcgtccacatttaatactccctccgtttcaggttataagactttctaggattgctcacattcatatatatgttaatgagtatgtctatactcattaaacggaggaagtatttatacatgtgtccaaacatttgatgtgatggaattttcagaagtttggaggaactaaacactacccacgtcaaaaaaaaaaaagaaaaagaaaagcaagcatactctcgcgacgctgcagccgcgcgccgtcactgttggggtcagcggcagtgcatgagaacttgagaaggtaaccagccagccagccaaccggaacaagcgcaagcaccgtgccgagccgccgtccgccgaactggggtcattcagactggagtgcccactaacgacggattgcgtgggcttcgacttcatgtcgccggagaaggccgcaatagcagcgatagccgccgagggcgttaacctggacctcatcctcctcctcctcagtccagccctcgtcgtccatccgctggctcttctccggctccggcaatgtcatccatcccctccgccgtttgacctccgacgaggaagggaccggagggagaggaggagataagaggaggggagtgaaatgacacgtgggccgtgctacttttaatttacctttttataaggaataagttcacattaggtccctctatttgtcgcccagtccgactttcgttcctcggtcgcaaaaccgggtatgatgggtctcccaacttacaaaaccgtgcaaaaaaaggtccctcggcagtattgtgcccggttttggatgacgtggcgcctacgtggctccctttgactaggtcctcgtccaacgtggcattgacgtggcaaatgaatcccggaaaaataataaaaaaaacatgagacccacatgtcagctacacaaaaattataagaaaaggtggggcccatgtggtcccacatatcagccccctcttatctctatccccctctccctcccttacagaatggcgagcggcggcgcagaggggggcggtgggcggagcggccgggtgaggaggggcagcttgcggcggcacagagggggggcggtgggctgagcggcgcatggcatgcggcggccgggcgaggagggaggcggcgctcggcagctgggcgaggagggagacggtgcgcggcggccaggcgagaggaggggccgcttgcggcggtcgggcgaggagggaggcggcgctcggcggccctctcttccgccctctccactggcgcggcgcgtgccgccgcttctctccctcccaccagtcggccggcttgcgccgccgaccctctcccgccggcaaccgcgcaccgtagttcctctctcgccctcccgccggtcgccgacccaaacgcatcgccgctcctctccctccctcccgccggccggcgcgcaccgccactcctctcgcgttggaggtgcatgaagcgtccttggcgaggtcgctgctccgccgtgaggatgaaggagagccgagaagaagaggaagatctgagagtggagagggagaggggaggggagccggcgagctcgagctcgccatcctacccgcccgtcctcgccgaccactaacagcggacgcttgctccgcccctcttccgctgcctcgacgtcgatccctctcgagttcatgtcgagaacgaacgagcgagcgaggcggcgaccttggccggtgagcacgcctgccaccactccgcccgtcctcgccgaccactaacagcggacgcttgctccgcccctcttccgctgcctcaacgtcgatccccctcgacttcatgtcgagaacgaacgagcgagtgaggcggcgacctcggccggtgagcacgcctgccaccactccgcccgccgtctgccgtccctctgctccgcccgccacccgccaccgctccgcccaccgctcgccgccgctcccgccgcccctctgctccgcctgctgtgcagcgctcctctgctccacgcgccacccgccaccgctccgcccaccgcccgccgtcgctccgtcaacagcccaccacccgtcaccccctctgtgctgccgccgctcgccttcttgtagtatagaggggagagagaggaggaaggctgacaggtgggaccaaataggccacaccttttttaattattttttttagctgacatatgggtcccatgatttttactattttttcggataaaattgtcacgaaagcgccacgtcaatgccacgtaatcgccacgtcagtgccacgtgggtcgaagacctagtcaaaggagccacgtaggcgccacgtcggccaaaaccgccctccatactgccgagggacattgtttgcccggttttcgtaagttgggggacgagtcatacccggttttgcggtcaagggacgaaaatcaaactgaccgacaaatagagggacctaaagtgaacttattcctttttataactagcatgtgggcccatagtttttattattttccacttcaaattacaacgtaagcatcaagtcaacaccacgtgggacaaaaactagtcaaatgagctacgtaggtgccacatcagctaaaactggagacaatactgccgagggaccttgtttgcaccggttttataaactgggggacatgttatctggtttttcagttaagggcgaatattactgggcgacaaattaagggacccaacatgaacttattctcttttgttgcaagtttgtgaattcttgggtcatactgggccgtcctgtctgcatgggctgcaagtagatagcccaggtcgacttcttttctgcttttgactgttccgaatataaaaataaattatagtaaaaaaaaagaaagaaaaaactccaagcaggaatcaattccacgagatcaagaagaagaggaagaagtcgcttcgcgggcgatggcgagcagctcgtcgccgccgccgccgccgcagattcgttgcgcctccttcaatcaggacaacaggtacgaccgagcgaacgacaagtaactggattcggggggagtcggcgattctgaattttgggggtgggaagggatttcttgggtcggatccggcgacgaagaaccctaattgtgattgcgtgccggttgatttgtttcagcttgttttatgtcgggacgaaggatggattcaggattttcgatgcccatacagggaagctccactaccagaagagtgagacttccttcaatgcatcttccttttctttacccatccctctgttcttgttgctctccattgcctagcgcgaatatccaacagtacagcatgtaaaatttggcacagattgctcgtagattgtgaagtagaaacagttaattcccagtaggatgttaagctgaataaggttacattgtgctgcctgcgttagtcagctaggttaatagtcattagtgtgcattgatgtatggtagaaccaaatgaattttattgccgttagcatggaaactggctattctatcatggaggagagagttgttctgtagtgcttttataagaagctatggtgttatagctatctgctcaatttgcagatattggtggaatcggcaatatggaaatgtactttcggacaaacattcttgctatagtcggaactggtgaacaggtacctcggccatattttccctgtttgcttgagtcgttcctgctgtgtgattgtctgtcatactattgaatttaatatagacgaatttgctagttaactaccgttcaaatttatctctgcagcctgtactatctcctcgctgccttcgccttatcgacaccgtagcagctgtcacaaagaaagatctgaactttaagacttcagttttggctgttcgattaagtagaacgaggtatgtcaccagtattttatatcctagaagggactacattagaaacatgttagtttttttatgatataaagatatttcttggttaacatatttgtgcaaaaatcatgcaatatataatgatgaatcccatattatacttgctcgtttttttttctgtaaaatagttgtcacatcatgtgcaggcttgttgttgtattgcaggacaggacctttatttatgatgtaaacagcactactatattggaagaaattgaaacagttcccaatacaaaaggtgaggatcctactgctgtttgttcctggcatcaagttgaaggagctagagaaaaagatcattaagcattcttgagaagctctctcaccatatttgctgttaatattgttattctttgtatatcaggtctttgtgcattcgctcctaattcagaagcatgttatttggccatcccagcaagcacatccaaaggatctgctttagtttataaggcatcagaacctgaattaatatgccaggtaatttgaatttgttgtttattggttaatcttattggctgttgtaggctattatccttccatgagattttctcacacatccccacgcattaatgttcttctggtcctggatctttcttgaaattattgatttacatgccattgcatttcattgataatttaggatctcttactgccttttcaaatcagagggaagaaaaaagaacagttatgcaaaattagccgtgtaagatatttatgttggtataataagctgaaaataacaaaataaaccattttccgaactgctttctttcactttgtattattaattattagctttgatagcttgttttgttctttctttacttatgttatgtcttttcactgtttttgtgtaattgaccaacagatagatgctcacgagtctcccttagctgcaatggcattttcttctaatggcacgtacctggcaacagcttctgggaagggtactattattagagtatttctcgttgcacaagcaaccaaggtgaattcaacgttatttattgtctgctcttgcaaccaactagattttcctaaactctttttacatacatacttcaacagtcacacagttttcggcggggaacatacccatcaacaatatattcactctcattcggaccatcggatgatctgcccgatgttcttgttgccacaagttcatcaggctcgttgcacatgtttttcctcgatgctgccagaaatcgaaggtacatagccagctcaaatattgataattcgtggacggtgtatgtaggcatgatctgatttactccacttttcaggaaccaaacgagcaaattgcttggttcaatgattcctggagcaataactcgtgctttggatccagcaaaccatcacattattcacaacgtcatccctgcaggaatcaagaggtgttgagttcatctgatttccactactttctaccttccattattgtcattctaatctaatcctttggaatttcagctgtgtagccgtacataaggtcgaaaattcacaaaattcttctaaacttcctgctttaaggtaagaaatgaaaacgccttttttctgcccctcatctttatttagcatatagctactgtgggttagtaaaatcttacccattattgtctttgcaaaaacttgcaggactgttgtctatatcataactcatgatggatacttccgcgagtactcgatcaacaccacaaagtcaaatgaatcttcctgggttttgcaacgcgagctcaatctactggataccggttgtagcactccccagcgggaggaacaacacaaggactgactagcagactagttggctcaccaatgacagaagcttcagctgtgtgtacatacaatttgtaagatagtgtgctggtagggctggtctgtggtttgggctgagattctaactccaattggacaagtgtatcatagatgtgcccaccaatggtgagggatgattcatccttcttgtggatgtaaattatagatagtaactgccaatatggcaatataattacactacaagtatatgtaactgctttgctacacgactgacagactttgccctgagtggttacaatgaaatgaaccagcatactgccatactgacagaagtccgcgcagattactccacactgggtattgttctactgctctaagcatcatgaaaccaaaagaaaaatacataagtgcaaggattttgctaatgatagcgaacattccaatttgttttcccttgcataacggcacctcgataaaaaccggcgctctgatgatcataaacagcaagatataacttgcataaaacaatacatcctttttagactaggataatgactgactgcagtccctacaatattatctctccattgtttttcttgtctgatatgccaaaagtctccatttcaactcctccaaaaaccttattgttaacacataccttctcaatccttcccgtgctgttccatatctaacagcatctccacaagatcagatctgaccaaaaagaagtatgtttgcattaagtatgcagaaatttgcatcagaacaaattagggatttctgagcatcgtgtccaatttctactgcaccaatatacactttttagaatgtcgccaaaccatatgaaaaatgttaatgagggcaaacatggtcacctgggctgcctttgctttgagcctctgtatctcgtcctgcgaacacactaacctgcagtgctccaaaatttcaggactgaagctatttaatttctttatcaattcggtctaaaaggatggggtaaaagatcattaccgccattgcagctcagtgatctcattgaccagctccttctccttttcgtgtgccgcttccaactgaaaaggtagtaatgtctttgctcttataaccaattactataacaactgacaattataaatagcagtcctgcaatgtcttaaattattttccccactctgatatgatggcactacatattaggaattattatatagaaattactagtatttggttctctataatctcgcagagttaactttgagattcatcctagtgtggttaactcaccaatgatctgtcaattgataatgctgatgatggagatgatgcgcgacttgcaggagcaatgcaggcaggtgacgtcattgccatatcgcaaccacttaactgtttcatcgcatgaagtatttgctcctgcaagtgaggccaagactaccatcaacagagctgaacgtattctagctttttttttgtgacttgtgagtttgtgtgggttgagagatttaccctctgaagcatatttgtctgtagaacattgtacagctgcatataaagggacccaccaataatggttgatgcagcctcaattgaggatggtatacttaacgaaggaaggtgcgaaattgcctacgtgaaaacaaagtggcacgtatgttagtgggggaaaaacccacaataaaaaatgacctgtatattgctcccaacagatggcatcaattcttgaatcgaacgatattgaaaatcctagagataaagctaataacctgcatgctgtgactcttctgtagtccaggtgagtgagcctgaaacgaaaaatcatgtcatcccagagttaacagaacatgcagtaagtatttatggctggaaattaccttatccaactcaacatgcccaggcgtaactttaaaacggcctctttgctgtataagaggaggtttcgatctatcgtcgtggtcctcaacatttgctgctgtattaaaacgaagcacgttaaaccgataggcaaatacaaggttttatgtagccgtaaggaacttgttctgatgagttaccactgagttagctgatgctcaaacgtgactgaattgtcactacggtgaagaaaaaataaacagatttcagggttaaatgcatttcactacctgatgatttaggcacctttggaacagcttcaggggatggttcatctgcaacttgcaagggtcctccgttgcacttgtcacggttatgaatgttaatttgatgcttcgagctgaacgaataagaggcatgctgttacagactgtttaaaaatagcacaatagcgtcatgttaccagcaccatataacaatagcttctcaagtaaaaagggattcgtcatattcatggataaactaaaacaggtcctaaaacaagatttgaatcattctcaaacaagtcagttcaatgtttctaatttttaggttgtgctgctacttgggaaaatgtgattcttcaaattagcatgcactcgtcagtctttaaagttgaacaaacctctctttggatgaaagaaatccatcagatgagcaagaactgaaagaaaacttcctttcatgaaatgagctgaatgaactggttggaatagcatctgaatctttctcttgcaagtccagttcactactttctgtggagctgtgtttcctgacctggccatttgcatgtaccccgtttgtagtcctgagcattgatgtattcctggcaatttaaattagtaaatgacagttttcagaagagaatagtacaagtacactgcagaaatagcctatataatctggcactgccactactctagtgctcgaacagaaataagaccctcttatttgcaagcaactataaaaatctgaataaattaaataccttgctaaacaaatggggtgctcaggagatgaaactgctgacttatcattgctcatcacatcattttcctaccaactttgctcggtattagatggaagcaaaactttatactaggttagaacacaaaactttatacaaaaaattatacttacggtgtccgtatcatacttaattgaaaaaactcttgacatatgaggtcctgttgctcgctctggtaaaatggtgtccaagtcatagaaacatgatgcatctgaatctttgcacgatatactgtcatcacactctgtaatctgcgaacagacagatagagaaattacatgatgtgaatcaatgactaaagaagagaacagaactagttcttacaagtgaagcttgagacttcaggtcatccatatcaaagttccagctactgatgcctcttttgtattcatcctatcaatataagaaacaagaggagcaattatttgcttgtaatacaatgtcgacaatgaaataaacatataaataccaagacaggaaaaaagaaatgacctagaatcctaaattcaggtaataaatgcctaataatatgttatagttattacactaagaatgtgtaagtttttaatgctgcaaaacagatattgcaatttccgtacaaatcgaaggaaattttctaatatggactactcacccgaggttatgatcaccattattatgttttgcacaatatgttttgggaatcctttgatttacttttttttttggcaaaaatataatagtacacaacaataacttcattgatcctcgaataaagaaactaatgagaaacaagtgtatcatttgacctgcacacctgcttagaaatgcttgattatttaatgacaccatcacatatatacaattatacaaaggcgtactgaacaggctcagtgcaagagaaaatattttatcaatttactataataatagaaccatagttaggaaaggtataaatcagatttttttttctagatgatctaacagaaatgtagaattggcacctgtgagatttcttccttctgtccatcaggcattttcttttgagaaagtaaaacttcatccttttcctataattaatagtaagctccactgttaacttagtgaagacgatcatttgcccccaaaaaactagttatagagccctaaaccagtgtaccttcagagctaaatatctggcaccaaggccaggcaatccctccaaaagctttcgactaatgaaatcactggagcgagcttgcttgaaaaagggttgcttcagcaattttttcgctgtaggcctttttgaagggtcttttaccagacacatagcaaccatttgcttgaaatgctgatataggagataatcgttgttgacaaataagaagtcatgctcatcataaaaactacaatggtaggtctgttcaaatattaaacatatttacccttgaaaatttcttatctctctcatagtcaaggcccggaggggcattctgaagtgtcataagtaagacctgacaaagtgtatgaactatataacttcagaaaagtccaccaaacccatcataagggattgtctcgaatttatctcaatgtcatgcgtttgattataccttcatgggagggaacttcgagaaaggagcatgaccatgggcaagttcaagtgcagtaattccgaaggaccatatgtctgccctgtaatatatttgtaagatcaagcttgtaaacatgccatggtgaagaaagtatccagacagttaaaataagtagtagcctacttgaaatcgtatccatgtagctgctccataacctctggtgccatcctaataaattacagtagtccacagattagatgtgtgaagacacgttaatggtgcataaatgaaagcatatttgctactttttttcagatgagtaccagcaaggagttcccacgaaagtattcctagcccgttgcctgtcaccagaatcaaaaaggcaagcagaaaccccaaaatctccaagcttgactacaccccgtgaatcaacaagtatattccctgcctatgatcgaaacaaagaatgcagcaatataacatctccataaacaactaattcgagaatatctgtgtgagatatccatgcatggctcaacagccatacataagaaaccagctgtggtgcaaaatgttcatttaccttcacatcacgatgtatatgcccatgatgatgaaggtactccaaacctttcaggacttcacgaagtacagttgcaatgacagcttcttcaaaaccatctggatagactgacttcattatgtgaaggcaagaccctccagccatgtatggcatgaccacccacaacgagtggttatttgtaaatgaacaatgtgccttcatgacgttaggctgatctatgagaatcatcgtctgagcttcacgcatgatgttgttctgcgtcaagcatatccgtgttactatcattttagacagatcaagcggcggtacgtaaatcgcaacaatccgagtataacctacttgcattacaactaaccactgcaacaatctgacatgaatgcagtcagcaaaaaaaatttgagctataattaactgtaagacaacagaaataatatatgaaaattttcgatacgatagtatgcgactcattggaccaaccgaccgttggacaatatcatccacaagtacatttgtaaaaattaaaatgcaccggaggataatagtttaattaatctgcaaatcaaacaggttaattaagcgagacgatggatctctctccctctacgcaggattgggcccaacaaacgaattggagatgatgtacgcgcaaacgtaccaggtcactgtttgtgcgctcgaagtcgagcaccttgacggcgacgatctcgtcgaggggcttgcagagcgatcggtacacgatggcgctgaccccctgcccgatctcctcgtacagctcgtagtcctccacgcggatcgggtacttgcgcctctcccccgacccacccaaccccgccgccgtcgccaccttctcccacgccttggccatgctcgatcgatcgccccttccctaccaccaccacccccacccgcatccaccgccgatcgacgaagcgtacggggacggggcgctggaattggaggagggatttcgaggtggaagtggaggcgaggagggggaggaggaggaagagcgggaagagggggacgtgtgaggtcgcgcgttgcggaggggagcgagagagagagagagagagagattgggggaggttggatcatggcggccgaagcgggaggccggagatttgtgtcgagggagcgcgccacctgggccaaggcccaagggaggcggcacgggggctacgtggcgtcgcggcgcggcgtcggatcaacggccgtgaggtttggacggagatgcctgtatcactgtgtgtggcagtattgggcattcttgcgtattagaacagattgaatttgaaattttgaattctaaaattagctgatgcatggaacggaggtgcttgcatgtaatttcgaatcggcctcgtttggtatgtgtattcagcacacaaatactaacggtactacatcggttacttatggtccatcggtcttagcgaaaatttgaattttaaaacttaattttagagttgattttaagaagtttcgtagtttactttttcaggattgtctttttaaattgctaacaacatataaaagtttctcatcaattatccttagctgcttcactcaatttatttattttttatatcttatcagccgtaaagaaaatgatggagttgtgattttgtaaaatgagagagttgcttgtacaatttgtattttgtttcagcgattattaatcatatcatgcaggaaagcaatcatatgaagatgacatagatggcgggattagagaaggctcacactgccccaataattatcctcatagttataggaataccttgcaaaatgttaacttttaataaaattatgaaatctattagagcaagcatccgttgtagtctagctggttaggatactcggctctcacccgagagacccgggttcgagtcccggcaacggaatttttttgttgtttctcgcaccttcggtttttatgcgttttgacccaacataaaaacggacagcatgttctgttaccttcagaagactcaaatccttctctgatttcaaacaagacgatgtccgcaccacctgctacgtttgcatgttctctagttctccacgtatttttctggttcagagttcagagtgcaattttgcacagctcgtccatgtaggacgacaatacttcacacatgcactactactctactggagtacattggcttcctaactctgaagctgtataacacttctctccgacgaaacgaaacgaaccccaaccgaagtggtaaccggcgaggtcgccttcctttggattggattggattggattgcgactgaaacccccatcagagttcagaaacgccacacgggatacgctatgctttgctttgcttcagacgcttccgatatcccccacatcctcaaggaagcaaccagacaagcaggatccaactgactggatcattggaggcaggagaccttgagctggatatgaactatgaatatgcagtgaccccaacacccatatggagtactgtactatcttatctgaagaagagaacactcacctggacgtgggctcgtggcacaagctggatatgaagaggcccatgcttcatcaatcatcggagtcttgcattgcacgtcctaaaccttagcttcagttacaggtcactttaacttgacagcaacgaccaatggctttaggttattttccctttacaggttcaagttggagccaagtgtgtaaatccaacagagaccagtacattactcgtatacaacaaaacaagatcaagtgatcaacctaaacaagttatttggctaaggccctatttgttttagcttaaaattattgtaatctaaattattaaatcagattactctaaactggattataataagttgacataaaataagctgcaagttgtttgtttctctggattattagaggcatctaaaagtagtaggtctttaaccactcaataatctgaaaaaagctcctctataggagattattggattatactaatctgacttatagattataataatctagcataataatctagttgtttgtttcagcttacttctgataatctagattataataatcataagctgaatcaaatagggtaaaaaaaaacaggatgcagttgggcttaaaataggtttcagattagcaaagcagtacactttttccgtcgttgtcctcttttattcctcgcgccattgcactctgcacgctgcgctgcagcagagcagcgggttttgttgcttccctcccattagatgggtgggggcccgacctggccattagcaacagcgagcgcactagtcctccactgcccaaagtaaagtgctccatgtcaacaggtgaggccgtccgggagatgatcagatgaatcacaattaacttctacttgtatttttattgctatcatgaaacttgtcacgactcaccaccgcacgaggcctctgatggatgcaattactgtagatatgtttatgttaatccttgtgtacgtcaaataaatcggcagtacgccagtacgtagtagggcaatgacaacggacagtccaaaccgacgtcgaatactctatagtatcccggtcgacgggtcgagagcccgaaacggtgcaggcacagcacatttggtttcaggccttttcaggttgcagatgcctcgactctactacacgcgtgtcagcgtcttgtttgcctttgcctgggttggcgcgacacagaatcggagatgccaccggccaattgatcctggactcgtgcaacccgatacaaaatgccacgggaagctcgggtttgccgaaaattcacgggaccttgctccactggtcgcacatcccgatttcacaccggaatagtagccgttttactcgtttttcccctatcctgacgtagtgcaagatcatcatttctactgcaatgtgcagagagcaactcatgctcgggttgcaaatattaattcaaaacgatgaatcatcaacggattctcttcaatttatttgctctaccagatttacaattaacagagtttggaatacaaatatttttttattaatcaaatcctgataattagaagcgcagctcatgagggtagatctcaagaacaaaacacattcttattccctatgcaataaagaaaggcagttcgggtacagctcagaacgacgagaggccaccgaccgcgttgacgggcccacccatgtggtccaacgtgggtttaggtgggccccaccccgacaatcccgccccacctccatccacagccacagacaggtggtcccacctgacgccataaagcaacccggccccaccgcccagtgccagcgacgcgggccagctggcgaccacctcacgcccttcgaggcgccactcgcttttccccttctctctctctctgcttatcttatcacattagaaaaaggcccacggttggctcatatttacaggagactgccactgcttctcctccttcctatttcttctcgcattctctccctcgtctccgggagaaaattttgcgggcggcgaaacaaactagtaatcgattcgaaatttaaacgcattgttgttttattgtttgattagtttagctcaagaaagattcatagctcagctatgaccagccagattacacacaaaaaattcgagggtgtgaaacgttatggagaacgaaatttacagaagagcatggagaagataaagggaaaaggaagagaaaaatgctgctctccattgctttcttcttcctccctcccctcccccaagaaaagaattccccccagtattccaaagaacatcctaaaatatttcccccaaaaaaaaagtcgaaataagaatgttaatgttttgatcctggagtggaatcgaccactggatggccagagaataagaagaaaaaaagaagaaagaaaaagaaaagaattagcagaagaattagggcggattatagtcacaagttcttggatcccctggtgtagccgtagtaggagaggtaccacttgacgaacttcttgagcccgacgtcgaggttggtggtcggcttgtagccgagctgctgcctcgcgagggagatgttggcgtgcgtgaatggcacgtcgccattgccgggcatctcgaccacgttcttcttggccttcacgcggaggtgcttctccaggatggacaccaggttgggcaccgtcaccggcgaggtgttgccgaggttgaagatcctgtagggcgccggcccgcgcttcttgcccccggtgccggtgctcttcccggccgtgtcgagcgagccgaggcagcccttgacgatgtcgtcgatgtaggtgaagtcgcgggcgaggtcgacgcggttcttgccgcggtacaccgtgatgggcttcccctgcaggatgttgcgggtgaaggagaagtaggccatgtccggccgcccccatggcccgtacacggtgaagaagcggagtccggtgatggagaggccgtagatgtggttgtacgtgtgggtgatctcctcgccggccttcttggtggcggcgtacagcgacgccggctggtcagtgcggtcgctctccgtgaagggcaccttgtcgttgaggccgtagacggaggaggaggaggcccagacgatggccggctgcgggtcggcgtccttgcatgcctcgaggagggtgacgaggccggcgatgttggagtgcacgtaggacgccgggttctccatggcgtagcgcacgcccgcctgcgccgcgaggtggagcacgtgcgtgaagggcacgacgtcgaagagcttggcgaggaggcggccgtcgttgatgtcgccctcgatgacgaacaccccgtgcgaggcgagcagcgacctgcgcgccttcttgagcgaggggtcgtagtaggagttgaagttgtcgatgccgacgacgccgtcgccgcgcttgcggagcgcgagggagcagtgcgtgccgacgaacccggcggcgcccgtcacgagcaccgacatccccgcgcccgccgccgacccgggcggccgcctcggcgcggcggacgcgcggatctggcgctcccagtgcagcccgccccaggaggcggcgaagtacttggacgaggtgtcgacgaaggactggaagctgaggtacgacgcggtcatggcgacgaggaagagcgcccagaggaacatggtgctggtcgacgcgaagcagcggtggagctggcggttcatcgccgtcgccctctcgatcttcaccttccccggcgtcgacgggaacatgtcgtcctccagcacccgcatcctcctcgcccgtctagaaccttctagattaccaaaatcggcggtgccttttggatcgagggagttcttggggggggaattcggggattggaaaaaaatattattattagggtggggaaaggaggggggcaggggctagatgtgcgcctgcctgaggaaagggtggagatgggacgaggccggatataaatagggggggaggagacgcgtgagcgccgccgcggcagctgctcgctgacggtggcggccggccgcctggctggttgggtgggtggttggttggttgaggggagggtgatcggtttccgtttcctttccttccttttctttccttcctctctttgttgtgtggaagggagtatttatttatagtagtttgttgctatttttgatggatttattttatcatatattgatcgattgggaatggctggttttgtgtagtgatttgtgtttccgcgtgaagagtgtgtgaattaatctgctgtgaatggcattgcgtcgtgcggtaataatggtggtgaaatgaattcacgcgtgtggagaattcgacgagtttaatggaggaagcttccattgactgggattttatttatttttggataagttgtttttggaatttatttattgggggggggggggggggacaataattctgcccgtagaaatcgtgtcacatggggggtcagatttgtgtgttttagtttatctggaagcggtgtttaacgtggtcatgcaatggcaatagcgtggacagtgtgattcatcttattatttccaggtcttcaggagcagattattttacggtgaatagctaattcggtcattaaacttttgttacgtgttaaattagttcttgatgtttcacatattctgaacaagctttaaaagattctcgtgtggcttaaaacagttctcgaacaccattaaaaatgccacgtggtattaccaagttattttgcacataaaagtcagcatttaaatctccatatttacctgttacaactatgggtgtgttcggaaccctggttcccaacactaagtgcccgcacggaaaacggagcaacgattagcaggtgattaattaagtatttgttatttttttaaaaaaatggattaatttgatttttttaagcaactttcgtatagaaactttttacaaaaaaaacgcaccatttagtagttcgaaaagcgtgcgcgtgaaaaatgagggaaatgagttgagaagagagacggctgaacacagccatatatggtgcacaatgtttagctttatattttgagtaggaaaaaaaagtgggtgagagaagaaaaaggagacaccgaacataaaacaaaggaagatgtcacattgtttaattaccaatgcaacatctgtttcgccaatgaccaaaaactgaagacccaaagggcaaaagtatctgccaggcagggagtccttttgattcaactatactaagaataacaaacccttggcgacccccaccaaatggttgggcaaaatcaatatggatggggctttctcctctaatgaaggaaatggagcaataggaattgtgattagaaatattgacgggagagtaattctaacgtcctagagatttttcagaaaatgtgtggcagcagaggaggttgaattatttgcttgtcgtgaaggcctaaaatgtaccaatatcggtcgagtattgagtctgactgtggcacggtaattggaagtaagcctgctaatggattgagttggaatggcttaaatggactggattctagtttggattatctttgattgggtgaaaatgggttgctatttcaaatggattggatcggttttggtgacacataagtggattggtgtggcctggatttgatttggtgatatcgggttgaaagtggatttaacccatggatggcaagtggattcctttaacagaccgagtttgactactccttgttgccgtcctcttcgtctcgggagaggtcacacatgacctggacttggtggcgacagtcagcggagaggccgcgcatggcggcaccgtattcgtgggagtcgaggcagttggaacgtgtctcgttgcatctcttcgatctcctcccgtctcgccgctagagctacccgctcttgtgccgactaggcttcttgttgttgccccactgctcccacatggcgattggatttccttgccgtggctggtgatggcccgtgctgagcctagacaacatctactacggcggggatggtgccgctgggcatggtcaccatagctaactgcaggtgtgcgatatgtacaaagggagcagttgtgtcgtcggcccatcgctcaccgccgccaccgccgaggagacggccttagcgagctggctggcctcacgatgctcctgcgcctacgtcgacgtgaccgtagctgagaacggcgctggcgtcatgtcctctgccgtcaccacgacgccacagttacatgcatgcaacatttgctctatccagctgcgtcgccgccggtgagtacggcatgactattgaaggatcgaagtggatttgatgtaggtttaaatggtttgggaggtggattgaggccataaaagaagaataggttggttcggtttagactaatgaggaaaatggattggtctggtttggattttatgggatggctagtggattgggatggtttgggataacattgctagctgttgtggattggattgaatatggggtggatcttgcccaattggtaggcttaatttgggaggttattggctagagaggaagaaagatcaaggtggacctttctgctgcgcgcaacgaatgatacaatgtcatttgtttaagaagtgtgatctgtcacactgtaaaatagagtgtaataggttagctcatgatattgcacagcttgcaaaataatcaagtcagaacgcagtttggtgtgagactatcatggcttgtgttatgtatatgggcagcatgattgtaatccagttacttatcgataaaactctcttttccaaaagatatgccgttatgttttgtttgtttgttcttcattgtttttccttttttttatgaaaaatgtaatagtagaacaaatattaaatgctaaatttgtatgaatggatgatgtggaatgaccattggcgtttctagtaagcccgaagactatattaagccacgtcagggaccaaaatgacgttgaagtgaaagttctagggttatcaaccccgttattttgtccacggcggatgacatcttttttctcgttttcttgttccaacttccaaactcacacagagccgacagaggttgctcatgcagtcatgctccagtgctccacgctagtcagtgccatcgtggcaatggatctgaaggccgggggttgaggaaatccaatttagaattcatattgttagacagaccttgctagttgcctttcttgttggacccataccgcacgatcttctccgtgtgctaatcgcctatcactgaaaccttcccctgcgtttgtttgctccagcctccaggattttatggcgagtactcattctatcctataaaaaactaacttaatagctaatggcatgtatggttagaacattagtccattagtccctataagagaagcttatagggactgagttgtttctttccacctgctgcccccactcacaaccctatcctctctctctctgcattgttttagaggtaacatgttctttttacagtgcaattaataatctttagtctttttttaatccctgtatccaaacagacatggactaaagttttttaagtcctacgactaaaggatgcaaacaccaccctaagattgatatatcctactaaaaatttagcggtttttttttatggaaagactacatgcgccagccggccggctagatcgtttgctagatttgtgtctcgcccacgatcgtgtacagttggaagtcgcccacgatgcgttgtcgtaaacgacctcatctacctacgcgcagcccagcaaccgatcgagagagagctcacggttgatggccgccgcctcctgcattcattcaggtaacagtagtagtgagctacctagcctccctaccagcagcacgagaaaaaagaagagaccacatataatgttgggttgttggagagaagccttggattcacttccaaacaaaggatccgtcccaaaattccccaatccaatcaacacagaaccagccagaacccctagagggatcatctcatgtgcgtcctcttgacgacctttccacaccccccaagccaccattgctgccaaagtggcaaatgtttgcatcccaagcctgcaatgccaagcactggctgtgcacggatacgtactgcccatgtgacgcctcctacccaaccctgctgcaagtgctcttgctgagtcgctggtggtggcctagtgcatgcatgtctcagcctttcttactgactagtctctctgtttcataatataacaacatgatatgaaatgagatgcatcatattgttacaaaagtgattcatcgtactaggataagtttaacacgtactagattgttgtattatgggaggtggcctagcgcatgcatgtctcagcctttatcactgactactctactctgattatataacaacctaatagggaatgagacatattctaatattacaaatgtgaacatgagatttgcacagattcatagtactatgatatttttttattttatactaaattatcactccctccgtctctaaatatttgatgccattgattttttttacacatgtttgatcgttcatcttattcaaaaacttttgtaaatattatttaaaaaattgagtagtagtagtatatttaacaatgaattaaataatagaaaaaaattaataattacttaattttttttaaataagacgaacggttaaacatatttaaaaaaccaacggcgttaaatatttaaggagagagggaggagtattatactataggatagaggatggagggaatactcccctagctaactgggtgtccccagcctaatcaacactgcgtcaagcgaccgtaatgtgaagcacggggggcttttccccgtgtttgggtggtcaaaagctggcttgatctgtcgttgggacgtgagtgcccacatggagtaaacagtgggacgccgataggatcacttgtgaactctgatgcgtgcatgcgtgaatggatgcttttttggagattgcttccttatgagtggcgattaattaagccagtgatatactccgatgagtgagagggtgacgtggcactaaccaggaacatttgtagttgtaggtggggggaaagaggagaagagcattggtcatcatagctcggtggatatggaggccgatcgaacttattcttctttttttggttcggttctgatttctttttcatcattcctgcgtgacacatgagagctacggtttttttttttcaggaaggacaggtccaacgatacgatggattagtgcgctagaagttggtttgatcgagtgcgtaagcttcaagttactgcaaacttttgctaatatgcttatccaaaacaatgagccgtttctggctagtctttacgaaaagtattttgtattttttggtcaaaaatttaaattttatcatctacagttggtacagttgggtgctgttaccaaatctgattggttcatctcgatcaaactaatctaaactcgctctcgccgtacgacaccggacacacgggccccttttcactttgttgggcgtccaaacaaaaagaagccaattgatcaggacagctataacatgggtagcttgcaaatgaaaccttcaactgtgccgttaaatgacaagaaaggctttaatttccacgcgctccaatctccgtcgcgaccgcaacaaaaatatgcatatccatccatctccgatgatagtaacatcgtgacatgatgacacgagtaataaatttctgtgaggttatccctctaattataggttagccaataataatactaatatgacttcaattaaaattgttaacaaattagtatttgcaatttttgaatctgtacataactataaacgatttcgggttaaaatttttgcaacctatgtaactataaacaactaaggtcctatttgtttcaacataagattgttataattcagattattgatccacgttattataagctggattataataaactatagtagaataagaataagttatgagttgtttatttctctggattattgggtttgagctaattaatgtttataataccataagctattgcggagtgggaggaggatgagacggcggcggtgatgcggctaggggaaggagcggggcacaggatgggtgtcggtgatatgggtctggaggtatcaggaccatcgggaggaggctgcccccggtagccacgtgcaccccgccagggggatcggcctcctccgcccacctaaccgcatttaaggcagtgtgaacgagcgcaccatgctacattaaatgcagtgcgtggtgcgccttgttgtattgtgaccaatctgggaccagtcgaatgaccgatgtggccagggtagtacgcctgtgcactgtcacattgcgtatcacagccggagacggtttgcctaacccggtcagcgtaagatttctgtttcccggcgcaagtggggacccaaaagtcttcactcattaaataccgaatggcatgcatgtcccccgtgtcaactggatagatttgatgggccccacgccgtagcaacgcgtgcaatagacttccaaggcaagcaacgagacatgcatttaatgtgattatcctccctggataggctgggtgggcccatgtagtaaccccttgagatataaaaggaggtccaggccggaaaggctaagggacgatcgatcgcccctagcgcggtcccccctccctccacgtggtttctttttttgtcaccgtattactttcttattttagtaaatttatgcacctaaagtttatacatctcaagtttacacatctaaagtttagagatccaaagtttataagtcaaaagtttatatatctaattcaaatttgaatttgaattcaaatatttttttatatattgtatttctatacatctaaagtttatacacctaaagtttatagacccaaagtttataagtcaaaagtttacatacccgattcaaatttgaatttgaattatatccaattcaaatttgaatttgaatttgaattcaaatattttttatatatagtatttctatgcatctaaattttatacacctaaagtttatagacccaaagtttataagtcaaaagtttacatatccgattcaaatttgaatttgaattcaaatattagtttataggcccaaagtttataattcaaaagtttacatacccgtttcaaatatgaatttgaattcaaatatttttatatatagtatttctatacataaattttttcaactttatttttttatttttaaaaaatgtatggtgtagtaggaagagaagatgggaggaggaagggagagagtagcttataagggatgggggtgatcgcctggagcggtcacccgcccattagccacccccggttcaggcctatctagggagggatgagcctttttcactaaagcagtcttctgccctcatcatcaacagcttctactctaacaaggagatattgtaatttctcacacaatcagctaagcacaagagtagagtattatgcttcttagcggcccgaacatgtataaacccctattatctcattgttctcgaggaatccgatctcactgagttctcgaatctcacccgctgcctccggccaaaccaacaaagtggggcctcactgtcccccgctagcggagttcaccctccaacaatggggcttggggaaggatttgcgcgcagggtttgggtttggagaatgattcgcgcgtgactagggagatagaaaggaaacggatgcgttgggtttgatagcagtggtgggtaatttacataaattttttaagtgcagtgggtcttcgtgtccgttgcacaggattctggaacgtcaattttcttatcttcttttttttttaagaagaaagatattcattacttagcttggatcggtcaaagactcaagcgtcgtaactttctgaagtgagatatacggagtactatttacatacgcaaatccgagcgatggcgactggcgagaggtggtgagctaaggtatctatccgtacctgcgccgcgcaattgactttcccggccgcgcaccgcacgtcgtggctgcgtttcgtttctcggtctcgcgcgcgtggtgtcacgtcttgacccgccgctccgacgatctcgcgcgtacgtacgtacgtacgcgacgacgactgaatggcaacagcagcagccgtacgttgccgtcgccgtcacgcacggcgcgacacttttgccctcacctcctacgcctacacgtagtacatacatacatacacgactaaaatacacgtacgtagtacgtaccacgagactaggacgtctctcacctaatgggccggcgcgcctaccgtcatcaaggcctgaaaagcataagttcatgtatatatatgggctctctcatcgaggcccgattcagccgaggccgaggcgacacatcgtaacgggccggaaaccttattgggcttcgtccttgggcttagaaaatccagtttccttcttccaattccggccagccttaacacacaaaacagctagcgcccgttgtattgcagccgtggactggacacgctggaggaagcatcaaaaccagtattttacgcagaagtaaacgcccagaacgcccaacttgcccaggactttcgtcatgctgcagatgtcaccacctataatacactgcccggatgaacattccaaacccccaaccatatctcatcgtaaaatttgcagctcgtataggacagtaaacgaagaaaccatcgtcgtacgtcgtccatgtctgacgcccctcccatggccgagaaaccaactgtaagtatgccaatgtctgcactttttccctctcttagactgtgtttagttccacgctaaaattagaagtttgactaaaatcgaaagcttaaagtaaaaggtcggaagtttatgtgtgtaggaaagtttcgatgtgatgaaaaaattggaattttgaagaaaaaattggaactaaaccaggccttattcgattcttgcatctctcgctgatctgatgagtatttgcagatcaaggtggagacgacgccgggagactggaggttcccgtcggccaaccagaccaagcgatgcttcacgtgctacatcgagtacaacaagcaagttcgccatcgatccttacctatacagtaccccctatatatatatatagctagatagattgatagataggagtacagtacatatatatagcgatgtttcatctgcacgcctagtagcttatagcacgcatgttcatgaagctgaagtaaccacgatgactcatatccatatggtacgtaaatcctatctataattctgtatgcaggtgcatagaagccaagggtgaagggtccgacgagtgcaccaagtatgccaagtgctacagatccctctgccccggggaatgggtacgtacttatagctaatggaaatattttacatcttcggcttctgttataaaacacacggtaataatttgttaaacaagaaactgagacataagatagtttacatgtataagttattctatatcacgtactctgaaccagtagcagtacacaatacagtaccagagagatcgagatcgatcaatgtactccttcctacttcctccgttttaagttataagactttctagcattatattgcccatatttatatagatgttaatcaatctagacacacatatatgtttagatttattaacatgtatataaatgtgggcaatattagaaactcttataatataaaacggaagaagtatctctcaaatggcgacaaagaaaaatatgtatcgcatatctatgtgtggtccgtgaagatgtagatgtagatatatatagtcaagacaaggcatgcggctagtgtactgctagtggttcatcctggacagaatatatgcatgcatgcacaagccaagcaatatgcaaagaagcaggcatgatacatgcactctagtaggtctctagccatacaagtagccaagtagcatgctgacgaaaacgacgcgagtagcacggccatttatttacacgccggaattgaactagctatagctaataaactcgccgtgtacagagagtgtacagtacaatactcgatcgcagcttggtcctggctaccactgtgcagtgccatttttgttcgattagtagcactgttcctcactggcttgatcgttcgaaactgtgcttgattgcatgcaatattccctagctaagctagctgtttgcgaagacaactctgaataattctcacatgcgtgtttcttgtttggcgttgggattttgtgtgtgggtgtgtgtgcagatcgagaggtggaaggagcagagggcaaacgggactttcgctgggcctctctgaaacggggacagcgaccgatcgatcgaccatatctctacatatatcgatcggctacagctaataataccaatcaatcctgtatgcaatgtcgtctcgatcgtcagggtgaagcctcgtcgtgacactcctagctagtattatgtacactcatgacagtgtcagttattaattggttgttgtgtctaattgcagtattagtagcgaactagcgatgcccctgcactgctgtacagtgccgtgacaagctactctgaattttttagatagtacgctagctgcacccgtcataaatttggttgtctttggtttcggttggctctgcttccatgttgctctactactagtctactactaataatgggtaattagctactcacaggtcgatcagtacgttgatgccacatatatagttgtaatagtcatatggtttgggtgaactagctaggtagttctatatgatacacgaggaacaattgaccaaactaactaatcagacaaattaaattgctacatggagtgcaagtcgaccaacgacctaaatcatgattgccagctagtagctaattaagacatacagagtatgcatgcatatactgatcgattgacttgccaaagactcaaaagtactatgaagctggtcaatcaagagtaaaaccacacacacatgaagcatgcataagtagagtacacgcgtcgacaattctcacgtccttaattttcaattttaatttctgggagcttaatttttcatctagacgagttcctccgttgcataggtcgttgtatatatcgccatcatctgcctgtgcctcgcatgcttctctttcgctatatcttccgacacgcatctccccatccctatcagctagatttatttatttttcgttttgagttgagatgaactagaaaatagtaatatttttaatttatcggctaaacaattaatattactcctagtcaaaatgcatggtgtgtggtagaaataagccctagctatatatagctatatataaatatataaactgaagactactgatcactactctgactactgtacgttccactgatcgctgccgctagtgttccggataaggtttaggcaattgtaatgtgaacagcacagtgatcagttcattgaataaacccagcgaatcatatcgatcagatggcaataagagtcaagcatgtcatcagccttcaagcttcaactactgtactggactgtgggtaggctctgactgtcaatggacgtcagaaagaatattgtaattagggcatgtttagatcctctaataaaaattttcaccctatcacatcgaatatttagacacatgtatacattattaaatataaaaaaaataactaattatagattacatgtaaattgcgagaaatcttttaagcctaattgctacatgatttgacaatatggtgttacagtaaacatttgataataatggatcaattaggcttaataaattcgtctcgcagtttacatgcggaatctgtaatttattttgttattagtgtacgtttaatactttaaatgtatccgtatatccgatgtgacacgctaaaactttatacccatggatttaaacacccctttagtgaagtgagagagcatcgactctctgtcaggtgtcagatagctaaatggagaaaactgaaaagcgattatgcttgtcttcagttatagttggctgacctggctcagctcaagcacttgagtagtgtcacgcagagaaacacttagagattttttggctagctccacaagacattaggctagatgacttgggttcgaagcctcacctcttctaattatttgatattagatcattccctaatattcgtgtttttttcaccaaaccaagcagtaaatggagaaaaatataattaattgcaccttaattaatggattaatgtttggagtattgggagtactgtcattcttccttttagcttagataattgccgtactctcaacagaacaaatgcattacatacagtcatacagtgaagagacacttgtaccaaaagaactgcttcattaattgcacatacgttacgacatcctttatacatagctgttacgtacgtagacatgtatacaaggtttgcatgcaatttgtagaaaagaaaaagatcgaatcacctgacaaatatgttacatgacactatacttacatatgcacattaccctcaactcgggcatcactcatgcatgatctgaaactctcagtgctaattaataaagaagaagtgatatatatatagtagatagagaaaagaagaggaggggaagttaacaacaactacatatgattcttacatcaattgattattgatcatgtcttcctcactgcatcttcttcttcagtactactactgttacatgaaacagcagttactagctagctagttacctgcaaattaacaccaacacatgcatatccatggctcagttagttcatgcatgggtgtgtgcaatgcaagcacggtgaggaaagtttatgagatcgagtagcttaattaattaactaattacctgagtttttgagtttttgttcttggagagtcctcacaagaagctgcattacatcgacctgagctttcagagacacggcatagtctagggtttcccccagcaacgcgcacatgtcgagagctttccctcccggcacgatctctttcagcacgctcgccctcttcctcaccatggccctcgggacgccaccgccgccgccgccgccgccgccgtacgcctttgtggtggccgccgtggtgttgttcgccggcctgatcggccgccgccgccggcggatcaggctcctcctcacgatcttcctgcagatcatcttcctcggcgacggcgacggcggcgaacggtgctgctgcggcgcctgcgcgagctccgccgccagcgaccggctccagcacggcgcggcgcccctggcggcggcgagcgcggcgtcggcggcgcgcttgatggcgctcttcctctcgtggaaacccatctccccggacgccacgccgcccttcctgagccctaggatgaggttccggagcagcgcccgcttgaacctccccgagccgccgccgccggcgccgccgttgccgccgccgccagcttgcactctagctgaaggcatggtggtgaccaagcaagctcaaacagctgctagctatggtaggtgtacgtgttgcagcaaagttgaaatggagcaagaattaatcctacaacgagagaaatggaaatggatgggagggagtgtatcagaatcgaaggagcaacatggacatataagtaggcattggcatgcatacgcatcaattatgcgtgcacgtactatctactcgttgatcatgatgatgatcttttcgtacatgtatgtagctaggttcattggataagatctctggaatgtgagttggagagaaagggaaagagagagaaatagagagatagagctatctaactatcatcacgagaggagaggggagcccatgtctccattatattggcttagctatagggaaagagaggaagaagaagaagaaggttagctaggactaggaggactaggagaggagtattggctaggaggagagatcgatcgagaggagacaatgcacatgcatgcacatgggtggctcgcgctcgctgcggcccacgcccacgcacacatgccgcactgagctagtgagtttaataccactcgatcgcgcgcgtgtagagagagagagagagagagagagacaatgcaagcagcgcagtggcagttgcacagtgcaacgcccctgaaggccctgttcggttgcacagtgcacagttgcacagtgttacgcggcgggaaatgaaaagtatattaaaaaatttatgatagatataataagagatcgaaatcgaaatttattctgggccgagaaccaatttactcatgatagggacaataaaagcaggtacaatagcaggttataagccagctgcaaacatattttaaggagataaatgagaagagagaagagcagcgggctacagatttgtagccagctgtagcacggactcaaagacgcattgtgtgtataacaggtgggaccatgtattaatagtgtagtatgtaactattgtatgaatgaactattagattgactatagataaattggagctagtagtcgactgtactattaaacttgctctaagagaccagaattagttccacacctcttgactagtggattgattcctgatcttttattattcctatcataaataaattggttttcggcccgaaataaatcccggtctcccattgtatctatcataaattttttactacatttatcattcctggcccggattgaatccaagcaacaaggccgaaatgttgagagtagtgtgggggtggggggaaggggtcccttggctggatatgagacgcggccgtacgaacagtgttgcaagttgtaacgtagtcgatgggtagcatgcatgaatcttacaagtagctatagcacgctctcgtgcctgcctgccttggcctggggctgatttgtgcacacacttgcctgacaacttgcctgatctgtcgtctgaaaatactatctgaatcgaccgtagaacaacctagctgcagacatgtatatatatccgatgccctccatactccattcatccttaaaaaaaaatcggtttctaactacgaatctagacatcggctatgtctaccttatagcaactggttaatcctatatatgttacgctcatgtctactcgttaattattccatttaatccctgatgctcagtaatactatactcttaaaattgatagccaagtgtgttttgttctgttttggatagcgtagtaactgtagaattactggttaatctatatgatttatcttagcttttaatttaggtgatttttttaaggagttgggaactagtcccgtcacttgatatattgtttttgttttcttttctatccctcaacgcgaaaagcctaaaacttatttactgtgtatctattgtaactatttttattatacaaattattttcacgaacacgtagaaagattgtatattaataccattgtaaaaattacgtccaggttcataattaagtgtttctttttgcgcgggagagggggtgtgttattgtgcaggtagcaaaaggacgacgaaggcttgaccagaattaactggcggaaggacctaacgactactgctccagattaattaagcttcagtcgtctatggatatggccatgataagctacacgagttagtacacgtgtaggcagtacgacacatggcccggccggccccctgattagcgggatgctttgtttgcttatcagttatcaccctcctcgtattacgacgacgacgacgactagtgcgtttggtggcgagcatgtgatgtgagtagtgttcatatatgcatcattgttaatttcgctttggttcttccctactctcttgagacgagctagctagattaattgttgatcagcagctaattaactgtgtgtgcctattagtaacacgtatgcaagctagtagcattgttctcataattgatcaatgatctctactggctactgctcatgctgaactgattaaactattgcatatatatattcagatagcagcacacgtacatgctgcactgcaacacgatcgaccgatcgagcatggattgaaagcttagaaaccaataaacctatgatcgatgatggatcgatcgatcggttggtgcacgcatgtggtttgtgtccttttgtcatgtgaattaattgagcgaatcgatcgaagcttttgctgctacaaggcaagctttactggggatggattctaatagctcgagtggacgtccacccgtttattgcatgtcaactaaatggctacgaaaaatttttaaaaaaattggcaagatagatcaatatgtaatatatcgctctataaacatgcaagttaaaattcaacttctacaagttgcaacaaaaataacaaatttaactgtaaatatacatatagtaatttgagttttgtttgttatttttgttacaatctgtagaagttgaattttaacttgcatgtttgtggattgatgcattacatattgatctatcttattcatattttttcaatttttttcataaacatttagatgacatgcaataaacgggtggccatccactcgggctgttaaaatagtttcccagctttacctcgttttcgctagaaagggataggcagcttagtatagtgcaggccggggccgggctctggcatgatccggaaaacatgcacgcaccagcgaacacgagcaccaccccatctccagcctctgaatttctcaaacgccacagcaccaactgctagctaggagtacatgtgcagtgtcgtctgttcgccaatttacctaagcgatcgatcgactgctaaattcaccttcacatatacagttgtgagtattcacatcacaggtaattaagcagaagcatatatagaattaagtaggaccatggtggtgtttgaaacttatgtagataaagataaaaattaagtgttttatgcaaaacgaggtggtgttaatatgcgattaatcgagttttaattattacaaacttgaaaaatatatttatctgatattttagagcaacttccatataaaaaattttcatatgaaaattttatattgactgaagtgccgtttagcagtttaaataacgtgtcacgaatatctaaatttcctttcaatttttgttggaaaaaagaacaaggcctgtgtcggccacgagatagataacgcctggtcgcctgctgccagtgccagcacagggggccggatcggaggaaagctcacagttttgatcatctgatcaatgccatggaacgggttaaaattcagagagaaattaaggaaactcaacggtatgccaaaaaacccttctcaggatcaatcaaatcatgatatcatataatcgctcaccgatcaagagatagggggtcccaagcacacaggcacatgcatgcaagaggtcgtagtagtggctgtagtacgtcttgtagccacgatctcctttcacctcaacaagacggagaaagaagtagtaacagcacttgtcacatcgaccggcgcgctgctggcatttacaatagtttcccgtggatgcagtagtcttttgtcaattgctcaatgtgcacgcacagtcggtagtattactctctccgttacgtaaaaaataaatctaaaatcgattgtgatatattctaagctcccatcaaatggcctaataatcagccaaagaaaaaaaatataaattttaaattttcaaacttaattttaagattgattttaacatattttaaacgtagtttctttttccgcattggcttttaagtcaacatgaacacatataaaagtttttacctacaaaaatcatttttaagttaccatgaacccatatataaaagccaaacgatgtgaccgctagtattataaacctagacagatgtatatctatattcgtagtggtaagatgtgtcatattcggtattaagggagtacacggtacgtgcagtgcatcaccgtgactgggttgctttttctgcataagttgtgtgcatgtttgcaacaaccaactgcttacttccaatctcgcatgttacttctgcaattctctgtatatccctgaatggtggcatgttccaaagtcacacatatactccagctagctagcactggcccaccatgcacgttgctaataacagtacaacagcagaagcagcacagttaatttccatcatcatgaattgaaccctacatatgtctgcccatgatcactttcccatgaaccttcactgcctatatatagtaatagaatccataaataaactacataaaaagttagctggattgggccgcgcttgcgcgagccggcagaaattgggctcctggcacgcggccgctacagaaatttcgccatattgggccgccttagtccacgagccgtattgggtcgttttaggtggctagcccacgggtcacgagccggccagcttcttctccctccccatggcgatcttgcagagttcattgccagctagtagtagctgttggaaatcaaagcacccacaagggacacggctaaactttacgttgtcattttatcaggtgattagctaaaataactcaaactgagtagcaacaaagcaagccaactgaaacttttgcaaactgcagaaaagagtagaccagtgcagttggcatggacagatctgtcgcatatacccttccattatcgttgtcctcctgtcgatgcaatgtccatctttttccagtccgaaagatctgcttcagagtatcttgatgcagagaactcggcaataaacaaacctgtactacgtgaagagcatcacatggacggttattggaaaccaccaaaagcagcagagacacacacacacagaacatgcagggttgtactgtaccagccacaacacatgataccttcatgcctgccactaacagaatctgaatcattggtttccagcaaaagtgcagagaagaaaataattcaactcatccgcatttcatttcttcatttccggacaatacacagcaatacaaaggttatttacagacaagagaaaggagtagttacatgctgctactgatatcaacaaggaattgggaccagcaagttcatctcacatcggcaaaaaccagaccaatgcaaccaatgaatatacatggtaaacctcaaaatgggcacaaaactgaggaaatatcaggtatcagctaccagtggcagcaattggatcaaaggttagaggccatgctctcctgctactttctccttgggaagccgaccgacgaaagctaggtccgaaccttgagcatcttattaggcagggatttgtatccatagcacccatacaaaacgacgggttaagcttcatcgccggcaacctctggcagctcaaggaacggaaggaggatgaacccataggtggcatgcgtgcacactggaattcagtccggtacagatggctggcgattgagggagtagaatcggagttcacagctgggcatgtggtgcaaaatgacaatgaaa

SEQ ID NO: 5240 - DNA, 18892 bp, Oryza sativa
  unsure (1)..(18892): unsure at all n locations
caatgggcttgtaactttgtttgggaccctggcccatgtggggcccatgtggggtgcgccccaatctggtggagcacgacccttggaccctcttggtagtcctcccacctctataaatagttaggtaccccttcagggtttcttgggttttgttagattaaagtttagccattgctacttgcttgcagcgcgcgtgtcggctagaccgtccgtctgcttgttcttcggaaccccaacttatcatttgtattaaattcctatttgcaatatcagattgcttttatcttgttcttgcttgtttcttcgatttgcttgcaggaatagggttgatctgcaccggcaagatcagcaacccacggagaggtgtatcgatcgctaaggcgcaacacaacgtctcgtacggttgtagtcggatcgtcaacgtttctcccaaatcgtagttatcacaactcaccgaaagattgggccaacaacagccttgagtgtcgagaggaactcagggtacatcaaagtatgccatgtttaatccctaccgagctccacacataaaccttagagtaggaatcaacaaggcaacatttggtaaggaattcaggttgatacatttagagagactaagtgaatcatttgagaaacttggctttcttttacaaaatcatttgaaaacttccggaataagaagttgaataaagatcgggtgattggtgctctaattgttgttatgtctttcaaccgcccaaggcaaggagaagcagtgtctcgtgggaatcaggggtaagggtaagccaccgtgccaaatattatttaatccgagagagagtacatataccttgcattgccaaatattatttaatccgagagagagtacatataccttgcacctatatctttgagatatgcagcatagtagcaactcctgaacaacaaccaagtctttgtttcctttcatccttcactcgggacgagcaaaagttcaagcttggggggttttgttgaccgtcgttatcgattagttgcgaccgtcaatattacaaaaatagaggagaactagtgatgcttgcaatacatatatctgttagaataataatattccactagtattaggtatactaaccttttgcagagaatgacaataaagtggaggagaatcaacatcaactcagacgataaatcaatcggacggtgttgagaaccagacttatgtatgaatgggccaagaactcagaaataacatgacacattaggccaaaattcacaagtctacaatggaggacaacaaaggaggccgccagctgaagatgggatgggttgggccagcccatggttcggccgaaccatagggctcggccgaacctcccgtggcgccgatggatgcagggtttggatggatggctgggattgatccccaatggcagttggaggatattaccgaccattccaaccgtcacaaccgtcattacctgcctataaaaggagctcctcttctcacttcactcacacacttcaagcaatagctctctcatttctttcaagtttagtttagtagtatctagctggtggaatagaaatagggtaggaatcaggagtccggaagccttcggaagagttcgggtatggctctaacagctttccttttctcttttgtaagctttgtacttttattagaatagtcttctaaatacatttatggtattgaaatattttccgagtatgtgagtacctattttacattatgttcatgttatactgtggggatacccgtgaccgtccaggatttcgatcgtgcacagattgatatacagaacagctttcgatacatatacccaagttttacataaattattacataaaagataactaagacaggttttaggggccgacaggccaaacacactccctacaaacaaaagacccaaacacaaaataggataaaaacaccacaggcaacgcccgagagcagatcgacctagaacaagaactcgtcagcaccataaaattcttcccgttcctacgcctcctcagggaaaaactgatcgtctgaaccacattttatgcaagaggtgagtaccgaggtacccagcaagccacatccataataatacaaatagaatatatgcaaggcgtaccaagaagaatatagttcatcaaggaggtttcattacaagcctattataaatagtttttccctactttgtaaaacattttatttgcaaacagttgtaaattatcattttaaaatagtagcaatattaatcaccattcaacctcatcttcatcatattccatattttaatttaaaatctactcataccatgataaataggaatcacctaatgacatagcttctcaaccggaagcatggcacattcgaatgatttaagactcatctctgcagagactgcccagctttacccacctgatgtcaatagctagctaagctgaggacaacatagccgttcgagagtcccacttactactagttactgcctagtgggatattgatccatcctagcagtcgggcacttgttgggcctaagcaaggctagacggtcgttgctttcacgggttccaccattgcggatcatgtcaacctggccgaagccccttccacatgtccaccccaaacctgctcatagagccaccctacagtctttcatatagtgggacaatgtactaggctaagtctgattactcagtcctgtggatgggcgcaaattacatcattttccatggcataagggggtagtccttatatccggggaaagccaccaaaactagcacaggcccgtgcatactttaagtgtaaatatacactttccacaaaataattataacaatatgcacggcctcacacaccacaacatccatcttcacccggaattaatcttccatatcactccaggtgagtgactcatatcaaataacatattttatatcacctgacacgccaccacatgacgacgggtaaaccatgtatatgagtatatatatttggtggtcttatccactagaatattatcgtgaagtatataaatctacacctaggttatcaaaggacgtgatataacaatccatggatttggctaataataacaatgtaataatgggtaataactaaactaacaagtttattaaaaaataattcatatgcaaaataattttataaatactcaatgcataaaataactaagtggttctctactaggtttcaatatgatcaaagattggaactgtggcttgccttgtggaacgtgtccttcggaagcttcaacgtagccttcttggtccacttcagttcctgcgagtccagtgggatcttcaacgcgatctaacgtacgcacaagaagaaacgaccaaataagcctataagaaaaatactataaataagaattaaaataaatggtgaaggttggagccagaactgtggaaagatgcactagaagttctatggtttcaaataacaaaatatcactgtaaagcaggggtttatggtgtatacaagaatggacatgatgcagaggtttgggtactggaaaccggaagaaattgtgtctagaggtggccgaaccaaaggtgaaccgaacgaaaaattattgaaccattaaacagagccttagccagatttgtttagctctgtttcctgtcttatggttggattcaaccatgatggcacagtaccacgtactactgttcatcttcttcagtgagacgaacctaggggcaagggaatagagaacagggaaaaagtaggaaggtggatgctaggctgtgatgggtgataggtaaggacatcatgagcaaaacacgttctcaagggtcgcgaactcgatgctgttgttagttttcagagacgacacccacaccgccggaacaggagttccagatctggagctatggtgacaccgggcatggaagtggcagctctggtggtgaacgcgggcgggtgagcgcgtcaaaaggcgttcccggatgagaaggttccatttttgtagttagttgataaagaggacattctggacgtgttggccacggtaatggccatgacagcccatgggagcttcggaaaagctcgatacaaaagcggaaaaagagggaaaataaagaaagaagcctcaccgatgagtggcaaagttgatggcgtgctgttgtggcagaaaaagggccagcgacggtggatttggccagtgaccttggcggcagtttggagtggtttgagggcagggatgagcttgagtgctcggtgtttccagagaaagaagaagaaggggaaaaaggaagggagaaaagcctctcgctaagattcgcgcgacggctatcggagatcggcgcgtggctcgtatgaggcggcacgggcgagcgtgtgcgagcacgggaaaggcacgaggcggcacgcgtgtagcgcgagcggccctgagcggcgtcggcctgcagcggctcggctggagccggcctacctaggctgggccaggacatgggctagaacagcccaacacagagagtgaccaaggaaaaggaaatccggaatatggcctggattgcaaggaacatggcccgagcagaaacacagtgttctatttgaatttttggagagatttttgtatggaattttggtaggatattttttaataggaattgataggatttgggatcttagaacaattgcatgatgactccggtttaacttaaaataaacatcagctcttctaatgattttgggaattttctctaggatatctcggattttgtttggtgagggaaactaaacaaggttatgtgggagtcgtaaacttagagggaacaaaagaaatataaggattgggaggctccaattcgaaagaacgaagaacatcgactttaaatattttcgcaaaaaaattatcttgaaaaatctagtatgttacatatactgaatatacggctagcttatctaggagatgctttggtgcgggtataatgtttgcttatgcaattactctatgtcatgacgatgatattatagtagtatctggtagtttagacgtggtgtctagattacgggatatcattatttggggttatatattgcggatgggaggtgggccgctgatggtgacagctcagtacgggtattcctccgcgccggtatatagtcgtaagttaatttcctggggagggtattcctccgtatttagctccggctgtatggtcatgacggactgtcgtaaggaactcgatagtcaggggtggcttctcgatgtaccaggagggcattggatagagggtattagctagtatatcagttaactagaatgtatgtatactatgtatattagaactataggaatagattttctttctcttttctttccacttagctcagataatatattatgagaatgagtagtaatgcttgtgtgtcactctacccttggattatcttaacccctgcttagaatatgattatcacaagtaatatataaatttttagaatatgattatctctctctactctcggttgaaatgctacaatggtatatccgtgcgcttgcggatgaactctgtaaccataatataccagaagtatttctgcgccattgctggaaattatatttctagtaatgtcgttaaaaaataccaacactcgggttgccgagtttcttacgacaacctgtcataaccctccaaccgaagtaggatacgaggtgtatccaaccccaagaaattgtatataaactgtagggaagacgcccgtactaagctgtcactatcagcggcctgcaaatcacctagagaatatacccccaaataatgataagtgataacctaaaccacatgcttatgttactacttattactctacagccttgcaatcagtgccgagcatctgagtccccgagacataactctcggcctagccagagcagacttatgacccggtaatcagacattataccagcatcaatgcaaatcccagaaggtttaaccacacagattatactacttacaaataaactaagaatggtactcatactctatgatcgtaataaagtaccgaacttgtatattatattgataaatggaagtcttacaaagaagaaaggaaaagctatagaacctttaccgaactccccgaagcctccgtggacttggaactactctaactctactctactaacactaatactaactttgtagagagctttgatccttccttgagtgtgtgttgaaagtgaaggaggtgaggtccttttataggtaggtatgatggatgtagagtatgggaattgtcggaaatgctccgcaaccgccatcaggagttcatccggagcgtccacgccaaaccccaacctcaatggctgtgatgggggttcggccgaacaatgatctggcccaaacggcctaatttttggcaggctgactcctcatttgctcctcaatccaaaacatggaattttgggcttaattgatgatgtcttttgtgagttctcagcccatctatccataagtctggatctcgaaagcctctgattgattgatcgtctattttgttgtcgattctcctccatttatatgtgcttctccaacatagatgttagcagcatagtatatagtggaagtagatattttatttggaatttatgcattgcaagcatagctagtcttcatacattgggtaatattgacggtcgaaattggtcgataacgaccgtcaacaaaaccccccaagcttgaaccgttgctcgtcccgagtaaagaatgaaaggaacaaagacttggttgtttattaggagttgctgcaatgttgtatatatcaaagaaacagatgcaaggtatgggtactctctctcaaaacaaataagtttggcacggtggcttacccttacccccgattcccacgagacactgcctttccttgtcttgagcggttgagagacagaacaacaattagagcgctagttacccattctttattcaacttttattacgggagttttcaaatgatttttgcaaaagaaagcaaagttcctcaaatgattctctagatcactcaaagtgtatgaatatggattcctcaccagatttgccttttttattcctactctaaggttgatatgtggagcttggtagggatcaaacatggcatacttgcattcacatttattactaggtcaaaaacttagactaaaatagatgactaatactcaagatcaagatcgtgcaaagtgtgaatatggtggaaaaatatgatggaaaataaaatatggataaagaaaatgcttctcccttgtgcttatgcttttcctccaaaatatcctttaattttcatagagagggtatggctactttttctcctttttttccttttttttttcatgctccaattttgggagagcaagaatatattatttttctcatagccatacctttccctcttttttttttttgcaaaggatttttctttggaaaggaagcatggatgtagaacttatttgtggataatgatgacatggatatggtagatgatatggatgctatcttccattgtagaagcttagcatatgtgtgcatatgtgggtgtatgatcttgatcatagagcatgaaaagtatctacacaagtcacaaggatttgacaaaatttaatggaattacaagtaaccaaaatgtatatggcttaatcaatatgaatattttggctctggtaggaattcatatcaaatgaggaactttcaaaattatcattttgaaaaataaaacatccggaattcaagtcaaacttagaacatgattatttatagcaactcttatttactatctcatatctcgcaacaacctagactcagatcagcaaagtgcagctcacttacctcaggttcctggataattgtaggctacccttattcaaattttgagagagtacttaaccatgaacccatatatgagagatataaaacagagcaactattcatcatttcaacatgaagaactaagcatgtcttacctagcatattaaatctaacctatctttttggtatttttagttttgcaaatttttatgttgttttcaggtttataaatgcaatgcaaaaatttaaacatgtaatttgaaagggaaatatgcaatatgatacaagttaccttagtggggggagagacatctctcccccaagcttgcttcttgctatggctcatggcggggatcaaatccctggtagcggtgaaacgcttgccagtcagcttgctattgttgcatcatagtgttgaagtttgcaacctgtgcatcaacagactgttgccattcccgtgactgtaccacattatcctccaaggtgtgttgttcgttccctgcctacagttcaagtgtatccatcctccgggtgagttctcccagatcccctcgagaggagacagcgacacatccaagaggatgaaggtggaccacttgaattggaggagcgcgagtatccccagtgcagctcctacggctcatgccatcggccgtcgctggcactctgccaggacgaaccaccagcgtcatgttgcgggatttgggttcaaccggggacatccgcggtcgggtcccaatagtccccatacatttacactggtggtgaagaggaagacgcctcctgaggtgcttctctcgccattcgtcatgttaccctgcgtgggacatcacgatgcaactccaattggagtggaatggttagttctcggcaattatacaaatgaaactccgggttaggtaaaggaatctcatttgtatagccgggaaacaaaaatataagataatcatttggaccatgtttgagtatgtggcattgaactaaataggcctcatcaacataagagcgggtgataggaatacttgcttataaagcatagtcccaactcttcatgctgaacgagtcaccaaagaaatacactcaaaaggaccagacaacttcatattttctaaccattgcttgatcatgggttgaacaggtgaaactttgattttttttattaaccatggcatacaagaggactagttcgtcttcacaaactatctggatatcagctctaagaaacaacatgaaaccaagcaacttatgcaacagccccaaggtaggatgatggatgtcactagttctaggctttttagaggatgagaaacctgaaatactttgccaaaacatacgcttgttaaaaaccaagaaatgcgttcctgaaattaactttgcatgttttgtcaaagcctagatgcaagataaggtctttccgagaaaggtgatattccttgcggaataaccagaaagtacaccatcgcctacctctagcaaggtacatagaaactgcatggtaagcaaacaggaacccagctcatctacacatgcaaatttatcccatccaacagcacgtcaaacagtatgaaactcagcatccatacctatccttttcaaaaggtcgagttgtatgcttaggtctgagcacacgttcggtccttcagcatatgataggcttgcatttcctggtcgcccacgaggtcgagatcggagttgtcgtacagcctcggtggaacgtacgcctcctccatggatgcatccgcagaagaaggtgtactcggcttttcgtgtcggcttgtccgtgagcttgattgtctcttgaatatgcccggaagtcgtttcttcattacagataccaagccagcatacagatggcaccgtacgaagcgttgtatggccacaaatgccgaacaccactattgtgggaccaagttggggaaagccaagtgttcgggaccgatatcttgagagaagctgaagcgaaggtcaggaccattcgggagaatctaaaggtggcccagtctcggcagaagagttatgcagacaaccgacgccgtgacctggaattcgtagtggatgactttgtgtatctccgggtcacgccgttgcgaggcgtacaccggtttcagacgaaagggaagctcgcacctcggtttgtgggtcctttccggatcattgctcgacgcggagaagtcgcttaccagttggagctgcccgcctccttgggcaacgtgcatgatgtgttccatgtgtcgcaactcaagaaatgccttcgagtgtcgtccgagcaggccgactcagagcagattgaagttcgcaaagacttgacccacgtggagagaccggtgaaaatcctgggcgccatggagcgcaggaccaggaaccgggtaatccgtttttgcaaggtccaatggagcaaccacgccgaggaagaagctacttgggagcgtgaagacgagctgaagacagcccatcccgttctcttcgccagttcttccgaatctcggggtcgagattccgtttaaggggggtaggtttgtcacgtcccaaaacgactctaaaatatatcccttaaatgatgcctagaataattaaaatccgtgtgaaagcctccaacaattaaaatgtgcaaagttaaaagtcaaataaggcttggaggatttttgtaaatttcctaaaagcctaaaatgcgtaaataaattttagtggaattttcagagcacaaataataattattaagaaataaacaaagttaaaatgattttataaaaagaaaaaccctaaaagtcccccttcatgaatttgatctttcatgatttgttaggtattatcctagagatctatattgatgatattgttctcaaatcggatggtatggaaggacacatagcagatttgaggttagcttttgagaggatgcgccgaaatggtttgaagatgaacccacttaaatgtgcttttagtgtgtcggcggggaagatcttaggattcatggtgcaagagagaggagttgagattgatcctaaaaagatagagaagtttcgtgatttcaaagagccgacatgcaagaaggaggtccaaaagttgctaggtaaattgaattatttgagaaggtttatttctaacctagtgggtagaatcgatgcttttgttcctatacttcgcttgaaaaaagaagccgattttacttggggggcaaaacaacaagaggcgtttgaatagttgaagagatatttgtctactccacccgttgtgcgagcgcctaaagccggaaagccttttcggttatatattgcttccgaagacaaagttattggtgccgttttgatgcaagaggaagatggcaaggaatatatcattacatatttgagccgccgtcttttagatgccgaaacgaggtatgtttttatagagagactttgtctatgcttatactatgcttgtaccaaattgaggcattatttgttatctagtacatgcattgttacttgtcaagccgatgttattaaacacatgttgagaaggccaattctaagtgggagaattggcaagtgggcatatgctttaatagaatatgatttggcttatgaaccattgaaatctatgaaaggccaaattgtatgtgattttatagtagaccatcatatagatattgcttatgagggagaggtttgcttagttgaagttataccttggaagatttattttgatggtttttcttgcaaagaaggtcaaggcataggggtagttttgttttcacctaatggcatgtgttatgaagcatcggttcgtttggagtattattgtacaaatactcaagccgaatacaatgctttattattcggcttacaagttatggagatggttggagctaagtacgtggaagcttttggtgattcggaattggtggttcaacaattcgccggagtttacaaatgcttggacggatcactaaataggtatctcgattcatgtttggatattattgccaattttgatagttttgttattagacatattgctacgcgtgataattctagagcaaatgatttagcgcaacaagcatctggctataatgtgaagaagggattatttctgatattagaagagccggtgcttgattttaaatctttgtgcgaaattggcaaaactggagaccaggggcggtctgaccggcattgcacggccggtctgaccggtgaccaggggcggtctgaccggccgcatgccgccggtctgaccggcgaccctgagcggtctgaccggccctgcgtggccggtctgaccggttctgggcagaacgctggggggcacatttcaatcaatttagaggccgaattaagtgtgaattcggacatttgtgcccagggaacagaagaagattggagaattcctttgattcgatatttgaaagatcctacacttaaggttgatcggaaaattcggtggcaagcattcaaatatacattgtttgatggagattgtatcgccgaaatatagatggtgtcttgttgaagtgcttagatgaagatcaatctaaagtggctatgggagaggtacatgaaggaatatgtggaactcatcaatcggcccacaagatgaattggttgcttaggagagtgggattctattggccgaagatgattgatgattgcttcaaatattatagaggatgcaaggcttgtcaacggttcggcaatgttcaattggcgcccgccgtcatgttgaatcccataatcaaaccatggccgttccgaggatgggctttggattttattggtcaaatttatccttcgtcatcaaaggggcataggttcatgctagttgctacggattacttcaccaagtgggccgaagccgtttctttgaagaatatgactcatatggaggtaattgaatttattttgaagcatattatccatagattcgatattccacaaacattaactacggaccaaggtgcttcttttatgtctaaggaagtgaagagttttaccgaatcttatggtattaaattgttgagttcttctccttactacgctcaggctaatggacaagccgagtcgagtaataagacattgttgaagttagtgaagaagaagattgaggaacacccaaagaggtggcatgaggtgctttccgaagcattgtgggcgcataggatttctaaacatggtgccactaaagtcactccttttgagttggtttatggtcaagaagccattttaccggtggagataaatcttggttctcttagttatatcaagcaagatgatttgtcaagtgaagattgcaagacattgatgggagacaatcttgatgaagtcatcgacaagcgcttgaaagcattggaagaaatagagaaagagaagaagagggtggccaaggcgtacaacaaaagggtgaaagcaaagttgtttcaagttggagacttggtttggaagataattatgcctttgggtactcgatccaaggagttcggtaagtggtctactagttgggatggtccttatcaagtatgcggcattgtttgagggaacgcatattttttggagacacttcaaggggagcattttcagcgagcaatcaacgggaaatacttgaagaaatacttcccgagcgtttggcaagacacttaggaggtactatggccggtaattggattatcgtcctaagaccaaaacatgttctatgtttttagattcacgttgttcatcagacaggcaggggggcatatgtttacacccaaatttggcacctaggattaaaatagaaaagattgccaaaattgggaagtctaccggttttctccgagtggaccggtctgactgccgtgtgttggccggtcagaccaccggttgaaggccggtcagaccggcggtgtgtggccggtctgaccggcaggtccgagtctgactgtgtttcgtcgggtctcgaggtttccttgctcgggaaggcatgtttcgggtttcctttggtttctaccccgagttggacgtggaggagggcctgtagagggcaagactaacccctatataagggacatggacggttcattgtaaaaaatcaatctacaatcaatcaatcgaatcgtttttcatattgcttttagttttctcttagtttgtccatctttgtcggtttgcgccgtaaaccgtccgccgccgctgcgagagtgcgacacctctttgtaggtttgtcctgaaaaccttccattttgcccacgagacgggtagttatctagaaatcggctctgctagccggtttagttatcaaaacccatctaggtttagctctttgctagatcgaggtggttggcgactctaggatcaccgcaaggctttaggtgctgcgatcgtgcttgtcaacttgtcacaaaacgttgccaacagtaacaaatatatttagcatgtgagacattaacccatatatcctccacatgcagtaacactatagcatcattgtgaaaacggttttaaaaataatacatatcttgtgagatattgcttttcaaatattggtatttttgaactttagcactccttatgaagtaacagaatatgtaatttgcagtaacatgggtatatacatgcagtaacatggttttaccaaatgtataaaattgttcaaaacactcgtacatcaatcagacctcactcaaagccacctacagactttacctatagcccacctattcgatcttcatctcgtaaaactgacatagtaaaattacgattatcgtgcagtaacataactacttggaagtggtaacatgcacccattatgcagtaacacttctacttttgtgcagtaacaagtatatacttttgtgcagtaacaagtatatggttagcatgtgaggctttaacccatatatttttgtttcgattcctggtctactacaattttactacgatgttactgccaaaagtgcagtaacgtcctatgtgttctacagtaacgtcatgtgttactgtacttttacaacaatgttactactagagcatagtaacatgttatgagtttcggtagtgaaagatattagaattgataatcatattactttctcacaaaattcttgaaacaaatagcatcattagataaattggttagaagaatgttctttgaactatgaggtcatgggttcaagtcttaaatttggcaatttattttttatttttctagaaaagagaaaaaaatgtttcagggagaaaaaaaaacagaaaaaagaaagagagaaagatcaggaggagggagggggagcgagagagatcgggaggagggaggggaatcagcagagagaggggggaacaggagggagagaggggaggagggaggggaagcaggagagagaggggggaacaggagggagagagagaaaaaaaaacagaaaaaagaaagagagagagatcaggaggagggagggggagcgagagagatcgggaggagggaggggaagcaggagagagagtggggaagaggagggagagagaggggaggagggaggggaagcaggagagagaggggggaacaggagggagggagggatacggatgagaaagggagggggtatagaatagtcttaccatatatatatatatataaaactaataaaaatatttggatttttccggtcgtcacctcgagtccttacggtgatttttcatcccaccctcgaatcccaatcgcaagccaaaaaaaagaaagtccgaatcccaatcgctagccagaaaaaagaaagtccgattcaatcaaaagggcgataaaaaaatctattggtctgcttcgtccgtcgcccacatcacgcgtgccccctctccaaatcggaatcatcacaaaatcatcccctctccaagtcccaatccaaatcggaatcatcacaaaatcatctaaaatctaaaatagttcataggaaatcaacaaattatagtgtaaaacaaatcacacaggagggaggggcgagcgctactccttgccagacctccacgccgcctcgctgccgggagctgtcgaccggctgctgctccagggatccgccgaccagccgttgcaccgagagggatccatcgctgcgccggggatccgccgacccgccgctgggccgccgccgccgcctcccctccttctagatgcggcggaggggagggngccaccgcctcccctcccctcccgccagatccgggacaccggatctggcacacagggccgcctccacctcctctcccgctggatccagcggatgggagggcaccggcggcgccgccgccgagacactgggccgccgcccctgcccgccgcctcccctcccgccggaaggaagggtctgcaattcctatttctatcatctcatgcaaaacgaggagaatgcaaggcaagggcgagaacaataaaaggaacaaatccttttaggagggattgctggtcttcttaatcctctattgggcacaagaaaaaggcttttttgcctttttcttgtgtcgattcttcttgtattgtatcgaaatatgaatcttttttcttcctattcggcaaagattactatttcttctttatttgggtctgtctcttgaacctcttttgcttaggttcaggcgatgtagtggacaaaaagagggaaagaaaatatggcgggggacaaattttttgtgaccaaatagaattgcttgacttgttcaattaagttcaatttagaacttacagaaattttgcaaaaaaaacggataccacctgcaattttctcgtcgctggtagagggagggagagcggaggaggagagaatgagagaaggcgcgcgggcgaaagagagaggattagtgcgagagaaagaaacgaggcgcggtgggcggaagaaacgaggcgcgcggctcccaccgctttctcgacgtatgcggatgcaaaagtcacggactgtgacttttagtcactcacggtgtgactttcaggtcatatccatccgtccgttcctttttttttgactaaaaaaattaaggttgcaatttgttattatgtgaaataacgatatctatatctatctactctatacctaattacaaaataagtaaggattccgtaaatttgttttgtctgtcgttatattattttttttcttccacaacgcggtttttttatctggtttattttccgtctgattggttttctctcaggttttttccgttcagctttttttttggcgcgtgggtttttatggtttgtttttttcccgtccgattggttttctctcagtttagggtttagggtttagggttttttccgtccgattgttttggatcgaaaaaaataactaactggcaacacaacaaaaaaacatgtatattattaaaaaaacagatcaaccaaatcaaacgaaaaaaatgagcgacccagaatagacctgaaaaaaccatgtttattattaaaaaaccagatcgggcaaaaaatactcggaaaaaaccatgtgtattcttagtgggtcacgatttttttgttgtgtttttttggtgggccctgttttttccaacggctgttttcgatcagttttttcttgtgcacacggaaggattgaatcccaaatagagttacctaatctctatctttacctattataaaaattgaagatgatttcatactcaccttaattttcatccgtcatctgtgttagacacgtataaaaccaaattggaccggaaaaaacaaccaactggaaacacaaccaaaaaaccagatcgaacaaaaaaaaccattgtattattaaaaaaaatcaaccatgtctattattagaagaaaaaccaaatcaaatggaaaaaatgagcgacccggaatagacatgaaaaaaccatgtttattattaaaaaactagatcgggcaaaaaaaactcggcaaaaaccatgtgtattgttataagaaaaaccggatcggaccggaaaaaatgagcgacccagaggtcaccgttgtcgtttctgtctctatcaataaaaacaattttgttagtcgcgttctgctgttcaggtgttcttcgttgccaatgtccaccatcaatagatgactccaattgttggacacatcctaccacagtccgcaccaccgtttgatcgtcagactattcacgctcatcttgagtactatgagaatatgagtatatcaatgtgcaatggtggtttttatccatcctaattatcattaaaatttataatcaatacctagcctaagaaacaattaatccgtagcgaagcactggcattttgctagtgtgtgtgtgtgtatatatatatatatatatatatatatatatatatatatatagagtatgtgttccaatagtatctactactagataaacgcttttctctcccggttcgcaaccccttttactctcaggtagcgaactgggagaaagaaactgggacaaaagatgacaatctttagtcccggttcaaatacccgggagtaaatattcatctttagtggctgagccatgtcccagttggtccccttttctttttttttcattgtttctttcctacttacaaggttaatccctgtatttcttcccaaatcgagtaggattcatatcccaaatcaaaccccaaatccccaaatcaaagtaacatcccaaatcattcacatcacaaatcgtaagttacttatacaaacaaatcaagtacatcacaaatccttaaaaaaaattacacacaaatcaaatacatcacagattatacatctcagatccatgtaatgaatcacaaattctaaaaagagaaattatacatctcagtgaatcacatattatcaaaaaaaaagaaaaaaaaagaaaaaaggggacatcgacaaaggagagggcgaccggccgcctccatgcatgcgcgccggccaccgcttgccacggccggccccgccggccgctgccgggctctggccggcctgccccccgccgccgaccgctggatgggataggacaggggagaggaggaggaggaggaaggggagggtggacgaggagaggggagttgaggaggaaggggatctaaggggtagaaggagaagggatgatccaatcttatctaaatatcttggtgaggaatttctcgtgtgg

SEQ ID NO: 5241 - DNA, 1349 bp, Oryza sativa
gcgcgaatcacgaagtgagtttttgccacgaacgcacccagtaacactccaatatgtccaaaaatcatgttttggcgttttttgaactttttgattccggtcaaaaacaacgctccttcgtgtgccaatattggcattaattgacaaaagttcgccgcgcgaatcacgaagtgagtttttgctatgaacgcacccgatacactccaatatgtccaaaaattatgttttggcgctttttgaactttttcattccggtcaaaaacatcgcccccgtttgggccaaaatatgccaatattggcattaattgataaaagttcgccgtgtaaatcacgaattgagtttttgccattaacgcacccaatacactccaatatgtccaaaaatcatgttttggcgttttttgaactttttgattccggtcaaaaacatcgcacccccgtgtgccaacattggcattaattgacaaatgttcgccacgcgaatcacgaagtgagtttttgccacgaacgcacccagtacactccaatatgtccaaaaatcatgttttggcgttttttgaactttttgattccggtcaaaaacaacgctccttcgtgtgccaatattggcattaattgacaaaagttcgccgcgcgaatcacgaagtgagtttttgctatgaacgcacccgatacactccaatatgtccaaaaattatgttttggcgctttttgaactttttcattccggtcaaaaacatcgcccccgtttgggccaaaatatgccaatattggcattaattgataaaagttcgccgtgtaaatcacgaattgagtttttgccattaacgcacccaatacactccaatatgtccaaaaatcatgttttggcgttttttgaactttttgattccggtcaaaaacatcgcaccctagtgtgccaacattggcattaattgacaaaagttcgccgcgcgaatcacgaagtgagttgttgccacgaacgcacccaatacactccaatatgtccaaaaatcatgttttggcgttttttgaactttttgattccggtcaaaagcaacgctccttcgtgtgccaatattggcattaattgacaaaagttcgccgcgcgaatcacgaagtgagtttttgctatgaacgcacccaatacactccaatatgtccaaaaatcatgttttagcgctttttgaacattttcattccggtcaaaaacatcgcccctatttgggccaaaatgtgccaatattggcattaattgataaaagttcgccgtgtaaatcatgaattcagttattgccattaacgcacccaatacactccaatatgtccaaaaaacatgttttggcgtt

SEQ ID NO: 5242 - DNA, 2719 bp, Oryza sativa
ctattacaggtgatgcaacaccttgtttcttcaattgcggctcactaagatggaatttcgcaatgggttggatccgttgtaaagacaactccgagagctttctatcaagtactcgtggacccaaaacggagctcgtatgcatatttggcggccatttgaagtcagcaatgtagcaggtggccgaatcgaattccagcttttagagaacttgatcttgatgtcttcttgtagatccatgatgtgagcaatggttgtatccatagtagccatggtcacatcatcctccccttcttcatggaaaaacgtcatcggtttttccatatggtgctcctcacgtagtctatttaaaacaacctgtttcttccaatcaaaacaagacaaactcgagataattttgttagcaataacatttctctctagcttgcatgttttatccacatgtacagaaggttctaaatccgaacatatgtaaactctatgcaccaaatatattcctctatcattatattcgccaaagatatgagaaatagcattagttggacatggcaaatcaaatttagcaaataatttctccttcaaattttcgagctcacaaaaatcatcaaaccaaacatagcccaaagtatttaaataagatagaaattcatgttcctctacttcatttgcaatgtgaacaacatgcttaaaatcagcacacaaagaaacactagaaatagcatgttcattcactagttgtggcatggatataagtgaagcattatcacacaactcttctttatcacaaggaacaacaagtaaatcaacttgtgacaaaggcatctcaacaattggttccaccaatggttgctctactatagcatgaaaagtggacacgtgtagctcagcttgagaatactcacattcatttatctcagcacaatttaatttaccttgcaaactttcttccgaaaccgcaggtgcttcatcctctttcttatcaagtacaccattctcctccttttgttgaatgttctgaactccctgcaaaacgttagtaacaggagagacaaaagattgctcctccaatgtttgcacatcatcattgcataaggatataggagattcagaaatgggagataaatcacattgttcatgcttcctcgcatttgatatgatctaactctcaatgctacgagcaagcatgaataggtgcccaatatgattatatgtcacattatcaaacaaaacctgaattttagaattaagcccattgaaaaatctacgcattgtattttcattgcactctttgagatcactgtagatgatacagaccttaaattcatgaatgtagtccttaacagttctatcgccttatttcagatgttctaatttctcccgaagagtacatttgtaataagaactcacaaagcattttctcattatggttttgaattcatccaaagtttcaggtttgttacaaacataactccaccaaaataatgcagaagaggtaaacttattactagcagccttaatcatttgagcatcagaaaaatcatatatatcaaattcattgtctactgctagctcctaatcaatatatgcaacaaaatcatacttcccatcatagaatggtaactttgatgcaacttgtgcaaaattatagtcatgtacctcatatgcatcacgtggagaagtcgtcatatctcatcgaaggtgtagaagttgatgttctcgtattcccttgcgcaatcctgccattgttagtagaaaacaagaaacacacacaagaatatgcacgttcctatcaactactaggtagtggtagctcaaatatcacacacactcaagcttttaaccaagctcttacaagttcttaccaaagcaagcggaatggtgatgtacaccgactcaaccaagcaccacaacgaagtttggatgtatgaatgccttggcaaacacttgttgtacggctgtaatcaaatatgtggagctctgggtaggcttaaatatgtagcaaaggaatagcaaatgctcaaatcagagaatgcaaagttgaataatcgttcaaagtcaagtaccgtgctggtcctaggctagaacgtactagagacgcgagcctagacacaaacgataccacaagatagcactaggaacaactcatgcacaactctgatatataaagttcagctcaaacataacagtattttctcttttctttctttcttctttcttcttttcttttttttcctttccttttcttttctgtttttttttggtgcggctttttgttttcttttttttttcacctttctgcctttttttttctcacttttttcttgattttttttaacaaaaactgactcaagtaccttaatgtaagattacagggactcaaacataaatataaaatttacagggactcaaatgtaaaagtctaaacccaaaattaaaattatacaaaaaaaaaatggaatgctgaatttatgccggttccgtttttccaaacagatctcgaaaccgacaccaaacaaaaattcgccaaggtgtttgacacaactcggaaccgtggaagagagggagggagtcggactcggccaaaggggcgagtgggactcggccaggaggtggagtggatggcagccgaatttggtgtatgggataaaaaggaaactgatttttaaccaatccaatctactatatctttccaaaacaaacttgactacttccaaaatcagat

SEQ ID NO: 5243 - DNA, 2286 bp, Oryza sativa
tagacagtgaaacgcttaccgaggtgggggcatagtaagcaccggagcagttaccaacctctacttcaatcgctggaaactatgctcacattggtccgtccattgaaacttacacatccttatgtgcgacatcgtcattggtttagcgataattgagaaatccttcacgaagcgtcgttagtaccctgccatacccaaaaagctcctcacatccttaacattagtcggcctttcctacccgacaacacttgaaactttgctagtatcaactgatataccctgctgatcgattacatgccctatgaaagtcacttcacgaagtcaaaattcacacttctttaatttagcatagaacttgttttcctgtaaactccctacaccatcctcaaatgacactcatgctcctctacatctttcgagtaaatcagaatatcatcaataaacaccaccacaaacttatctagaaagctatgcaacatgctattcatcgcctccataaaataggccagagcattggtcaccccaaaagacataactctacactcataatgcccatacctcgtggaaaatgcggtcttctcaatatcctcttctcgcactcgaatttggttataaccagattgcaagtcaattttagaaaacaccttttactccctttaacttatcaaacaaatcttcaatatgaggcaatgggtacttgttcttgattgtcgcagcatttaaggcccgattgtccacacacatacgacaactcccatccttcttctcagtaaaaataacaggtgcaccccatggcgacacactccgtcggattaacttcttggataatagatcatctaactgttttttttcaactcttcttggaaaggacgagctaaccggtacggggctctagagatcggtcgtgtaccaggaacaagatcaatacagaactctacatcacgctcaggtggcatccctggaaattctacgggaaaaatattgggataaacttcgttcggactccgattattataaactcatagtctatttttcactactcagcgagttctacgcatccacggttcctgatcgcctattcgaacaatggtttaaaaattaaacttttgcacgtttgtgctaatattccccgaaatatactattttgaaactcggggcattacagatacacctctcagagggttgttgatcttgccggtgcagatcaaccctattcctacaagcaaatcgaagaaacaagtaagaacaagataaaagcaatatgatattgcaaataggaatgaatacacacgataagttggggttttgaatacaagcagacggacggtctagctgacacgcacgctgtaaggaagtagcaatggctaaactttcatctaaacaaaacccaagaaaccctaaaggggtacctagctatttataggggtgggaagatgaccaacggggccgtagggtcgttctccaccaagttggggtgcaccccacatgggccccacttgggccgggatcccaaataaagttacaagcccataggcccattataggtgacgcaatgccttgtgcgtgtgagtccggacacacgagatggaattcggagatgaggctggatccgttggaaagagggctccgagagctttccatcaagtactcacggtccaaaacggaggtcgtatgcagattcggcggccgtttgaagtcagcagtgtagcaggtggccgaatcggattccggcacttggaggactcgaacttgatatcttgttgttcatccatgatgtgagcaacggatgtatccgtagtagccatggtcacatcatcgtccccttcttcacagaaaaccgtcctcggtttttccatatggtgttcttcacatagtccattcaaaataacctgtttcatccaatcaaaactagagaaactcgaagtagtgtgattggcaataacatgtttctctaaatctaaacaaatgaaaactctatgcaccaaatatattcctctatcattatatttgccaaagatatgaaaaatagcagtagttggacatggaaaatcagacttagcaaataatttctccttcaaattatcgagctcacaaaaatcatcaaactgaacatagccaaagtatttaaagaagatagcaatttacgttcctcaacttcattagcaatgtgaacagcatgcttaatatcaacacacaaacaaacactagaaatagcatgttcattcactagttgtggcatgaatataagtgaagcattatcacacaactcttctttatcacaaggaa

SEQ ID NO: 5244 - DNA, 3937 bp, Oryza sativa
tacagatacaaccattgctcacatcatgaaagaacaagatgatatcaagatcgaatcctccaagtgatggaatcagattcggccacctgctacactgctgacttcaaacggcagcagaatctgcatacgtcttccgttttcggcccatgagtacttgatggaaagccctcggagtcctctttccaacggatccagcctcatcgccaaacttcgtctgggaccccggcccaagtggggcccatgtggggtgcgccccaaccaggtggatcatgaccctagggtccctttggtcatcctcccacctccttaaatagctagctaccccttcagggtttctcgggttttgttagattaaagtttagccattactacttgcttgcagcacgcgtgtcggctagaccgtccgtctgcttgttcttcggaaccccaacttatcatttgtattaaattcctatttgcaatatcagattgtttttatcttgttcttgcttgtttcttcgatttgcttgcaggaatagtgttgatttgcaccggcaagatcaacaacccatggagaggtgtatcgatcgctaaggcgtaacacaacaacgtcttatacgtttgtagtcgggtcgtcaatgtttctcccaaatcgtagttgtctcaactcactgaaagatcgggccaaacaacaaccttgagtgtcgagtggaactcagggttcatcaggtggtatcagagctttcgttgctcggtgagtttttatctagctataacctgaaaattttcctacaaaaaaaattgcatcctgtacctagccatctttgtgccattgtattgttcttttcagtttttgcgttgttgaattttgtgttgcatcgtcacgtcgtgttgctggtcttagcgtctagttcgtttagagtttcgaattctagtcacgttttgtaccactgtcgtcgcagccgctgtgtcttggttgtcatcgggacctacgaaattggaatcgtctttccgccagagttccatatttgtagttttcagaagtttctgtcggttagttttgaagttgcgtctagggtatgctgtttagacgggcttgtgtttgtgccgtggttatgttttgccgtgaggaagaaaaaatgggaaaggaatatagcatatctgtttggattcggttcggtggaaggaaaggaaaataataatacattggatcggcaaatcagtttctgatttatctcattcatttaatctggccggccgatccatccacccactgtacccgcacctccccaccatctacagttgtttcccccaataccgtgagtagctcaacaccatggtgaaaatttttcaagtgtcggattggaaatccgtttgaaacaacggaacctatgagggacgagagcattccatttttgtatagttctaattttgggattgaacttttacacttgagtccctgtaatttttagattcgcatttgagtccctgtaatcttgcattgaggtccttgagtttgtttttttaaaaaaaataaaaaaaaggcagaaaggtgcataaaaaaagcaaagaaaagcagcaccaaaaaagaaaagaaaagaaaaagaaaagaaagaaaaaaaagaaagaagaaagaaagaaaagagaaaatattgttatctttgagctgaacttcatatatcagagtgtgcttgagttgtttctagtgctatcctgtggtatcgtttgtgtttaggctcgcgtctctagtacgttctagcctaggaccagcacggtacttgactttgaacgattattcaactttgcattctctgatttgagcatttgctattcctttgctacatatttaagcctacccagagctccacagatttgattacagccgtacaacaagtgtttgccaaggcattcatacatccaaacttcgttgtggtgcttggttgagtcggtgtacatcaccattccgcttgctttggtaagaacttgtaagagcttggttaaaagcttgagtgtgtgtgatatttgagctaccactacctagtagttgataggaacgtgcatattcttgtgtgtgtttcttgtttgctactaaccatggcaggattgcgcaagggaatacgagaacatcaacttctacaccttcgatgagatatgacgacttctccacgtgatgcatatgaggtacatgactataattttgcacaagttgcatcaaagttaccattctatgatgggaagtatgattttgttgcatatattgattaggagctagcagtagacaatgaatttgatatatatgatttttctgatgctcaaatgattaaggctgctagtaataagtttacctcttctgcattattttggtggagttatgtttgtaacaaacctgaaactttggatgaattcaaaaccataatgagaaaatgctttgtgagttcttattacaaatgtactcttcgggagaaattagaacatctgaaataaggcgatagaactgttaaggactacattcatgaatttaaggtctgtatcatctacagtgatctcaaagagtgcaatgaaaatacaatgcgtagatttttcaatgggcttaattctaaaattcaggttttgtttgataatgtgacatataatcatattgggcacctattcatgcttgctcgtagcattgagagttagatcatatcaaatgcgaggaagcatgaacaatgtgatttatctcccatttctgaatctcctatatccttatgcaatgatgatgtgcaaacattggaggagcaatcttttgtctctcctgttactaacgttttgcagggagttcagaacattcaacaaaaggaggagaatggtgtacttgataagaaagaggatgaagcacctgcggtttcggaagaaagtttgcaaggtaaattaaattgtgctgagataaatgaatgtgagtattctcaagctgagctacacgtgtccacttttcatgctatagtagagcaaccattggtggaaccaattgttgagatgcctttgtcacaagttgatttacttgttgttccttgtgataaagaagagttgtgtgataatgcttcacttatatccatgccacaactagtgaatgaacatgctatttctagtgtttctttgtgtgctgattttaagcatgttgttcacattgcaaatgaagtagaggaacatgaatttctatcttatttaaatactttgggctatgtttggtttgatgatttttgtgagctcgaaaatttgaaggagaaattatttgctaaatttgatttgccatgtccaactaatgctatttctcatatctttggcgaatataatgatagaggaatatatttggtgcatagagtttacatatgttcggatttagaaccttctgtacatgtggataaaacatgcaagctagagagaaatgttattgctaacaaaattatctcgagtttgtcttgttttgattggaagaaacaggttgttttaaatagactacgcgaggagcaccatatggaaaaaccgatgacgattttccatgaagaaggggaggatgatgtgaccatggctactacagatacaaccattgctcacatcatgaaagaacaagatgatatcaaagatcaagtcctccaagtgctggaatcagattcggcttacatgtgtgtgaaccctcgtccaggaatcagccgaggcacacaataaaaaattgataatagagtacaattattactctaattaataagcgaataaaatgtcattacagaggtagatagttactctcaatcaataaagatataagcagcggaaaaaaaataagataaacgggcagacgactccactccacaggcagcttgaccagggctacacctaatcctccacaccatcagcatcactgtagaactcctcctctgatgaatgattgcaaggtgagtatatgacatactcaggaagccac

SEQ ID NO: 5245 - DNA, 4007 bp, Oryza sativa
tattgacggtcagatattatgatttaaggaccgtcaacagtaacctcattccttcgttccaacaaaatctaaagaactcacaactccaatgaggatcaaacttatcaccttgacaatattcttcatcctgatcaccttgataatatctatcatctcggcgatgtctaaaattctgaaattcctctgaacttgtttgtcatgtctcttctggtacttgttaatcaatctaatgctatcaatcatggcatacaccatatttacaggaaaaaggatgtccatcaatcttcatcgacctttttccatcatcaaacttgattcttccttgttcgatggcggattggatttgctgcctgaacaccttgcacccattagtatgatgagatcctgtattgtgccacttgcaaaacttcctcttcttcagctcttcagccgatggtagaacatgacctactagcaactggatttgcttttcttgcaacagtaaatcaaagattttgttggctttattgatatcaaagtcatattcctcttccttgtttatatacttaacccattgacacatagttgtcttcttgatcatggaccactctgccaaactgatctctaggtcttcctagttgtcttcttgatcttggaccacttagccaaactgatctctaagtctcctcctcagaatcataaacatatctatagacgtagttaaccttcttgaccttcttggcctcctgaaaacgttgctcatgagccgataccttctgagccagatgtgctaagctctcaaagtcttgtgatgaaaatttctctcttatcgacccaatcaatcactggaaagccaaatcgactagctgtgaatcggtgttgacggtcgttatcgatcagttgcgaccgtcaatataaccaaaatttaggagaactagtgatgcttgcaatgcatatatctgttaaaataataatattccactagtattaggtacagtaaccttttgcagagaatgacaataaagtggaggagaatcgacatcaactcagacgataaaccaatcggacagtgtcgagaaccagacttatgtatgaatgggccaagaactcagaaataacacaacacattgggccaaaattcacaagtctacgaaggaggactacgaaggaggccgctagccaaagatgggctgggttgagccaacccatggttcggggggttcggctgaacctcccgtggcgccgatggatgcaaggtttggatggacggctgggattgatccccaatgacggtaggagggtattaccgaccattccaaccgtcgcaaccgtcattacctacctataaaaggagctcctcttctcacttcactcacacacctcaagcaatagctctcccatttctctcaagtttagtttagtagtatctagctggtggaataggaatagagtagaaatcaggagtccggaagtcttcggaagagttcgggtatggctctagcagctttcctttcttcttttgtaagctttgtacttttattagaataatcttctatatacatttacggtattgaaatactttccgagtatgtgagtacctattttacattatgttcatgttatactgaatatacggctagcatatctaggagatgctttggtgcgggtataatgtttgcttatgcaattactctatgtcatgacgatgatattagagtaatatctggtagtttagacgtagtgtctagattacgggatatcattatttggggttatatgttgcggatgagaggtgggccgctgatggtgacagctcagtacgggtattcctccgcaccggtatataatcctaagttaatttcctggggagggtattcctccgtatttagccccggttgtatggtcatgacagactatcgtaaggaactcggcagtcaggggtggcttctcgaaatactaggagggcatcggatagagggtattagctagtatatcagttaactagaatgtatgtatactatgtatattagaagtataggaatatattttctttctcttttctttccacttagctcagataatatattatgagaatgagtagtaatgcttgtgtgtcactctacccttggattatcttaacccctgcttagaatatgattatcataagtaatatataaattattagtcaatctatctctacatgatcttcccacgggataaaataaatacgatacccttagaatactctcgggtgaaatgctacaatggtatatctgtgcgcttgcggatgatctctgtaaccataatataccagaagtatttctgcgccattgctgggaattatatttctagtaatgtcgttaagaaataccagcaagcatttttggcaccgttgccggggaagattcataatagagattgcttgaactaatactttatatttacctctgtataatcatttcctttgcaggctaaccttggttgttttcactttttgttgtgaaaacagggtagtgcatgactggtttcaacctgccggaaaacttcaaagaatatccagaagctttcttccggggcgtcagaccgcgagccgttgctccgcagaaaactctaccaacagagaaaccagccataccagcgccaccgatcttcaatactatggccagcaagactcttcgcgagttcgctgctccctctactgacaatgtggccattgggccgcaaatcaacataggagacatggatttcgacttgaagtccagccttatcacaatggcgcaggctagcccgttctgtggcaagcctaatgtggatgccaatgctcatctgcaacagttcctggagatctgtagcacgtacaccatcaagggcgtcagtcccgacgccatcaggctgcggctgtttccgttctcccttctcgggagagcgaagcagtggttttatgccatccgtgctgctgttaacacctgggacaaatgctcaccgggattcctctcgaaattcttcccgatgggtaaaaccaatgcccttcgtggaaggatttccaatttccagcagacaagggacgagtctattcccgaagcattagaacgactgcaggagtatgtggccgcttgtcctcatcatgggatggacgactggctgattgtcacgtcctgataaattcatcccgaaataaaattcattctctaaatggaataatagaattaattaaaattcgaaaagaaattggttaacactaaaatacgtacaagaaaaattcgaatgtggcccggagaatttttgttaaattctccttggtctaaaatgagccctcaaattttacttgaattttcagagcaccggaaatatttattaagcaacaaaaacaattatcaaagtttattaaaaagaaaaacctaaaaataatcctccttcctcatttgggccaagtctggcccaaagtcctctctctctctctctctcggcccgcagccaaagtcctctcttcctccctctctttctctccctctccttctctccctccttctcttgggcctccccttccccctcggcctaggtcccttttcctcccctcccgcctaggccgcgtcccggcccaagccgccccacccagccgccccagcctcccgaggcgcccccctgacgcgcgccacatgcgcgccgcatgcgcccgcgtggggcccacgcgccggtcatcttcctcctcccggacggcctcctctctctcccgtgcaaccctagttcgttcctccccaaaatccacgccattcaaaccgggaattccaaaattgattagggggaattaattcccattccttcctcttcaattccccctaatttcccccttgattcgtgcccccaatcgtcgggaacgcccgcgccaaccccggccaccttccatggccgccgggcgcctattccgccgccggtccccgcctctcccgtggccagctccctctccccccctataaaatggaaccccctccgggcgttgtctcgttttagccccttcccgagattctccg

SEQ ID NO: 5246 - DNA, 11422 bp, Oryza sativa
ggccgctctatacgtagaggatcccccctccgaatgcgcatcacaacatactatagacaagcgggggagactgaggttcaaaattggggctgatcgggcgcctgtcacaccctgaaaatcgctaagttataaatcgttgtgaaaaaaggaatttttagaaattatttaataattaaagtaattgtgtgaataaaatctatgaaatttttgaaagttaaattgatatagataaaattttattaaatactttgtgtgcccaagtattttcaggatttttcttggatttatttgagcattggaagtatttttaataaatgaaagatcatttcagtaattatttaaattaaaaagttgattaaaatttctcttctgtccactcctctcctgtctctcttccttagcccgcagcagcccactcttcctttttgtcttacttagataaagtccattttgggtccctcttgcaatcaggcctagtaaagaaaaggaagcccgaaaagaagtctatttgacagagccagttcatcccgataccgcgccaatctccaccgaatccgtcgcatcccgtgctctgtttccaaaattggttgcaaaaacggattcccctcgatctcctctaccttgtccctaagaaacccctttgaataccgttgtatatcgcgtgaattcgatgcggttttgagctccgtttttccggcgaaccctaactaatccgtcgccgattcttcccgtaaccgagccgatctctccctcttccggctataaatagcagtcccaagacctcctcttccgtttgctcctttttcccgaatttttccctaaccctagagccgccgccacgctcggctttgctctcctatgctggccgccgctccagccacgtcgcgccgcctcctcggtcgaccccgacctgcgccgtcgcctcccttggcttcgcaagggtgagagctacctcggccactggttgttttgcgccaaatcccaccagaaggttgccgtcgccgtgaaccagtgggttattgccgtggtttggtctccagccgtgtcgttcgtcgtcgtccatcgtcgctttcggacgccgttgcttccactggattcgcagctgtgaggagaagcccgtccacccctccgttgccgccgcttgtcgccggaaagccgtcgccatcgtcaaccaaggtcgccgccctttggagctcatcgccggccatctccctcgccgtctgtcgtcgcgtaagtggtggtaagggccgtgcttagaaatattagctcattaatgggataaattatgcttcactattacttatggttctattaaatggtagctcacgatgggcaatcgtgttatgataattaattgataattaaaatatgattaatggtgggttgtgagcacatggttttgaaggttgtgctcataacaattaaggaccggttcgcgagctactgttgtgaaacattaaccgtgccaaccacaagccagcgtgggcaacggctttaccttttgtatagtatggttcattacggggtgccagactgagaagtggtggagataagcccacgggggtcgctggggagtccatgcctctggtttttgagggggtgactacgatccaggaaagatgcactgctttgagttgagctatgcgagaggtcttgtcacaactacacaaatggtgacatgttcagcatgggcacatgatgatatggtgacatattgtggagttgtgtcttgtgggtacagtggtacacctctggcttgagtaaaactattcgaatagccgtgcccgcggtcatgggcgggtctaacaatgtctttcgtgattagtctcatacttcttaccataataaatgatgctataactggtaataatttgattagctcctggtttggaatggtgcattcctggtttggagatagatctttacagccgggtatggttgttcaggttggttgggcctgtgcagcatgggtgtgctgttcagtgttgattaatattgatgattaattactctattgttttacaattcttaaatgtttgctaaatgctgcttttgcaaatgagccatatattatgccattgtttggtatccttgtacacttgcatatttgttgtgcggcttgcggagtattccatgtactcaccttgcaataatcaatcaaacctcggttgaagacaagttgcgaaggagaagacgtttggcttataccctagttgagctgcctgtgggagtggagccggagcttcgctagaccgtaattccgctgttgttttctcttttcttttgtaagtatgtaacattattattatgatgaatctgtatattaaattgtcagtttgtgtacctcggctgattcctggacgaggatttcatgcacaaattagttcggaaattactagtgaatttctgggcacgaagattctattgtctacaacgaacaagatcgcataagttaaaaatgcatcggcttgtagttgataaaattaacagaaggtgagaattttaccagtgggacatcgtcagggaaaaggtttgtcaaatacatggacggtgattgatggaacaggtgttttttccattctatccaccatcggtcaaaggccatgctcctgaatgtccttagtttgatgttgtcaatattgccaagaggtggtcctggtagattcagcagccaatccatcatatggaatgatgaaatctctcctctactttgaatcctgtcggcaaagaataggctaattggcagttgacccatgccgaattgccttgcagcgcttgttggatgatagaattcgtaggtcatctggatattcttatcttgatagatgccaacagggatgatacaggggctgatagctgttgagaatacttctctggatttatcatatttttcagagttgatttcatcgaatcgaaaatcacatgttagttcaaagctagcagatccttcatatgcaaaccagatcctatcattcttggggaacccatcatagaaattgttgaaccactccttgaaaggttcggtcgatagcttggacacggcgctaaccgatgctgcttctccgaaggacatacatcatcagcatgtggtgcttgtttctccatcgtccctgacgatcggctcaaatcttgggaattctacattggctagtgctggctgattggcaacttttctggtatgaagattcagccaaatttggagtaaccacgatggaccccctgtgccgattgtttttccagaggctatcttgtcaattgcagtattgagggtctgatacaagtagcccagcagatacttgccaaggggaaaatgcttcttttctaccagattttcatctacccgttaccagtttgcggtcggaccataggttggaccacagaataagaacttttccagccacatcataagaaaagctgtgttcatggcaaccggcccagtcacatcactcttggggtaaccggcctagttcccatcttcttggcaacataacctgaccaaccacctatgcttctggttttgaactcatgggtaagttaggtgttcaggctggacaagttagctgatgaagtgatatctagaccagtgatcatgatgatatctaatagtattggggtcatcggtccttgagagaaaaggaacgtgttcatggctgtggaccaaaaataggtggatgctatcatcatgggttcattccttgccatacttgctgcagttaaggccaaagcttgcgatatgtcgatttcgtcccagtgggctaatttgctagccaacatcctgttgtaccaggcaagccagctgacttcggttgatggccaggatttgaaggtgcctttccaagggctaagatctggattggcaaatctaaaggggattcggttggtttctccattgatgaactctatggggtctaagttgccgattgggccaaggaaaaactggaattcatcggctacgctaggaattgcaacctggtgggtgagatgctacagaggaggaaaatcgaggattgagcgaaagaagaaccaaatctatgaggaaaagaagggatttagctgatgggtacttacttcgacgtattcggtggccgatgagctcggtggactagcgaaggttgacattgtcgttggcagagattggaatcgtcggaatcgtctgcggatcgccagaaagcttgaagggtgtcgccggagaactcaaaggagaatattggggaaagtttttggctagagcggttaaaacggaagtgacgccgtgaaacgagaagagcggtggttactatttaaaagggagcgctgtaacggccaaaacggaatcggtttttgaaaccctagatcggctcggaaaagaaatttgagaaaatccgccacattacaaataattacaaatatagcggacttggggggcatgtgttgacgaccaaatttggtaagatatgaaccaggttcgacattggaatcgaggcggattcggtaaagagatagattcgaagaacagagtatgcatcggctgcaaaggcatcggctggagtctgcatcggctaagatggatcggacagaggacatccgatacagctgatagaggtgatgtagccgattctgatgacgatggtttcaaggatttttctagaaacgatcaaagtgcttcacgaggattgccacgatagagataaagctcttggataggaaattgtatctattaattaggatatttcatgtaatttccttagagatatgttggggcaaaagtctgccgcaaagacttatggtattttagagtttgttagagataagtgtcgtgtccggcggggacatattttgtaatctcgggtataaatagaacccgaacccatgtaatcaattatcagacgatcaatacactttcggtgcatcgccaccctttttacttttgttctatttcgacgagttcttactttcgggttgagcttcatcgattcgatcttcaactagaggtaaacttgtcatgacggcttgcgttatcaggattagtgcttccatctttatgacactctaatcctgttcatgtaattcatcgagttatcataaatataatctttgtgagcgtgcgggccgacgaggcggagccggaggtggctggcgatgggtagaggcggcggcgctcctcgaggaggcgaagcggatggcgctccggcggccttccgcgagcgggaactcgcggacagcggccggaagaacctggagaagaagacagggagtttagggagcaaagaacaggcacggcgccgagggaaatgttagccggaagcggcaaggatcggcgaagctcaccttggacggagggaagcggtctctcacgatgattcgcgaggagggagggctggacgggctacgcacgatgactgcggtgccgaggaaggcgacgacacagcgcgaggtggtcgggaacggcgtcgagaggcgactagaggtggctgctatggtggcggttcgggtggtgtggtggagtgacggttccagcggcggaatggaggagcggaggggatgccggggtacgacatgacacagcgaagccgtcggtggcggttgcgcggagcggtggtggcgggagcaacggtggcgaccggctagagggcgtcgtcgggcggcggagctcgggcgcgcgctgcggcggtgtttcggaggcggagagggtaaaaggagtaggggccggggtgcggcacggcacggcgatgccaatggtggtggcggcacagcgtggcggcgtgcggctagaagcatggcggcgagcggcggagctcgggctcgcgtgggaagtgcgggagaaggcacgacgggctcgggaaagttggggaaatgagcgaggggagtgcgggaaggagttttatgggtgcgggacagcgggagggggccggggcgatgcggattcggggcagcaaccaccggcggcgtggggtggtgacgtgggcacgtggcggggcaaaccagcgcagttttcttgggggaaaattggggaaatggtggaggaggtgggggggtgcagttccaccacttgggcttgagcaggaagggctgggtggtgcggattttgcgacggagtgggcagcaatggcggccacgggcggttactggcgaggtggctggaggaagggggaggagctgacaggtggggcctcgggtccacctgtaggcgagggaaggagagaggaggtcggggggcttatgtggacttagggagagagggggagcgagcgggccgagcggcccaaagaggagaggggtgggaggcggccgggctggaggggaaagaaggagggagagggattgggccgagggcggcccaaaaggatggagagggaattttatttgttttttctttttatgtaattggttaaatgaactttgtgactttaaaatcatttcatgagctctgaaaattcgcggaaaaatccggagagtactttagggcacagagaatattgcaaaatatttccggccaatgatttttaagggaaaattttaattctcccattattccacttcattaaattgctttaacttttatttaatttatagaaaatgatttattaattgatttttaatcccgaacgaaaatcggggcgttacacctggccattcagaccgggatcagaccgccaggcccgctgccggctgtgcacagcccttgcacaagccggcaacccccacacaataaaatccaacaaaaaaaatttttttggagcaattttgaaatgtatgagttgaaatatttcttatcatccataataattgaaaattatgaagacttgcaactaaactcacttaagtgctaggaggtgacctattatggtctatagggtttttttggctaaactgattttcaaataacttttaaatgatttggtttttgaaatagatttgaataccaaaaacatttgaaaccttctcctctaccaactttgtttaacacttttctcaaattcctcctcaaactcattttgaagataaatcccattttggccaaaaataaaaatctagtttcttcaaaagaggaccaaaagggcattttcattgaaacttcatttttcttgcaatgtgaggcttggaaaacatatggggaaccttttgaaatatttttcaagagatagttttcaaattactttgattttgcaaaagttttgacttatgttgacttctagtttatttgctcacacacaaagagagttagagcacatgtaagagtgcaaaactcccccttaatgtgacatgctccattttcgcaaataagagccaaatgacaataaatccaaagcataagcacaaataagagcaaataggcaaaatgaacaagaagcaaccatcgtgcacaatctcaagccacattagagaaatcaatcacatttaactcattcctcaatttgcaaaagtgggtttcatcaagaggcttggtaaagatgtcagctagttgatcctcggttcttatgtggctaatgactatgtcactcttggcaacatgatctcttaggaagtgatggcgaatgtcaatatgcttggttctagaatattggaccggattgttggctatctttatggcactatcattgtcacataggagtggggttttggtgaaggatataccatagtccaacaaggtttgtttcatccaaagcaattgggcacaacaactacccatcgaaacatattccacatcggcagtagagagggctacggagttttgtttcttggatgaccatgacacaatggatctaccaagtatttggcaactaccggatgtgctctttctatccactttgcaaccggcataatccgaatcggaatagccaactagcttaaacttagtacctttttgctaccacaagccaatagttgaggaatgctttaaatatgttagaatccttttcatggccactaagtgacactcgttaggagcggcttgaaaccgtgcacacatgtaaacactaaacatgatatccggcctagatgcggtaaggtaaagcaagctaccaatcatagaacgataaagctttaaatctaccggtttacccccctcctcctcatcaaggtcgagatgcccgttggttgccataggtgtcttgatgggcttcgcatcctccaagccaaacctcttgagtagatccttgatgtacttggtttggctcatgaacgtcccgtccttgagttgtttgatttgaagttcaagaaagaagctcaactctccaatcatggacatctcaaattccctagacatcatatcaccagactccttgcaaaatacctcattagtagaaccgaatatgatatcatcaacataaatttggcaaccaaagaaatcatcaccaatgatttttgtgaaaagggtggtgtcaacttttccaattttgaaattctttgacaaaagaaaatctctcaatctttcataacaagctctaggagcttgttttaaaccataaagagcttttgagattttataaacatggttaggatttttagggtcttcaaaaccgggtgattgttcaacaaagacaagttcggcaatttcaccatttagaaaagcacttttcacatctatttgaaaaagttttatatcaaaatatgatgcaaatgcaagaaggatacgaatgggttcaagtcttgccatgggggcaaaagtttcaccgaaatccaagccttcaacttgtgtgaagcctggcgccaccaatcttgccttgtttctcaccaccaacccgttctctcttgcttgttcctaaagacccactttgtccctatgacattgtggtctctaggtctttcaaccaaagtccataccttgtttcttgcaaagttgttgagcttttcatgcatagcatttacccaatccggatcaccaagagcttcatctacatgttttggcttaagacaagaaacaacaagtaatgttcacaaatcgaagcgacacgagatcgagtttggacacccttactaatgtcacccaaaacctcgtaaattgggtgatccttggaaagagcggtgtgtatccttgttagcataggtggatcttgtgccttctcctcctccacttaacttgagcttttcttggcatagcggaagtagataactcatcttgagtggaggtaaatggcttgttttccacttcaattcgcttgacatctccaatagacatgttcttcatagctcttatcaagccttcatcacctacatcatccaaattcccgtgcccctcttaggagccaatagtctcatcaaattgaacatcggcggtttcttacacaataactttgttcttgttgtagaccaggtatgccttgctattggaggcatatcctagaagaaacccttttcatcacaccgactttcaaatttggttagtctaacaccctttcggtgtgatgaaaagggtttggccccttgatgctggtgggggagtactcccacccaccaaaactagccgttgggggcgaaatcccccaactctatgtactgccggtctgaccggatgtgtgtggccggtcagaccatgctactctacaacggctagttttctagccgttgtaggctgtcattgggccccatcggcttggccggacagactggagttgggtggccggtcagactggcctcggctcggtcagaccgcccccagctcggtctgactgaatgcggctctagatcgccacgccgagagcaccacagggagaggtccccttggctggtctgaccggcattcacccgtcggtcaaatcggccgacctacgccggtcagaccaccactaggcggccggtcagaccggccttggtcacacagcaagcacaacaggaaaatgagacaaagccaaatctaaatgcataataatctaatgtggcaatttaaatcatctctttgctaggtcattacccctcttaatagtacagtaaagctataaataaactagcacaaattgattgaccaacacctcgatcgatttagaactcaactactagtttaccgtcatctatactttgctttgcgccatcaatttttagtccatcgataattatccatgcgcacacatgatgtgaacctaactcaaaacacataactcgatagaacggttagtccacaattagcgcttgtcattaattaccaaaactaacaacgggggcctagatgcttcaaagatcatgcacgatactaaaaggctagagaacaatggacgtggtgataaagaatctatatagtatactgttggcggatgttaaatgctgattctataccgccaacatctgcataaagtttagataataaaacatccaacatagtgataggtgcttaatctcacatattccacaagtgttggtgtgtacagttgtatgcagaagataaaccctgaagttgggaggcaaatcagactaaagtgaggaaaattatgtatccatacaaggaggggttgttaacttcatccaaacatcagtaaatcaacccaaaaactccgagaaatggatagaggaaggtccatggagtccaccgaccgaaggctaggccaggagggcccagcccaggttcggccgaacccccttgatcctggggtttggcgtggacgctctagatgttctcttgcagttaagggagttcttttgatgtgaactttgtttagcaagcatggtggaataaactcattcatagcacaacaataataatatcataaagaatatcacagagttccacaaatagcacataaatcatgatgcaatcgactgcataagtacgcagcccaaatagagttcatccaaaagctacatcgagctaatcatcaaactactcgtcaatctaggtggggggtgtgtctcgcgctatccaaaaaccatatgaagcgagagcgaagtcgcagtagacctccattctagtcgtccaaccatccgcaggatccttgcgcgggaagagggtatcgcatgctcatgcaaatctgagtccccacggctcagaggtggtggcctccggatctggcttgggcttcttgcccggggtcgtgtactcttgcgggcagtgctgagggtgcgagggcgtccaactcacagttgcggggcagttcggacatttccccttctcacaaccgtcataactgccctataaaaggacctcacttcattcactctcacacacacttccaagattgagctgaattataagaggctctattgtactatattgtatactagaataggaagagagtatagtagaagaagtcggaagaattccggagttatcggtaatcttctcctctgtttattactctgaattcaatataatattatcttgtgagaattatctcttggttagttcctaaatagcatacgggattattgttcactataatcaactaaaatatagtgattgctttggttagttataaacactaaagtagattctaactgcttagacgtggtgttt

SEQ ID NO: 5247 - DNA, 3656 bp, Oryza sativa
cgctcccccccactgaggtaacttgtatcacattgcatatttctcttatcaaattacatatttgctttccaattgcatcttataaaaataaaaacaacataaaaatgtgcaaaatagaaaataccaaaaagataggataggtttgagtcatgctaggtaagacaagctagttctccttgttgaaatgatgaatagttgctctgttttatatctctgatatatgggttcttggtaagtgctctctcaaaggttaaatataagtagccaacaattatctgggaacctgaggtaaatgagctgcacttgctgatctgagtctaagttgttgcgagatatgagatagtaaatacgagttactatgatcctgatactagtttgacttgaattccggatattttgtttttaaaaatgataaatttgagagttcctcatttgatataaattcctaccagagccaaaaatatgccatcatgattaaaccatatacattttggttgcttgccattccattgaacattgtcaaactcttgtgacttgtatagatacttctcatgctctatgatcaagatcatacacccacatatatgaacatgctaaactaatacactaggagctaagcaatattccattccatttccatattaccaccaaaataaattctccatgctttcatatgcttttttctcctaaagagaaaagtccttttgaaaaaaaagaggagggaaaggcatggttatgaaaaaaaaaattcatgctccatcaagcttgatgtaacaccccagcccgtttgaagcctagtagtgtgtgtttggcccatgtggtgtttggcccatgtggcccagaagtggatgtgtagtggtggtttattaccaccttggaagtttaggtgggtgaggtcctgcttataagccttggtgctccaaccatggtatccctgggttaactcttttacacgaagcgaggacgaatgtgtaagtgggataccatgcgaacgtgggtccgctcaacgtgtagagcagactaatgcggattttggaggcagggtgttacagttggtattagagcgtaaacctccgctgtatgatgcatgtgctttgggccatggtctgcaccggagggggttctgggcctctgccatgtaaacggtgtgctgccggggcgttagcccttaagcgggggtgaatgtaacaccccagcccgtttgaagcctagtagtgtgtgtttggcccatgtggtgtttggcccatgtggcctagaagtgaatgtgtagtggtggtttagtaccaccttggaagtttaggtgggtgagggccggcttataagccttggtgctccaaccatggtatccccaggttaacccttttacacgaagcgaggacgaaagtgtaagtgggataccatgcgaacgtgggtccgctcaacatgtagagtggactaatgcgtattttggaggcagggtgttacacttgagcatgatgttgaaaagaaaaatgtagccatgccctctcctaagcaataaaagaaggatttttgggagaagaaagtaagcacaaaggagaagtgttttctttatttttcttcatgtaccatttccaccatacaccacacacacattttgcacgatcttgatcttgagtatgtttagtcatctgctttagtctaaatttttgacttagtaataaatgtgaatgcaagtatgccatgtttgatccctaccgagctccacatatcaaactctagagtaggaatcataaaggcaacatttggtgaggaattcatattgatacacttagagagattgagtgaatcaattgaagaacttggttttctttttcaaaatcatttgaaaacttccgaaagaagagttgaataaagattgggtgattggtactctaaattgctgttctttcttttaaccgcccaaggcaaggagaagcagtgtctcgtgggaatcaggggtaagggtaaccaccgtgccaaagattatttaatctcagagagagtacatataccttacacctgtatgtttgagatatgcagcatagtagcaactcctgatcaacaaccaagtctttgtttactttcgtccttcactcgggacgagcaaaggttaagcttggggggtgttgacggtcgttatcgatcagttgcgaccgtcaatattaccaaaatagaggagaactagtgatgcttgcaatgcatatattgttaaaataataatattccactagtattaggtacactaaccttttgtagagaatgacaataaagtggaggagaatcgacatcaactcagacgataaatcaatcggacggtgtcaagaaccagacttatgtatgaatgggtcaagaacttagaaataacacaacatattgggccaaaattcacaagtctacgaaggaggacaacaaaggaggccgccagtcgaagatgggctgggttgagccaacccatgtctcggggggtttggctgaacctcccgtggcgccgatggatgcagggtttggatggatggctgggattgatccccaatgacgggtggatggtattaccgaccattccaaccgtcgcaaccatcattacctacctataaaaggagctcctcttctcacttcactcacacacctcaaacaatagctctctcatttctctcaagtttagtttagtagtatctagctggtggaataggaagatagtagaaatcaggagtccggaagtcttcggaagagttcgggtatggctctagcagctttcctttcttcttttgtaagctttgtacttttattagaatactcttctatatacatttacggtattgaaatactttccgagaatacgagtacctactttacactatgttcatgttatactgaatatacggctagcttatctgggagatgctttggtgcgggtataatgtttgcttatgcaattactctatgtcatgacgatgatagtacgttttgtaccacagttgtcgctgccaccgtgtctctgttgttgtcaggacctacaaaaacggaatcggctcgctgccacggttctatttttgtagttttcagaagtttctgtcggttagttttggagttcttgagttgcatctggagtttgccgatccttgtgtgtgtttgttttggccgtgcctgtgtcgtgcacgagaggaggaaggtgaattaccatatctgattttggaagtagtcaagtttgttttggaaagatatagtagattggattggttaaaaatcagtttcctttttatcccatacaccaaattcggctgccatccactccacctcctggccgagtcccactcgcccctttggccgagtccgactccctccctctcttccacggttccgagttgtgtcaaacaccttggcgaatttttgtttggtgtcggtttcgagatctgtttggaaaaacggaaccggcataaattcagcattccattttttttttgtataattttaattttgggtttagacttttacatttgagtccctgtaaattttatatttatgtttgagtccctgtaatcttacattaaggtacttgagtcagtttttgttaaaaaaaatcaagaaaaaagtgagaaaaaaaaaggcagaaaggtgaaaaaaaaaagaaaacaaaaagccgcaccaaaaaaaaacag

SEQ ID NO: 5248 - DNA, 3159 bp, Oryza sativa
cgcgcggcgaacttttgtgaattaatggcaacattggcacacgagggtgcgatgtttttgaccggaatcagaaagttcaaaaaacgccaaaacatgatttttggacatattggagtgtattgggtgcgtacgtggcaaaaactcactatgtgattcgcgcggtaaacttttgtcaattaatgccaatattggcacacaagggtgcgatgtttttgaccggaatcaaaaagttcaaaaaatgccaaaacatgatttttggacatattggagtgtattgggtgcgttcgtggcaaaaactcagttcgtgattcgcgcggcgaacttttgtcaattaatggcaacattggcacacgagggtgcgatgttttttgaccggaatgaaaaagttcaaaaaacgccaaaacatgatttttggacatattggagtgtattgggtgcattcttggcaaaaactcacttcgtcattcgcgcggcgaacttttttcaattaatgccaatgttggcacacgagggtgcgatgtttttgaccggtatcaaaacgttcaaaaaaagccaaaacaaagtttttggacatattgaagtgtgttgcgtgcgttcgtggcaaaaactcacttcgtgatttgcgcggctatcttttgaaaagttcaaaaagcgccaaaacatgatttttggacatattggagtgtattgggagcgttcttggcaaaaattcacttcgtgattcgcgcggcgaacttttgtcaattaatgccaatgttggcacacgagggtgcgatgtttttgaccggaatgaaaaagttcaaaaagcaccaaaacaagatttttggaaatattggagtgtaatgggtccgttcgtggcaaaaactcacttcttgattcgcgcggtgaacttttgtcaattaatggcaacattggctcacgagggtgtgatgtttttgaccggaatcaaaaagttcaaaaaacgcctatacatgatttttggacatattgtagttattgggtgcgttcgtggcaaaaactcacttcgtgattcgcacggcaaacttttgtcaattaatgccaatgttggcacacgagagtgcgatgtttttgaccggcgcaaagttcgggatatcggcgtggacactcatctcgtgaacgatattcggcgtgtcgggcccgcccgtgagccgcgcgcgcacggggtgagtcgcgatgcacacttttgacaaatatgcaggcgtaagcacatggccgagccggcccaagagggagagggagggaaaggggactttttagagtttttctttttataaaatcattttaactttgtttatttcttaataattattatttgtgttctgaaaattccactaaaatttatttacgcattttaggcttttaggaaatatacaaaaatcctccaagccttatttgacttttaactttgcacattttaattgttggaggctttcacacggattttaattattctaggcataatttagaggatgtattttagagtcgttttgggacgtgacaccgtcctcctcctcccgtcaacggcaccgcgctcctttccctagtcggcgccctcacctggtcggcggcgcgtcctcccctcgtcggcactgtccaccccccttaagaggcgccgtcctccaccccttctcgccgcccacctccgcgcgctcgttgcccgccggccacgagcacggcccccatctggctcagccatccccggcgctcctctctcccttcctctctctccacgattgcgggtattttggtcttaaaactcctcaaagtggcaaagtatactgatgataatctatttagtggcattttatcctttgtattctaatggatggcatttttgcactcttgtggagtggcatattgtccgttttctccaatttgcccctgttctgttagatcggtttgacggtgttaattctgggataaaaagacatatataccctttgcatattgttgcagtttgtctgtacttctgtaaaaaaaaaagtcgtgcttttgcgatgtgtactcctactgtcctacatgcggcgatggctagaaacgtatcgagcatgtttgatgctccgttggtgttggtgccctgacacaagcgatcctccaaacagatcaatttaattcccggctttcatgaacaaaaacgttgcatacatcaggaagggaaaaggaaccgagaacacaagcaaaaattattccccaaatccatgaatctatcacaacctaaaaatgaattttcccagctgcttgcaaattgattcgatcaatagaacgaactgtgaaaacctactgctttgcacgatgtcaggatgtggcgtggctgcatcgccagcttcatgcggatggtggatacagcgaagtgaagcaacagataaaggccgggaatcggaggggagcttcccggcgccgacgttggtggacgacgcggactgcagcgtgtcgaggccactgggagtcagcgccgtcgccgtgctacacctccccctgctacacgtttgccgtgccgcgtcccgtacggccgtacctcacctcttccagctgaaactcaaccctgccgcccctccacatgcgcgcctagccgtggagctacgtcgactcacccctcccatggcttaccgtgtcgcctccctgatcgcgcaccgcttgcctgagcagcagtgctgcctccgccgtctgctcctccctagccagggcgttgggtttaaggggataagggatttttggtcgggagtagaacgattattttgcattttgtaaatcatttttcttttctttctacttttaattgattgaatcggagcacacctaacagccattcaaaataggggcaaaatgcaggttcagtctaaaaaagtaagggcacaaaccctaaaaataagaggtaaaattataattgcatagctaacagagaaaatgtgaaaatcgaaccaattgcattttaggatcgaataccatcctcaatctaatggcaaaaccaagaaggttaacctatgcttggagctctatttgcgttgctttgttcatgctatgccaactaagtggaattcatggttgtagcataattctgattcaatatctcatatcactcagttttgcttaagtctcctttcgaagatctttatgggtatccatctagtcagggtgtgt

SEQ ID NO: 5249 - DNA, 5822 bp, Oryza sativa
tccccctccccccctctttcttctttgagcagtcggcggcgagatgccccatccaccaacgccggcccaccgctgtcttccagcctgccgcctcttacggccatccctctaaagccggcaaactccccctttttccccctccccctccccccctcttcccacccccaccccaccccgggaccctaattcgttggccctctactggagttcgggttcgctggtgccggagaagaagaggtggtcgccggagttggtgaagaagaacatgaattgtgaagcacatccagtgatccaaaatttacaagatttgtggttagattttctgtcgacatagctttagcaattccgaatatatatatatatatatatagctcctccctttatttgaaaaagcacacatccttccttatatgcaattttgcaaattaccgaacgtgtaatttgtgaagacatctactacacaaaaacctttgtacctgcgtttgtttttgctcctgttaccaatttatgagtatgtacattaacagctgtagtccattaacaagtgtcactcatcccatcaaactggtggcatgtaaagcaactatctccctgaatttctctatacagtatttgaattaaccatgtatatgtgtcaaaaagagaaagaattaatcaaaagaactcggtaggagaccatgctactcctactcctaccatggtttccgctgttccgtctcagtactgtccgcgttgtggcgcctcctcagctccgcccagtggtcgtacgcgtcgcgcagccggcgacggaaccgtaccatgtccagccgcacgttctggccatcgaggtaaaccttcttggtgacctgccaccccttggcgttcacggtgtccgggtcggtgagcaccgcgtcatccttggcgtactgccggtacagcgagctctccgccggcttgatcttgtacggcatgtaccgcagcccgagccgccgcgccggctcgccgtagtatgtctcggcggcccagtcggtgccgagcggaacgacctggatgaagacggagcccggccgcatgaagaggaagtgcgtcatggccgcgccgtgcacgcccaccatgacgtccgatgcgttcagagcacggtacatcttggcgagctccgtatcctgacgaggctggagcacggcgacgcggaacccggcgccagcagctgcacgcaccagctcggcctcgttctcgatcgcgcgcgacccgttccgtgacacgatcaccagtcgtggcttgtcgtccttgagcgcgctcttcttcctgatgctgccttgggtcggcgtccccaaggccaccgccgcggccttctcctcctcctcgatgatcatctgtatgcggccgcggtatgcgtcgtcgagcatccgacggaagtcctggatggtacggttgcccggcattcgtgcggcgtcgatggcgagctcgtcgtggatgcgcagcccaacgacggcctccgggaagcagtgggtgcggcggtcgttggtgaagtcgataggcgcgtaatcggagagctgctcgacgatgtggccgtacttggtcatccaccagtcgtggtactcgagcatgacgaacaccaccttcttgttgtactggcgcgcggtgatgtagagcgggattatgccgtcattgaactcgtggtacacattgccggtgtacccgccggtggagaacacgacggctgggacgtcgtgccggacgtcgcagctagccggcgccgcacccccctcgggcacggcacggagccggagctcgtcgatggtgctcatgatgctggactcccacttccgggtgtaagggcggatgcgctcgtcccggccagcggcggcggtggaattgtccggcggcggcacgagcaagaagagagaattggaagcggcctccgtccggacgtccccgcgcatgatgcacacgtccgtacgcatggcggtgcggtcgcagcagatggtgccgttggacacggccgcgcacggcggcggcggcggcgtctcgtcgtccaggcgcgtcctccccatctgcagcaggtcgtcgaccgcggctgagaaagggctccctggcagcagcagcagcaggcaggagacaagcgcgaaccccgcgagcatccgcagcagcgcgtcgtggccgtgcttccggtggtggcacgcgtagtccacgagccggcgccggagctccttcatcttgccggctccttcctcggccaccagctgctgcccctcctctgccgtcgcatcccctttcctctgctgctggtgcagcaggagggtggccctatggtgttgcaccatgtcacccaaatcaatcccacctccgaccacaagtccaggagagaacaagaaagaaacagagcaagacgaacaagaggagaagatgaggtaaaaagagcttttcgctccgagttgccgtgcaaagaggctagtaccactcggtggcgtgatggtgtgtctcgtagagtctaaatgtgggtggggggaaggcgtgaggaaggaattggcattcccccgctaataaaaaccgcgtttcggtcagggtggctatagcttgcgggggaagggaaattggctgcgccgctgaccactggagatggactggcactggaacgcagcggcgtgtggtgggtggtggcaccgaacgaacctgcctgcctgcgtgcgtcgcgtcgcgtgggttgggacgttgggttggcggctgcagcttgctgctgccgttggttggaagcatcccacgggatggaaacgtttgcgcgtgctttccaatcgtttttttgtgggcagcatgggaatgcgtgcgtgcgagtattaggccctgtttagatgagactaaaacttttaagtccctatcacatcggatgtttgaaaattaattataaatattaaacgtagactattaataaaacccatccataatcttggactaatttgcaagacgaatctaatgagcctaattaatccatgattagcctatgtgatgctacagtaaacattctctaattatagattaattaggcttaaaaaatttgtctcgtgaattagcttttatttatgtaattagttttgtaagtagtctatatttaatactctaaattagtgtctaaagacagggactaaagttaagtccctggatgtaaacaccaccttagctgtctacagtccatgttgcactgtagctgttttgtgcgtctgggactgtatcacgcattgacgctacttcttgccccattggttttccacgcgtatatttttcaaactgctaaatgacgtgatttatataaaaaaattttatatgaaagttatctttaaaaaaatcatattaatctatttttttaaaaaaatagttaaaacttaattaattatgcaataaaatgaacttcgttttgcgtgcctggtaggaggggttcccaaccccctcctccgaatactacatgtggttccatttaggggtgaggtgatggagcaagggaacgattttttttgctttttgagaacagaagggaacgaattggagatgatattactactgctatagtacttcccttttctttctttttttcttttcgagaaaccagtttcctttcttttctgccagggaagttcggttcggttattgcttcccagtcctgccgctgaactttcgaaatagaaaagggggccatttctattcctacgtgtgagtaaaacaaaacaacgataaaaaaatactatgagctaaataagaacaggagactattgccttttatttttatatacttgctgcgcatcaatctgaccattacttggtttctggaatacagcaaagatttttcttttgaaagaatatactagtagcaaagatgacgaaatgtcctaggatggactaaaccatatcttctttgacacggaagctctttttccgtatactcctattttattagactgtatttagattaaggggtgtaaagttctggcgtgtcacatcggatatacggacacacatttaaagtattaaatgtagactaataacaaaacaaattatagaattcacctgcaagctgtgagacgaatttattaagcctaattaatccgtcattagtaaatatttactgtagcaccacattgtcagatcattgagcaattaggcttaaaagattcgtctcgtaatttacacgcaatctatataattagttattttttttatatttaatactctatgtatgtgtctaaatatttgatgtgacagggtaaaaaaatttaccaggatctaaacagggccttatccgtgctaaaagtttttcttattttttttaagaaaggtcataagacccataagacccagcttctattgaaagccaatccgtgctaaaagttggagaaaattttgattcagacttcaaatgtggggaacagtgggggcaccctgaattgaatagtgtttttctttttggcccttaggtaaacagtgcatttgggagtatatgtgagcaatgcaattactgggtttccagccagctaaccactattaggctgtggtcgggactccccagtacgcaaaacgaaacagtgtttagcacgtgattaattaagttttagctttttttaaaaaaaatggatcaatatatttttaagcaactttcgtatataaactttttacaaaaaatacaccgtttagcagtttgaaaagcgtgcgcgcggaaaacgaggagaaagggttgggaacatggacaaacgagttgtcgctctactacatacccggatagggaggacttaagtgatcttgagggctgtcaccacctctacacctacatcaaacgttgccgattaccaaatttcactgttaacaaacgtacagtgggatacgcagcaattactggataacaattacctaaacaccacgtctaagcaattaatatctactttagtgtttataactcaccaaagcaatcactatattttagttgattatagtgaacaataatcctatatgctatttaggaactaaccaagagataattctcacaagataaatctaaattactcacgaagaatattatattgaattcagagaaataaacagaataaaagaaatagaagaagattaccgacaactccggaattcttacgacttcttctactctactctcttcctattctagtatacaatatagtacaatagagcctcttacaattcagctcaagcttggaagtgtgtgtgtgaagtgaagaagtgaggtctatttatagggcagttatgacggttgtgagaaggagaaatatccgaactgccccgcaaccgtcattaggatcaacggtgatcaggggggttgggttcggccgaacctgggctgggccctctcgggctggccttcggcctgtggactccctggtctctcctttgtctgtttcttggaattttgggctgagtctttggtattttgatgaagttcacaacccatccttgtatggatacttgtttctcctcactttagtctgattttcctcccaacttcagggtttatcacctgcatacaaatatacaccaacacttgtggaatatgtgagattaagcacctatcactatgttggatgttttattatttgaactttatgcagatgttagcggtatagaatcagcatttaacagccgccaacaaaaccccccacacttagccctttgcttgtccatgagtaaaggctagtgtagaatgaatttcttcaagatatgaatcaagcatacaaatcattcacaaccatacctattcctgtgaactttatcagtggctatcttaccatcttgagtaattgatagatggaacgatctcgattccagttctt

SEQ ID NO: 5250 - DNA, 29648 bp, Oryza sativa
atttgcccccgcaaatctcgccggcgcattgatgcggccgacctcccgcgcggtttcttcccctcggccgctctttcccccttccaaccctatttaaaccctccccgcgcctccttcgcccgtttccgcccttgccgcaccgtctccccgctggaatcgagctcgcgctgtcgccctctctctcctccgtcgccgacgacctccggccggccttctccgctcgccgggaccgtctcccgccccggcgtcgcctcctccggtttcgccgcaccgccgtcgaccccgtccaccccctcgccgagtccgccgaccgcaggaacgccgtcgaccccgtcgaccagagccgcgccgccgccttcctccgctccggccgcctttttcgtcgtcgccgtcgacctagggtgagccgtggaccgccgcctcttttcccccttccctttccctctctcggccgccgctccgccgtgcctatggccgccgccggcgaccataggggcgcgggcgccgcctcctgccggccgcgccgagtggccgccttcgggcacgccgagtggccgccgcgtggggcccggccgtcagccgcccgcgccctcgggtgcggctgaagcgtggggcccacggcgccggccggtgcgagcccgggtgcgcccggtccaccgtggaccgtgaggctgccgcgtgggccccactcccgtggacccggtccgcgcgccccctcccctcggctgacgcaataaaccctttttaaattaaaatttaaatgaacaaatccgcaaatattcatttaaagagcatataaacttcaaatggccataacttggccatttgaactcggaattggaccgttcaagtctcttttttttccttaagaagtcaagaacccatttttgtgcttcgttcctgcttgttatatggagtttattagagtaaaagcccttttattttccgttggtcgtgtagacgttgcagattcggaagatccactcttcgtggaggttgaagccgacgtttgggaaagtgagcaaggcaagtcacatcatccttgaacatattgaatcccagtttataaaattattttgatttaaattattgcattatcgctttgttatcactgtttattaaattcccgcgttatcactgttttatctagccatgcctatttacctttgttatgaccttattattgttattgttattatttccttgttcaccctagaagaaacaaaaccccaactagtggacactcatggtaccactagtatgattttaggtagatgcttcgctggttaattaggcaacattaggtggttttacaactctagactttgggaatactcttatcacctggacactatggaatggttggattattgtggaattggattcacacctccccctctattcaaaaccctcaaaatggttttaggctgggctcggggtgcatggttttgacagtagcacctcggccatatatggaccggtcttcgggcctctgttgcaaagcactaccgtacttccacatgtctagtaggtaaggcttagtttgtggcttagtctggttataaacaaaagtacacggatggagatggacgaagtcaggggtcgatggacatctctagggcaaatgaaggctacacgagctgcggcccggtagtcgagatgtcatggcacagggccggtgtcctgctgctaggggctcagtcctgcctacctgtcctgggggttccggccgtaggtggggttgggtcggtactcttgtttatggctaggatgggttggaaactatgtcatgtcttccgtccgtataccgtggtggtatgtggcacgtggttacacgtgaggaaaatgtgtcttgtgggtaaagatgtacacctctgatcagagtataatctattcgaatagccgcgccctcggttatgggcaagccgagcaatgtacccaatttagtgttttaattcttaaaacctgcttaacaactaaaatgtggaatggttggcctaggttggcttgggacgagctggcacccagggtcgggttgccagttcggtctgaatcatcgtaggccttgggttaaggcaggttcgtgtgggttcacagccttggttaataatattgtatagctctaggacggtgtttacaaaatagctttgagcaactaagtgtcttttaatgctgtttactgcaaaccctaaccccctatattatggctcccttgtactcccttgtactcccttgcatttattctgcacttgtgggtgtgtcttgttgagtacggtggttgttctcagtcttgctcaatttttcccaaacccagaagaggagcccctggatgatgaaggctttggtgtctagctcgtgcctgccgtcaagcgcctgtggtcatcgccctagtcttccgctatttttcgtttgtcttcttgtgtgctgggtcttcgccgcccatgtaataaattaattaattacgcttccgcttgtctcctgggacaaggaataatgcacgcacgtaaggaacgcccgttgggttatttccggtcgtgacaagttggtatcagagcccccttgaccctaggacgagccttagatcccaagccttagcaatattttcgaaataaaaatcctttcttatttgtgaaaatcctctagtctctctctgtcctgctgcttcatttatcgtcaaaatctgacctttaaaatgttgcttttctcttttgtttttgtttgtagatggcctgcgatgttttctactggaatcaaaaagttcaaaaaacgccaaaacatgatttttggaaatattggagtgtattgggtgcattcatggcaaaaactcacttcgtgattcgcgcggcgaacttttgtcaattaatgccaatattggcatatattggcccacacggttgcgatgtttttgaccggaatgaaaatgttcaaaaagcaccaaagcatgatttttgaacatattgcagtgtattgggtgcgttcgtggcaaaaactcactttgtgattcgcgcggcgatcttttgtcaataaatgccaatattggcacacgagggtgcgatgttttctactggaatcaaaaagttgaaaaagagccaaaacatgatctttggacatattggagtgtatcgggtgtgttcgtggcaaaaacacatttcgtgattcacgtggcgaacttttatcaaataatgtcaatattggcatatattggcccacacgggtgcgatgtttttgaccggaatgaaaatgttcaaaacgcatcaaagcatgatttttgaacatattgcagtgtattgggtgcgttcgtggcaaaaactcactttgtgattcgcgtggctaacttttgtcaattaatgccaatattgacacacgagggtgcgatgttttctactggaatcaaaaagttgaaaaagagccaaaacatgatttttggacatattggagtgtatcgggtgggttcgtggcaaaaacacatttcgtgattcgtgtggcgaacttttgtcaattaatgccaatattagcatatatcggaccacacgggtgcgatgtttttgaccggaatcacaaacttcaaaaaagcgaaaacatgatttttggacatattggagtttattgggtgcgttcgtggcaaaaactaacttcgtgattcacggggagaacttttgtcaattaatgccaatatcggtatatattggcccaaacaggtgcgatgtttttgaccgtaatgaaaaatttcaaaaagcaacaaatcatgatttttggacatattggtgtgtattgggtgcattcgtggcaaaaactcacttcgtgattcgcgcggcgaacttttgtcaattaatgccaatattggcacacgagggtgcgatgttttctactggaatcaaaaagttcaaaaagagccaaaacatgatttttggacatattggtgtgtatcgggtgtgttcgtggcaaaaactcacttcgtgattcgcgtggctaacttttgtcaaataatgtcaatattggcatatattggcccacacgggtgcgatgtttttgaccagaatgaaaatgttcaaaaagcatcaaaacatgatttttggacatattggagtgtattgggtgcgttcgtgacaaaaactcactacgtcattcgcgcggcgaacttttgtcaattaatgccaatattggcacacgagggtgcgatgttttgtactgtaatcaaaaagttcaaaaaacgccaaaacatgatttttggacatattggagtgtattgggtgcattcatggcaaaaactcacttcgtgattcacgcggcgaacttttgtcaattaatgccaatattggcacacgagggtacgatgttttctactggaatcaaaaagttcagaaagagccaaaacatgacttttggacataatggagtgtatcgggtgtcttcgtggcaaaaacacatttcgtgattcgcgtggctaacttttctcaaataatgtcaatattggcatatattagcccacacgggtgcgatgtttttgaccagaatgaaaaagttcaaaaacgccaaaacatgagttttggaaatattggattgtactgggtgcattcatggcaaaaagtcacttcgtgatttgcgcggcgaacttttgttaattaatgccaatattggcacacgagggtgcgatgctttctactggaatcaaaaagttcaaaaagagcccaaacatgatttttggacatattggagtgtatcgggtgggttcgtggcaaaaacacatttcgtgattcgcgtggcgaacttttgtcaaataatgtcaatattggcatatattggcccacacgggtgcgatgtttttgaccggaatgaaaatgttcaaaacgcaccaaagcatgatttttggacatattggagcgtattgggtgcgttcgtggcaaaaactcacttcgtgattcgcgcggcgaacttttgtcaattaatgccaatattggcacacgagggtgcaatgttttgtactggaatcaaaaagttcaaaaagagccaaaacatgatttttggacatattggagtgtattgggtgcgttcgtggcaaaaacacacttcgtgattcgcgcggcgaacttttgtcaattaatgccaatattggcacacgagggtgcgatgttttgtactggaatcaaaaagttcaaaaagagccaaaacatgatttttggacatattggagtgtattgggtgcgttcgtggcaaaaactcactacgtcattcgcgcggcgaacttttgtcaattaatgccaatattggcacacgagggtgcgatgttttgtactgtaatcaaaaagttaaaaaaacgccaaaacatgatttttggacatattggagtgtattgggtggatacaaggaaaaaactcacttcgtgattcgcgcggcgaacttttgtcaattaatgccaatgttggcacacgagggtgcgatgtttttgaccggaatcaaaaagttcaaaaaacgccaaaacatggtttttggacatattggagtgtatcgggattgttcgtggcaaaaacacatttcgtgattcgcgctgatggacccggagttcctctcaacactcaaggcttttgttggcccgatctttcggtgagttgtgataactacaatttgggagaaacgttgacgatccgactacaaccgtacgagacgttgtgttgcgccttagcgatcgatacacctctctgtgggttgttgatcttgccggtgcagatcaaccttattcctgcaagcaaatcgaagaaacaagcaagaacaagataaaaagcaatctgatattgcaaataggaatttaatacaaatgataagttggggttccgaagaacaagcagacggacggtctagccgacacgcgcgctgtaagcaagtagcaatggctaaactttaatctatcaaaaccccgagaaactctaaaggggaacctaactatttaagaaggtgggaggacgacctaagggaaccctagggtcgtgctccacctggttggggcgcaccccacttgggccccacttgggccggggtcccagacgaagttacaagcccattataggtgacgcagcaccttctttttgtgatttcggccgactgggatggaatttggtgatgaagctggatccatttgaaagatgactccgagagctttccatcaagtactcatggacccaaaagggagctcgcatgcatatttggcggccgtctgaagtcgattctgttgcaggtggctgaactggattgcagaacttggacggcctgatcttgatgtgaacgacggttgtatctatagtagtcatggtcacatcacgcgcggcgaacttttgccatataatgtcattattggcatattttggcctacacgggtgcgatgtttttgaccggaatgaaaatgttcaaaaagcaccaagacatgatttttgcacatattggagtgtattgggtgcgttcgtggcaaaaactcacttcgtgattcgcgtggcgaacttttgtcaattaatgccaatattagcatattttggaccacaccggtgcgatgtttttgaccggtatgaaaaagttcaaaaagaaccaaaacatgatttttggacatatttggagtgtattggttgcgttcgtggcaaaaactcacttcgtgattcgcgcggtgaacttttgtcaattaatacaaatattggcacacgagggtgcgatgtttttgaccggaatcaaaaagttcaaaaaacgccaaaacatgatttttggacatattggagtgtattgggtgcatacatggcaaaaactcacttggtgattcgtgcggcgaacttttgtcaattaatgccaatattggcacccgagggagcgatgttttgtactggaatcaaaaagttcaaaaagagccaaaacatgatttttggacatattggtgtgtatcaggtgtgttcgtggcaaaaacacatttcgtgattcgcgtggctaacttttgtcaaataatgtcaatattggcatatattagcccacacgggtgcgatgtttttgaccagaatgaaaatgttcaaaaagcaccaaagcatgatttttggacatattggagtgtattgggtgcgttcgtggcaaatactcacttcgtgattcgcgcggcgatcttttgtcaattaatgccaatattggcacacgagggtgcgatgttttctactggaatcaaaaagttcaaaaagagccaaaacatgatttttggacatattggtgtgtatcgggtgtgttcgtggcaaaaacacatttcgtgattcgcgtggctaacttttgtcaattaatgccaacattagcatattttggaccacacgggtgcgatgtttttgaccagaatgaaaatattcaaaaagcaccaaagcatgatttttggacatattggagtgtattgggtgcgttcgtggcaaatactcacttcgttattcgcgcggcgatcttttgtcaattaatgccaatattggcacacgagggtgcgatgttttctataggcatcaaaaagttcaagaaacaccaaaacatgatttttggacatattggagtgtatcgggtggatacatggcaaaaactcacttcgtgattcgcgcggcgaacttttgtcaattaatgccaatattggcacacgagggtgcgatgtttttgaccggaatcaaaaagttcaaaaaacgccaaaacatgatttttggacatattggagtgtattgggtgcatacatggcaaaaactcacttcgtgattcgcgcggcgaacttttatcaattaatgccaatgttggcacacgagggtgcgatgttttcgaccggaatcaaaaagttcaaaaaacgccaaaacatgatttttggacatattggagtgtatcgggtgtgtttgtggcgaaaacacatttcgtgattcgcgcggcgaacttttgtcatataatgtcaatattggtatattttggcccacacgggtgcgatgtttttgaccggaatgaaaaagttcacaatgcaccaagacatgatttttgcacatattggagtgtcttgggtgcgttcgtggcaaaaactcacttcgtgattcgcgtggcgagcttttgtcaattaatgccaatattggcatattttggaccacacgggtgcgatgtttttgaccggtatgaaaaagttcaaaaagcaccaaaacatgatttttggacatattggagtgtattgggtgcgttcgtggcaaaaactcacttcgtgattcgcgcgacgaacttttgtcaattaatgccaatatttgtatatattggcccatataggtgcgatgtttttgaccggaatgaaaaagttcaaagtcaaacataatagttttttctcttttctttctttcttctttctttcctttccttttcttttcttttttttttgggtgcggcttttcttttcttttttttatgcacctttctgcctttttttttctttcttttttttttattttattttacaaaaacagattcaaggacctcaatgtaaggctatagggactcaaacataaatataaaatttacagtgactcaaatgtaaaagtctaaaaccaaaattaaaattatacaaaaatggaatgctgaatttatactggttccgtttttctgaacggatatcgaaacggacaccaaacaaaaattcaccaaggtgtaaggatggcacggtgtagattgaaccgaaaggagagggagtcggactcaaggggggaatgccgcatggaaggtggttggactcggtgagaatttctgaaggaaggaaaccgattccttttctgcgtggccccaaatagaaacgaaagtaatctaatctagtctaatcttctccttccatcttcctcatgtgcatcttctcccttcttcctcacgcgcacatgcacggcagaaacaaacacacacaaggataggcaaactctagatgcaacacaagaactccaaaactaaccgacagaaacttctgaaaactacaaaaatagaaccgtggcagcgagccgattccgttttcgtaggtcccgacaacaacagagacacggtggcagcgacgactgtggtacaaaacgtgaccagaactcgaaactctaaacgaactagacgctaaagccagcagctcgacgtgacgatgcaacacaaaattcaacaaagcaaaaactgaagagaacaatgcaatggcacaatatggctaggtaaatgatacaaatttttttgtatggctattttctggttatgggtagaaaaaaactcaccgagcaacgaaagtctctgataccacctgctgaaccctgagttcctctcgacactcaaggctgttgttggcccgatctttcggtgagttgtgataactacgatttgggagaaacgttgacgatccgactacaaccgtacgagacgttgtgttgcgccttagcgatcgatacacctctccgtgggttgctgatcttgccggtgcagatcaaccctattcctgcaagcaaatcgaagaaacaagcaagaacaagataaaagcaatctgatattgcaaataggaatttaatacaaatgataagttggggttccgaagaacaagcagacggacggtctagccgacacgcgcgctgcaagcaagtagcaatggctaaactttaatctaacaaaacccaagaaaccctgaaggggtacctaactatttatagaggtgggaggacgaccaagagggtccaagggtcgtgctccaccagattggggcgcaccccacatgggccccacatgggccagggtcccaaacaaagttacaagcccattggcccaatacaggagacgcagcaccttgcttttgtgattgcggccaaacgagatagatttccgagatgaggctggatccgttggaaggaggacttcgagagctttccatcaagtactcacgggcccaaaacggagcacgtatgtagatttggcggccgtttgaagtcagcaatgtaacacgtggccgaatcagattgcagcacatggaggacttgatcttgatgtcttcttgttgattcatgatgtgagcaatggtcgtatccatagtagccatggtcacatcatcctccccttcttcacagaaaaccgtcctcggtttttccatatggtgctcttcgcgcagtccactgaaaacaacctgtttcttgcaatcaaaacaagacaaactcgagacaatatgattagcagtaacatgtctctctagcttgcatattttatccggaactacaagatgttctaaatctgaacaaatgtaaactctatgcaccaaaaatattcctctatcattatattcgccaaagatatgaaaaatagcattagttggacatggcaaatcagatttagcaaataatttctccttcaaattatcgagctcacaaaaatcatcaaactgaacatagcccaaagtatttaaagaagatagcaatttgcgttcctctacttcattagcaatgtgaacaacatgcttagaatcagcacacaaagaaatagtagaactaacatgttcattcactagttgtggcatggatataagtgaaacattatcacacaactcttctttatcacaaggaacagcaagtaaatcaacttgtgacaaaggcaactcagtaattgattccactaatggttgctctactatagcatgaaaagtggacaagtgtagctcaccttgagaatactcaccttcatttctctcagcaccatttaatttaccttgcgaactttcttcaaataatgtagcttcatcagccttctcctcattcgcgagtgatggaagtgacatctcaaacatatcgttcttctcattttggagacttttctgaacttcctgcaaaacatcagtgataggaggcacaagcatatcttgttgctccattggattctccaaaattttgcgctcaacaatgcaagcaagcatgaacaattggcctatatgattatatgtcacattaacaagcccagcctgaatattgaaattaagccctctgaaaaatctagtcattgtgttctcattagattcttgtaaaccactataagtgatacaaattttaaaatcataaaagtactccctaacagttttgtcaccttgttttagatgttcccatttctcaaggagagcacgtctatagtatgaaaacacaaatctttttctcatcagtattttgcattcatcccaagtttcaagcttattccccacagtatgccaccaaaaagatgcagaaccggtacacttattactagcagccttaatcatttgagcattagaaaaatcatactcatcaaattgtttttctactgctagctcccaattaatgtatgcagcggaatcatactttccatcatagactggtaacttacatgcaacttgtgcaaaattatagtcatgtacctcatatgcatcacgtgaagaagtcgtcatatctcgtcgaaggtgtagatgttgacgttgagcatgaccatcttgtttccccttgcgcaatcctgccatggttagcagcaaacaagaaacatacacaagaatatacacgctcctatcaactactaggtactggcagctcaaatctcacacacactcaagcttttaaccaagctcttacaagatcttaccaatgcaagtggaatggtgatgtacaccgactcaaccaagcaccccaatagaggttggatatatcgatgcctcggcaaacacttgctgtacggctgcaatcaaatctgtggagctctgggtaggcttaaatatgtagcaaaggaatagcaaatgctcaaatcagagaacgcaaagttgaataattgttcaaagtcaagtaccgtgctggtcctaggctagaacgtactagagacgcgagcctagacacaaacggtaccacaaaatagcaccagaaacaactcaagcacactctgatgtatgaagttcagctcaaacaaaacaatattttatcttttctttctttcttctttcttcttttcttttttttccttttcttttctgattttttttggtgcggctttttttttctttttttttgcacctttctgcctttttttctcactttttttttatttttttaacaaaaactgactcaaggaccttaatgtaatattacagggactcaaacataaatataaaatttatagggactcaaatgtaaaagtctaaacccaaaattaaaattatacaaaaaaatggaatgctgaatttatgccggttccgtttttccaaacagatctcgaaaccgacaccaaacaaaaattcgccaaggtgtttgacacaactcagaacggtggaagagagggagggagtcggactcggccaaaggggcgagtgggactcggccaggaggtggagtggatggcagccgaattttgtgtatgggataaaaaggatactgatttttaaccaatccaatctactatatctttccaaaacaaacttgacttcttccaaaatcagatatggtaattcaccttcctcctctcgtgcacgacacaggcacggccaaaacaaacacacacaaggatcggcaaactctagatgcaactcaagaactccaaaactaaccgacagaaacttctgaaaactacaaaaatagaaccgtggcagcgagccgattccgttttcgtaggtcccgacaacaacagagacacggtggcagcgacgactgtggtacaaaacgtgaccagaactcgaaattctaaacgaactagacgctaagaccagcaacacgtcgtgacaatgcaacacaaaattcaacaaagcaaaaactgaaaagaacaatgcaatggcacaatatggctaggtaaatgatacaaattttttttgtatggctattttctggttatgggtagaaaaaaactcaccgagcaacgaaagtctctgataccaccttgcttgaaccttgagttcctctcgacactcaaggctgttgttggcccgatctttcggtgagttgtgataactacgatttgggagaaacgttgacaatccgactacaactgtacgagacgttgtgttgcgccttagcgatcgatacacctctccgtgggttgttgatcttgccggtgcagatcaaccctattcctgcaagcaaatcgaagaaacaagtaataacaagataaaagcaatctgatattgcaaaaaggaatttaatacaaatgataagttggggttccgaatacaagcagacggacggtctagccgacacgcgcgctgcaaggaagtagcaatggctaaactttcatctaaacaaaacctgagaaaccctgaaggggtaactagctatattgacattaattgacaaaagttcgccgcgcgaatcacgaagtgagtttttgctatgaacgcacgcaatacgctccaatatgcccaaaaaacatgttttggcgctttttgagctttttcattccggtcaaaaacatcgcaccctcgtgtgccaatgttgcaattaattgagaaaagttcgccgcgcaaatcacgacgtgagtttttgccacgaacgcacgcaacacactccaatatacccaaaaatcttgttttggcgttttttgaactttttgattccggtcaaaaacatcgcaccctagtgtgccaacattggcattaattgacaaaagttcgccgcgcgaatcacgaagtgagttgttgccacgaacgcacccaatacactccaatatgtccaaaaatcatgttttggcgttttttgaactttttgattccggtcaaaagcaacgctccttcgtgtgccaatattggcattaattgacaaaagttcgccgcgcgaatcacgaagtgagtttttgctatgaacgcacccaatacactccaatatgtccaaaaatcatgttttagcgctttttgaacattttcattccggtcaaaaacatcgcccctatttgggccaaaatatgccaatattggcattaattgataaaagttcgccgtgtaaatcatgaattgagtttttgccattaacgcacccaatacactccaatatgtccaaaaatcatgttttggcgttttttgagcttttttattccggtgaaaaacatcgcacccccgtgtgccaatgttgccattaattgacaaaagttcgccgcgcgaatcacgaagtgagtttttgccacgaacgcacgcaacatactccaatatgtccaaaaatcatgttttggcattttttgaactttttgattccggtcaaaaacatcgcaccctcgtgtgccaatattcgcattaattgagaaaagttcgccgtgcgaatcatgaagtgagtttttgccacgaacgcacgcaatacactccaaaatgtccaaaaatggcgtttttgaactttttgattccggtcaaaaacatcgcaccctcgtgtgccaatgttgccattaattgacaaaagttcgccgcgcaaatcacgaagtgagtttttgccacgaacgcacgcaacacactccaatatatccaaaaatcttgttttgccgtttttttgaacattttgattctggtcaaaaacatcgcacccccgtgtgccaacattggcattaattgacaaatgttcgccacgcgaatcacgaagtgagtttttgccacgaacgcacccagtacactccaatatgtccaaaaatcatgttttggcgttttttgaactttttgattccggtcaaaaacaacgctccttcgtgtgccaatattggcattaattgacaaaagttcgccgcgcgaatcacgaagtgagtttttgctatgaacgcacccgatacactccaatatgtccaaaaattatgttttggcgctttttgaactttttcattccggtcaaaaacatcgcccccgtttgggccaaaatatgccaatattggcattaattgataaaagttcgccgtgtaaatcacgaattgagtttttgccattaacgcacccaatacactccaatatgtccaaaaatcatgttttggcgttttttgagcttttttattccggtcaaaaacatcgcaccctcgtgtgccaatgttgccattaattgataaaagttcgccgcgcgaatcacgaagtgagtttttgccacgaacgcacgcaacatactccaatatgtccaaaaatcatgttttggcattttttgaactttttgattccggtcaaaaacatcgcaccctcgtgtgccaatattcgcattaattgagaaaagttcaccgtgcgaatcacgaagtgagtttttgccacgaacgcacgcaatacactccaaaatgtccaaaaaacatgttttggcgtttttgaactttttgattccggtcaaaaacatcgcaccctcgtgtgccaatgttgccattaaggacacggatacagatggatgaagtcgttgcgacgatggatatctctgaggcaaatgaaggctaaacgagctgcggctcggtaatcgagatatctaggcaaatgaagactacacgggtcggtgcccgttagtcgagatgccatggcactggactagtacgcgggtggtctcacccctatgcgtgtggcgcacccggtctagatcctgttgctcggggctcaatcctggcctgcctgtcccgagataccggccgtaggcagggttgggtcggtacttttgttcacggctaggatgggtgaagggttatgtcacatgtttacgacgggttccaaggccatggaatgggatgtcaaaagaagcaccatctattgactcggctgacaaggagattcagccggaaaagactgtgccgtaggagtactgcgacacacggttgctgctgtttccccaacgaaaggacgagcagttcgctcgttttgtgatccagaagatccacatcaaagtgccgttgttggatgctatgcaagtgccaacatacgcccgttatctcaaggacatactcaacaacaagagaccgctgccaacaacggaggtggtcaagctgacggaacaatgcagcaacctgatactccacaagctcccggagaagaagaaagatccggggtgtcctatgatcacctgctcgatcggggcacaacaattcgaccagacctggtgcgaccttggagccagcgttagcgtcatgccaaaagacgtcttcgacaagttcaacttcacagtgttggaaccaacaccgatgcgcctccaactggctgactcatcagttcgttacccagcaggaatagcggagaatgtgccagtcaagatacgggatttcttcatcccggttgattttgtggtgctagacatggacatggggaaggagatgccgctcatcctagggcgtccattccttagtaccgcaggagccaacattgacgtgggaacggggagtatccgtttccatatcaacgggaaggaggaaaagtttgagtttcaaccaaggacggaacaatgctccatggtcagaataaagtacgggccgaatccgtagaatattcaagtggtcgaagtggagccacccaaaacggacagcttggtgatatttatgcagaatttcctggagaaggaaacaacgatgcccaggaaccgttattggaaaacgccggtaaaatcacccgtaccggccaagaagtcagatcagccggctcagaagaagccgccgtccgcaccaaaatcaaaaaaggtgtggaaggaaaagctaaagatgcccgctccatcacctccggagacgggtgaaaaatcagtgcactaaaccgaaaggaggtatgtatccgcatatttgctttcaacaatttaaatttttgtatcaccacatatttgaatttcaaaatgcatttaggctttttgaatttttaggaaattcttcaaatgaattttccagagcaaaccaaaataaaattttcaatgaaaatttattgtgccacgaccacactgaccgttggaatccaacggctgaaagtggggccggttgggcccaccaggggtttggccgaacaccctggttcggcctaaccggccaggccaacggtcggctgcctctttctttgaggcaacgtgatgaaccctgagttcctctcgacactcaaggctgttgttggcctgatctttcggtgagttgtgataactacgatttgggagaaacgttgacgatccgactacaaccgtacaagacgttctgttgcgccttagcgatcgatacacctctccgtgggttgttgatcttgtcgatgcatatgaaccctattcctgcaggcaatcgagaacaagcaagaacaagatagaaagcaactgaattgctagatagacaagacgcacaaagatgaattgatacacgataaagtggggttctgaacaagcagatggacggtctagccgacacgcacgctgcaagcgaagtagcaatggctaaacttacaatttatcaaaaccccagcaaccctaaaggggtatctagctacttataggggtgggagaatgaccataaggatcctagggtcgtgctccaccagattggggcgcaccccacatgggccccacttgggccggggtcccaaacgaagttacaagcccaaaggcccatgacaggtgacacaacaccttgttgcttcaattgcggctcaataagatggaatttcgcaatgaggctggatccgttggaaagaggactccgagagctttccatcaagtactcacgggccaaaaacggagctcgtatggagatttggtggccgtttgaaattagcagtgcagcaggtggccgaatcggattccagcatttggaggccttgaccttgatgtcttcttgttcatccatgatatgagcaatgtttgtatccatagtagctatggtcacatcatcctccccttcttcacggaaaatcgtcgtcgttttttccatatggtgctcttcatatagtccattcaaaataacctgtttcatccaatcaaaactagacaaactcgaagtagtgtgattagcaaaaacatgtttctgtaaatgcgaacaaatgaaaatgctatgcaccaaatatattcctctatcattatattcgccaaagatatgaaaaataacattagttggacatggcaaatcaaacttagcaaataaattctcctccaaattattgagctcacaaaaatcatcaaactgaacatagcccaaagtattgaaagaagttatcaatttacgttcctcaatatcattagcaatgtgaacaacatgcttaaaatcagcacacaataaaacactagaaatagcatgttcattcactagttgtggcatggatataagtgaagcattatcacacaactcttctctatcacaaggaacagcaagtaaatcaacttgtgacaaaggcatctcagcaattggttccactaatagttgctcttcactagcatgacaagtggaaaaatgtaattcatcagaagcatactcatcttgagtaatttctgcaccatttaatttaccttttatgccctcttcagataatgtaggtgcatcagccttctcctcattcgcgagtgatggaagtgacatctcaaacatatcgttcttctcattttggggactgttctgaacttcctgcaaaatatcagcgataggaggcacaagcatagcttgttgctccattgggttctccaaaattttgcgctcaatattgcaagcaagcatgaacaattggcctatatgattatatgtcacattaacaagcccaacctgaatattggaattaagccctctgaaaaatctagtcattgtgttctcattagattcttgtaaaccactataagtgatacaaattttaaaatcatgaaagtactccctaacagttttgtcaccttgttttatatgttcaaatttctcaaagagagcacgtctatagtatgaaaacacaaatctttttctcatcagtattttgcattcatcccaagtttcaagcttatttcccacagtatgccaccaaaaagatgcagaaccgatacacttattactaacagccttaatcatttgagcattagaaaaatcatactcatcaaattgtttttctactgctagctcccaattaacataagcggcagaatcatacttaccatcaaaaactggcaatttagattctacccttgcaagatcattatcaggtacctcatatgtgatgcgtgaagaagtcgctatatctcgttgatggtgaagatgttgacgttgagcatgaccatctcatttccccgtgcgcaatcctgccatggttagtagcaaacaagaaacatacacaaaaatatgcgcgttcctattaactagtaggtagtggcagctcaaaaatcacacacactcaagcttttaaccaagctcttacaacatcttaccaatgcaagcggaatggtgacatacaccgactcaaccaagcaccccaatggaggttggatgtatcgatgccttggcaaacacttactgtacggctgcaatcaaatctgtggagctctaggtaggcttaaatatgtagcaaaggaatagcaaatgctcaaatcagataatgcaaagttgaataattgttcaaagtcaagtaccgtgctggtcctaggctagaacgtactagagacgtgagcctacacacaaatgataccacaagatagcactaggagcaactcatgcacaactctgatatatgaagttcagctcaatgataacaaaatgattttctccttttcttctttttttctctctctttttttttgtctttcctgcttttcttttctttttcttttctttttttggtgcggcttttgttttctttctttttagcacctttctgccttttttttcttttttttaaattttttttcagcaaaaaccaactcaaggaccttaatgcaagattacaaggactcaactgtaaatatacaaattacagggattcaaatgcaaaagtgcaaacccaaaaattaaaattatacaaaaatggaatgctgaatttatattggttccgtttttccaaacggatctccaatcggacactctgaaaattttcaccaagctatgcgggaagacacggtatggatctaaatcgatagaagagagggaggagtcggactcggaggaaggaaggcaccacagagaggtggagctgaatattgcggccagcactagtgtttggattcagtgcacaaaataaaaggaaacggatttccacccgatctaatcttctttttctttcctattctgttctttcctttttttttctttccttccacccaaccgaatccaaacagatcttctatattcctttccccttcttcttcctcaagggcaaaacagaaccacagcacaagcactaagcctgggtaaacaacaaacccttgatgcaacaccaaaaccgaccgataaaaacttttgaaaactacaaaaatagaaccatggcagcaagccgattccgttttcgtaggtcccgacgataacagagacacggaggcggcaatgactctggtataaaacgtgaccagaacacgaaacactaaacgaactagacgctaaggcgcaacacaacgtcttgtacggttgtagtcggatcgccaacgtttctcccaaatcgtagttacctacaactcaccgaaagatcgggccaacaatagccttgagtgtcgagaggaactcagggttcagcaaaaactgaatagaacaaagcaatggcacaaagatggctagggacatgatgtaaatttttttgtatggctattttctgcttataggtagaaaaaaactcaccgagcaccgaaagctctgataccacctgatgaaccctgagttcctctcgacactcaaggctgttgttggcccgatctttcggtgagttgtgataactacgatttgggagaaacgttgacgatccgactacaaccgtacaagacgttctgttgcgccttagcgatcaatacagctctccatgggttgttgatcttgtcgatgcagatcaaccctattcctgcacgcaatcgagaacaagcaagaacaagatagaaagcaactgaattgctagatagacaagacgcacaaatatgaattgatacatgataaagtggggttccgaacaagcagacggacggtctagccgacacgcgcgctgcaagcgaagtagcaatggctaaacttacaatttatcaaaaccccagcaaccctgaaggggtatctagctacttataggggtgggagaatgaccatgaggatcctagggtcgtgctccaccggattggggcgcaccccacatgggccccacttgggccggggtcccaaacgaagttacaagcccaaaggaccatgacaggtgatgcaacaccttgttgcttcaattgcggctcaataagatggaatttcacaatgaggctggatccgttggaaagaggattccgagagctttctatcaagtactcacgggccaaaaacagagctcgtatggagatttggtggccgtttgaaattagcagtgcagtaggtggccgaatcggattccagcatttggaggccttgaccttgatgtcttcttgttcatctatgatgtgagcaatggttgtatccatagtagctatggtcacatcacaaaggctagtgggccccacaggttagttttgaccgttgtggatgcactatttaagccaaccggccgggagaggggactccaccccatttcaacacatttccattccctctgcaaagtttgctgtctagttcattcaagctgtgatattttccctcaaatttaaatctttagttgcatatatacaagttgctttggtgaaactaaccggcaggtgaaactcttatcattcctaacccccgccgagttagtccgttcttgcttcattgtgcagaatgaggaggcgattgtctcaactgttcaaagggtccggcccttcatcaagtcatcatgacgggtctagcactcgttcatcagctaatatctcgatggaagacgccgaagctccgcgacatgatacggacatcactacctcggatacacacaacaatcctccaatggtcattcaaggactgatagcaagagctcgtgcgcgacaattaaatttagaggtgagctcgttcctatgttcttctttgtatgaattcgagaaaagattgctacctaatgaatatattgtgattagaaataatagaggggacaaggagacacttggagaaggacttagagccatggaggatcatcgaggacgtccaagtcaaggtggaggcccaaaccaattcgacctcggtgcaattcggagtctaggaccagtctgcactaaaacgggcgcccaggtcgcatacgtgctcggattggggcgttctttatatgaatggaaaactaagaagataacctttccaatggttttggtcccacatccaaatactttccgagtcaatgggtatcgaccgaacaagttgacatccagaatctgtcccggtgctgtgtcaccgtatttgggcctttgggccatgtatcgtgttggaacccattagggttgcgtcgagagggggttgcacgagcctaaactctatatatcagtaccgctaccatctttaggttttagagttttgcttagattattctgtcgagaacagtttcgccgctagatcggtttgtaagaccccaactcgtgagcttatcattcatctgcaattttggttgttttctatctcgtttttgtttgtgttcttcgattggcaaatagggattagccttcttggcgaggtcatccgcgtttcgacacgggtgataaccagaggagacgtggtgttgcgattgcggggctcaagagcgtgcgcgttcaagaagccggatcgatttgtgtcgcgactccgcccaaatcattttttatcagaacctttcggaagatcgggaaccctagtgcacatcaagtggtatcggaggccgttgtaaagtctgtccaagatgccttcactaaaatcggcttcctgaaccacatggagaggttggacaagcagatatccacgctaactgatcgggttgccgcgttggagacaccttccaatgaggaagtggtgagtggtgatgacgatgctcattcggaagacacggtgtatgattccagtggctatattgacacaccagctacaaggcaagcacggctatgacgtcgcctacgcataaaccgcacaggtatgggtggcactcgccaccaacaaggtaataataatcgtgtgccagatgatccttatgctaaggttaagtttaaaataccatctttttcgggatattatgatgctgagaaataccttgattgggagatggcaatagaacaaaagtttaatgcccaccttgtacctgagcaacatagagttaaacaagctagtagtgagttcaaggattttgctatcatgtagtgggctgggttatctgatgagggggtactacctactacttgggaagaacttaaggtagctatgcacgataggtttgttcctccatcttatcatagagatttacgcaagaaattgatgcgtttggaacaaggggataaatccgtacaggattactatggtgagctacaaaagggtgtgagacgctgtggcatagtggagggggtcgaggatgctatttttcgtttttattctggtttgagggaggaaattcaaaacattgttgattataaggaatttaactctatgaaccagttgttttggtttgcaatgcttgaagagaaggaattgcaggggcgtgaccatcagggcaagaacaaggcaagcacatacactccacgcacgatgccatctacgggactacccagggccgtttcttttcgggcgccttcccagccagcgagcaagcgaccagctgcattcggagcttctgcggcaccaaaaccatctccaccacaaccagcagagtcaggtaatggttcttcgcaggtacccgccaagagtgcctcatctgtcgcctcgacgggacgcattcagtgccaccgttgccaagggtttgggcatgtgcagaaagattgccctattcaacgggcctatgttgctacagaagatggctacatcaccacctccgacgtggaagaggaagaggaggaagaagaagttgaggatgaggatggagaagtctttggccgtgatgacacaactgactacaggaccatcgttgtgcagcgggtgctcagcatgcaggtacagcagcctgagaggttgcaacgccataatttgtttcagattttcttcgtcatcaacaaccgtcgtgcacgtgtgatcattgatggaggtagctgcaacaatttggtgagttctgatttggtcaagaagcttggcttgactacacgtacacatccacatccttaccatattcagtggttaaacgattttggaagagcaaaggtaacacaggtttgtagggtttcgttttccattggctcatatgcagattctgttgattgtgatgtggttcctatgcaagcttgttcacttttgcaaggtcatgcttgggaacatgataatgatgctacactttagtgcataatggaaagaaaattactttgctacctttgacccctgctgaaattgtagaagctgataaagagcgagctgctagtttgaaacttgatgaatctgaaaatcagcaagtggctaaatctattttcctacctaaaaaggataagctttcacctagttctaaggttgagggaattaagttgaagggtggtgttatgcttgcaacaaaatgtgacattgctgaaatttcagatgatgatatttgctatttcttgatatgcaaacaagccttagtttctctagatgatattgctagttcgatacctcgtgttgttactaaccttttgcaggagtatgaggatgtctttccagctgagatacccccgggattgccacctatgagagggatatagcatcaaattaatttgattccaggagcatcattgccaaaccgtgctgcttatcgaaccaacccagaggagactaagggaattcagcggcaagttcaagatctcttggaccgcgggtatgtatgttaaagccttagtccttgtgtagttcttgtaattttggttcctaagaaagatagttcttgacgaatgtgtgttgattgtagagccattaataatattactatccgatatcgtcatcctattcctaggttagacgacatgcttgatgaattgtgtggttctataattttcacaaagattgacttgcgtagtggctaccaccaaattagaatgaaacttggagatgaatggaaaacatcttttaaaactaaatttggtttgtatgagtggttagtaatgacttttggtttgactaatgcacctagtactttcatgcgcttaatgaatgaggttttaaggccttttattggacgatttgtggtagtttactttgacgacatattgatttacagcaagtctttggatgaacacatggatcatttacgtgctgtttttaatgctctacgcgatgcacgtttgtttgctaacattgaaaagtgcatcttttgcacagaacgagattcttttcttggatatgttgttactccacagggaattgaggtggatgagtcgaaaattgaagccataaagagttggccggttccctaaaccatcacacaggtgaggagttttcttggtcttgcaggattctatcgccgtttcgtcaaagatttcagtacctttgctgcaccattgaatgagttgatgaagaaaggggtggtcttccattgggaaaagacacaggagaagtcgtttgacactttgaaggacaagcttacacacgcaccattgctacaacttccaaactttggtaagacttttgagttagaatgtgatgagtcacgaccggaaataacccaacgggcgttccttacgtgcgtgtattattccttgtcccaggaggcaaggtacaccaaaagttgatacaatacagagtttaacaagcggaagcgtaaatagttaatttattacatgggcggcgaaggcccagcacacatgaagacgaacgaaaaatggcggaagactagggcgacgaccacaggcgcttgacggcaggcacgagctagacaccaaagccttcatcatccagcaactcctcttctgggtttgggaaaaattgagcaagactaagtacaaccaccgtactcaacaagacacatccacgagtgcagaataaatgcaaaggagtacaagggagttataatatagggggttagggtttgcagtaaacagcattaaatgacagttagttgctcaaagctacttttaaaaacacgctcctagagctatacaatattattaaacaaggccgtgaacccacacgaacctgccttaacccaaggcctacgatgattcagaccgaactggcaacccgaccctgggtcccagctcgtcccaagccaacccaggccaaccattccacattttagttgttgacaggttttaagaatgaaaacactaacttgggtacattgctaggcttgcccataaccgagggcacgactattcgaataggttatactctgatcagaggtgtacatctttacccacaagacacatcttcctcacgtgcaaccacgtgccacataccaccacggtatacggacggaagacgtgacgtagttcccaacccatcctagccatagacaagagtaccgacccaaccccacctacggccggaacctccgggacaggcaggcaggattgagccgctagcagcaggacaccagccctgtgccatgacatctcgactaccgggccgcagctcgtgtagccttcatttgtcctagagatgtccatcgacccccgacttcgtccatctccatacgtgtacttttgtttataaccagactgagccacaaactaagccttacccactagacatgtggaagtacggtagtgctttgcaacagaggcccgagcttaatcctgatagtacccgaggtacgactaacaaaacccaaccacgcaccttgagcccagcctaaaaccgttttggtggttttgaaaagagggggaggtgtgtgtccaattccaacataagccagccattccatactgtccaaatgatatgagaattcccaaagtctaaagttataaaaccacctaatgttgcataattaatcagcgaagcatctacctaaattcatactagtggaaccatgaatagagtacccactagttggggttttgtttatcctagggtgaacaaggtaataataacaatagcaataataataaggtcgtaacaaagataaataggcatggctaaataaaacagtgataacgcgggaatttaaataaagcgataatacaataatttaaatcaaaataattttataaactgggatttaatatgctcaaggatgatgtgacttgccttgctcgctttcccaaacgtcggcttcaacctccacgaagagcggatcttctgaagctgcagcgtctacacgaccaacggaatggaaaaagcaggaacaaaacataaaaatgggttcttgacttcttaaggaaaaattagagacttgaacggttcaattccgagttcaaatggccaagttatggccatttgaagtttatatgctctttaagtgaatatttgcgaatttcttcatttaaattttaatttaagaaggggtttattgcgtcagccgaggggagagggcgcgcggaccgggtccacggggggtggggcccacgcggcatcctcacggtccacggtggaccgggcgcacccggctagcaccggtcggcgccgtgggccccaagcgtcagccgcacctaaggacgtgggcggctgacggccgggccccacgcggcggccactcggtgcgctcgaaggcggccacgccggcacggtcggcgggaggcagcgcccgcgcccctatggtcgctggcggcggccataggcacagcggagcagcggccgagagaggggaagggaagggggaaaagaggcggcggtccacggctcaccctaggtcgacggcgacgacgaaaaaggcggccggagcggaggaaggcggagcgcggctcgggtcgacggggtcgacggcgttccggcggtcggcgggctcggcgacggggtagacggggtcgatggcggtgcggcgaagccggaggaggcgacgccggggctggagacggtcccggcgagcggagaaggccggccggaggtcgtcggcgacggaggagagagagggcgacggcgcgagctcgattccagcgaggagaaggcgcggcaaagggtggaaatgggcgaaggaggtgcgggtagggtttaaatagggttggaagggggagagggtgccgggagaggaaggaaaccggccgggaggtccggccgccatcaatggcgccggcgagatttgcgggggcaaatccgcctgtttgaacgcgagagagagagggaaaaatggggggaaagggagaggggatcatggggaatattttcccccactttattgcacgcggggacggcgggaggcggcgggattcgcggcggcggcggcgatagggcgcgggggaggcggcgggagcggcgggaggaaggggatgacgggtgggccccacccgtcagcgagggtggcgggcgggcccgcctgtcagcgacgcgcgcggggggaggggccgaatgggccgcgggggagaggagagagagggggagggagatgggccgagccggcccattagaggggagaggggtttttagggtttttctttttataaaacctttttaactttgtttatttcttcttaattattatttgtactctgaaaattccactaaaatttatttacacattttaggcttttaggaattatacaaaaatcctccaagccttatttgacttttagtttgcacattttaatttttggaggctttcacaaggattttaattattctaggtataattttaagggatatattttagggtcgttttgggacgtgacatgatgctagtggagttggcattggaggtgtgttgatgcaagatggtaagcctgttgcatactttagcgagaagttgcatggtcctgttttgaattattccacgtatgataaggaattgtatgctcttgtacgttctttagagacgtggcgtcattatttgtggcctaaagaattttgtattcactccgatcacgaatcgcttaaatattttcgctctcaaaataatttgaatcgtagacatgctaaatgggttgaatttattgaatcttttccttatgttatcaaacacaagaaagggaaagataatgtgattgcaaatgctttgtctaggcgctatactttcttgtcccaacttgattgtcggatttttagacttgaatcaattaaagaacaatatgcgcttgatcctgattttaatgaagtgatgttaaattgcaaagagggacgtacttggaacaaatttgttatcaatggtggatttgtttatagagctaaccgtctatgcattccagttggttcccttcgtcttttgttgatacaggaagcgcatggaggagggttgatgggacattttggagctaagaagacggtagatgttttggccatgcatttcttttggccaaggatgagaaaagatgttgagaggttcgtggcacgttgcacctcttgtcagaaagctaagtctcgtttgaatccacatggtttgtatatgcctcttcctgtaccttctattccttggacagatatttctatggactttgttt

SEQ ID NO: 5251 - DNA, 25212 bp, Oryza sativa
tcctcgccggcgccgttgacgccctctgtccagccggcaaggcgggcggcggcgcagaggggcggtggctgccagctggacagcggcgcagaggggcggtggcagcgggagttcatgcgagggacgagaggagtggtggcggcgtgatctggatagggaggagaagaggagttagggttaaagggtctgctcgaatcttaaagcatatctaatagtccaaaatttgaaagataggaggtggaattttctatcaacagatatgtagatagtcccatattttttgctgtcctgttttgtttccatatggtgctatattttttactaaaaaatagtcggcattcatatactccctccatctacaaaagttacacctatttcacatttgagtttttccaaataagttgttcctatttataatctttaattctttatgcattcaagacttaaatgaagagataaattaaatgttttattcgaactcaaggagtcatctaaatattcattggttgtatgcttgcattcactccttaattttgtaacatccaagatgatttaatttctccttggtcttggtatcaaaagtaatatgtgtaacttttgtggatagagggagtatattgtaaatttctaaattacatatgtaattttagtgtatttacaatgtaagtctcaaaattacatatataagttccaaaattagatatgtaagtttaaaattacatatgtaattagtatgtaattataatatactccctccatcccagaatataataagttttatggttggacacggttattaagaaagtaggtagtagaagtgagtggtagaggattgtgattggatgaatagtggaggtaggtgggaaaagtgaatggtggagggttctgattggttgggaagagaatgttgatggagaaattgttatatttcgagacaaattttaagtgctaaaagttattatattttgagacagaggaagtaagtacgatgtgattagtacgagtaatttatccgttaataatatcagcatgtacgctagaaacaaaacagaacagcagaaaatatagtttaatcttcgagtgaaagcaaatactagccccacatcttggagataattggaccgagcaaaaatcgactgcaaccggttgaaaaaaatggcgacacaattttagcaatgccaattcgaaaaataccccacctatgaatgccaagtcgttagcgccgacacatgcaaaagatgtgtcatcaaatagttccgttagaatgacaaagttctttcgagcttagcgaccaacacatagcacatgaatgttatggagtggaacaggacattttctggggaataagatcgaggaatttccaacgacaaaagtatttctagagccaaatgttcgctctctttcagtgaactctaacatacacacccaaagtgtcacctcggcatgaatccagtctaaactgtacagtgttgtttttttttttttttttgggatatgacacaaggcactaggatggtgaaactgatacagcaggatacatcacgtaatgatctctgacagtggaggtgatcagcggactggcaatggccatctttagaggcagctaaccatgttgatgttgagcaattcattggtcccctgccacatactctaaggagaaacaccagccattcgcagagaaattgggccatcagatacacaaagaattatgatctcactggtctttgagcaaaatcttccattaatacatcttacattacagtgaaggctgcagtgtcatttcttgcccattctggtgattttctgatggtcccccaggtgcgtctgtaggaatcttcgaatctgcacagtgttgtaaatcccaagcatcatgttagttcattgtgtatacatacctaacgatggcatattcagactagttaaccaacaaatatattataaacacacacacaccaggttcagttggcaatggagttgaggatttgatctcttcttttgcaggtgttgaaacctttgaacaaggcttatgaaacagtaaatgtgccacaatgcggtcgattggatttgtgtttgtttctgcttcacttgctggagatctgggattgtatcaatcaagaatttgtcactgaaaaaaaatatacctattgtactcatatatacgcaacggcagctagctacttgcaagcagcaaaaagatggtataaataagatgaattggtacgaggtagaaattgcagatcttcaactacttgctggatgatgaaggaatttcagagcttcttggctagggttgtgtttatttttttggagagattttcagaatcttttcgtacaaggctgcacattccagctacaaccaaaatgtcaggggaaccttcagctgttccctccaaccagtacaacaaaaaaactagcattggatccatagtatccttttactaaggatgaactaacaaataaaatcttaaaagaaatgagaaaccccaacaaaacaaagatgttgaaacttttgattacttaatttcaatattttatcctattcaatttcaaatatcattgggtaaatatgatatgataggacaattcacaatattagaactgttatcctagtttaattagatagaagtacacaaacatgatgccattcagatcattatcccctgttgtgcccgatgtactgttgatgactggaacataattttattcctaaatgtacaatcgttcaacttaggagtatcttgatctaaaatagcaatattacttatatactccctccatccaaaagtcttaagcatattttttttttggttttaccaaatgagatgatcatatttgcagtttcaatgtgctaaattaaattgttgatcagagcccaagaaaccatcttaatactcattggttgcatgcatgcatatagttccttgattttgttacatgggggatgagttatattcttcttggttttggtgaaaaaagaaatatgcttagacttttaatggagggagtattgcaatattgcattatgtacagtaaagcaacgcattactactagcagtgtccaaatgcgaggatggtaatacttaatggaaccattatggcatgaagcaaagcataccttcttttagatgtgtcttctgaaacttcatcatcatctttattactcttgttagcactacttctgtcactagtaatttgtctctctgagacactatgggccaaacggagtaaactgtctcgaatacaacgccgagttctggtatccaactgtgtaaagaagaaaatatggtcaattaatttatcttgaaataagccctgcaacagatatggtcttacatggcataaaaaaatcaatgtaaaaatctgaagaaatactaaataagctaccttcgcaagagcatcttgaagctgataatatattttttcttctataaaggggtcatcaggaatcccagaactcttctgaatctcttcatggccagttggaatcagctctagtgagaaaactttatttgcattatcatctatgacaacagaactccctaaggaatctggatttttgctctttggtgagtacgcttgaggtaccatggtatcgctgccagaaccatcttgaccaaactgctgctgctgctgctgaatagctatcagtgcttgcatttgctgtcgacgcctaagcttttcaatcttttcttggggtgtcatcatcaatggtcttgatggtatatcttgtgacttttctgcggaacttgactgttttggggaatctattgaagttcggtaatttgtagtagctggctttgtttgatggctttcagcctgaacatttgacatcagaggaatgccaggaaattgatatgaaggatatccatagtcagggaaaataaactgattagcctgctgaagttgtcccatgttcttgttatcatgtaatagcaagtattgaggagtctgaaggggttgcgcaggggctttggccaatgaatgcgaactggctggtcgatgctgtccttggttctgggagaagccacttgtactattggacattttacttttgcctctttcttctgttcttctccgtgacctcactgacttcttctgcacatctccctacatggagaagcatatttgtgttcagaaacatatttacatttagttaggaagagagcaaacttgttccctacaagtcagataaactaatcaatattcaactgcatctcaaatcttaatttgaaaaattgacatttataatgaaaaaggtagataaacatgacaacctccaatagaaacaaaaaaaaaggagtatcataaatcacaagagtatcatataatgaatgtatgttggtcattatgatgcctcacagtgcttaatttactggaaccttaaaagacatcacaaagttatagctgaaactgtcagaaaggactttgatttataattaaatcagtttagatggcttcctggatttaaaatacatgctaatgaagaattcggtaaaacaaaaaactaattcgaaatgaacagctgtccttcaaacttattaccctaaatgtaaacactcttatatgagggatcagaacaatgaaaacaacctcaggacatattttagtgtatcactataacaaaatgtgggagatggatttcattcataaaagttgataggatgcatcacatggctgactacctcctttggaaactgatttggttttccagaatattcattattcagatgatttttatgctcagcttgctctccagatttagcattagcgtctactacctgccaaaaatgaataacaggagtagccaagaagtaactgctaattatgacacataaatgcatgcatttagacatttaccttgctttcttgttcggtagttccaccagatgtttcattaatcagaagcgaagatccatgatcagaagatagttgtttattcagtggtatatgctgtggaaccatcaagtaaatagtatagataaaaaatagttcaaaattatggaaagagatgaaaattcacagtggaagattattaatgtatcgacatactggaaaggggattgattgtacagtagtatccaccagatctgaagatgctgagagaaaattactgccatcagcaaccatctcattaccaaatatggagtcaccattgctgtagacaataacatcatgtgatgagtttattcaattgtaacatgtgatgattttattaattcataagatttcagggaaaacctcttccagtgtctgatattacctaaataagcggtcaaaatcatcaaaatctccgatattaccccagtcacaatcaaggaagctgttactcttttcttcatgatcattaccaaacacttcagtttcaccatccagctgcactgtacatgggttaacaaaagctatataatttgctcacaaattatgtcacctcttcttttacataaatggtatccttttttccatgcatcaacatgcttatagattagctgttatgaaaatgaagcaggaataaaatccacacgcagcagtaataggatgaaacaaacctgttgtgtttcctgtgaccttctctaaactaggtgcagaactgaaatccaaatatgtagatgctatattatcatcgctgtagtttctatcaagtgtggcattcaaagaaggcaagtcaggccaggattcaacgtcaagttgtgtagctgaataatgttcactagcctgagaggcaggctgcttttccaaaactggaaactcagtttgaccacttgaacttcgttcagtaaggccaggaatattatcagtttcttcatcattcttcttctggtctccaacacttactaatgcactatcctctgtatccttagggtaaggcacaatatggtcttcattctcattgaactcagcccatattgcatctcccacctgcaattcaaacgataatctgaaaatactctgaggaaatttaagcagagtctcattgtcaaattattttgaaacaatttacggagccatcgtttcgcttattcgcggaataagcgaaacgcgcgaataagtgaaacggcgtatttgcaaatgaaaagtaatttgtgaataaaactgttatatacgtgttcttagcgatctaaaagaaaaggctgaaaaataaattttgatgaaaaaacctcaaaatcagctccaaatttaaggttgaaaattcaaattttagctgataagcataagcataagcgaaaagatgaggtcctaaaggagaacacacatgaatataccctacaatataaattcaattgtatagtagaataaataatgtgtaaaattagagtgcaagattcctatcatggttctctattcataatcgagagtgatatgagattatacaatttaggtcactaaaccgaaactattaagccacaacgttttaattcatatgggtaggcctgctgtctgaatcatgaatttttgataaaaagaagaccatttttcataatcaatccaatccattttacattacccaaagagtgacctactataagagaactttaatacaccaaatgacataagtatcagagtatgatcctacttctaataattcacaacagaaacactgtaacttgaagttatcagcgtccagcagccgtcacgtgaattcaaaaatatataaccttggttcacaatactgctatgtagagaagactaacgatagaagtcagattggcagcactcccgtggagtcgcaaaagattattgggacatccaccacccgtcgacgcaatagacaattctacaagttacataacttccaatttagtgtaaccttaccttatgagacctagcacaacccaaccgcacgcggtagcatctaaatgcccacaagactctctctgctaggtgagcctccttggaaataatcctatcatcctcgctcgctcgctcacaatcatcagctgcttcttcgagcactaaaatcccctagaaatgagaaggcggaaaagcaatatccccttaccagaccaccacatataaactagcttcgcgcggtacacgtgctcgcacagcaaagcagatccagccgccacagcatccgcggcacgaaactacagctaagaaaagcaaagggaaggacggatttcctctgcggcgcacctgctgctggtcgtcgttccactcgaacatcctcctcaggtggcggccgccgctggcgccgcacccgaacgagagcccgatacgcgctgccccccgggtcccgacggttgcatctccagccacggcaaaagggaagggcagaaaatcctccaattcggtgacgcggcggagaatcgcgttgcgcttgctcgcttctcctcctcctccactcgcgacctgtgttgtcgtcgtctgcgcttccctctcccccctctccctctctcctctcccttcccacccaccgagaggagtccagggaggggcggacgcgtggtgcaagatgattgggcgggcggtcggggttgaggtgcgggagggccacgtgtggagggggcgcatctcgggtagtggcggagatggctcgatcaaatgccgctcgttgattggctactgcgggacttagcgggttaacgggcggggcttagcgggctgggccgcgtcgactcgtgggggtcgcttttcatggcttgttgggcgggccgccacgggcaaaacgtaggaccagagatcactaagctttggtcatattagcgactccatatcaccgcaagtcgtttaggtattcaatcatgtttgtctactggttaaaaaaaacttatcaataaccattagtaaagtacaagtctagttgtgggttttgtatccaacgattgaccatctgtattattagaaaatttttatgattattagtatttttattgttattctttgtgtgatttattttttaaaatttttttatagatttttcaaataagacgaacgattaaatattggatatagaaactcaccactgtacttagggtgcgctcgtctgtgtttattgtagtatcgaattaaatctgagtgtaatcagtactgtaggctgttagtagtaaatatggtgggtggctgaatagtaggtagcaaggctggatggagtttgatgccggttggagtagctccttgagattgccgacggagcagtgatgcaagcgacgtgacgggacgggcagggctgtcagtagcaggcagcactaaaggcgctgcagccgctgctgttggtgtcggcttgacttgggagagggtggggcttttcctccttgctcagataggcctgcgcgcatggagccgacagtgataggcgcacaaaaaaagaagtaatgtgatcagcaggatgattagttgtagattaatgtacacaattaattgctcgataaaattctaatgaatgtgaaatgcgtgattaacaataccaaagttcacatagatagcaatataatagcgttatacaaattcgagtagaacaacaggacagttgtttctcgtaccgagaacacacataaaataggctaacttgagaaagacatgagcaaggaatacaaatttattaaggatagaaagtgatgcaggactaattgttgtaaactttcaatcacgtcacgaacagctctcatccccgcggcactattccgtgcgtcataccaattgcgcagcagtggtgcctgtgggatgggcgggtacctgttgtacaaccggttctgtgtcatgaaatgggggtctgcactgtcgagcctgaagttgtggagagcaaaaacgcagtgtatgatcttcgtttgggtgtggcctagggaaaagaggtatctccctaagaatcctacactgactcttcataactccaaaagctctctcaactgaagtacgcagggaggagtgcatatagttgaatgtttcttccctcccttgcgattgaccagcaaattcattcaaatggtagcgtacatgcgggtacggtggcaagaaaccgcactggcaagcgtacccagaatccactagtagatatttacctagacagtgaacatgagaaatttcagatgaaaattgcatgagggagtaatatgatggtgttgtgtactaactggattaaaaaaaccgtcaacattggtacttaccccatggcagccttggaaaactatggggatagttccggatagcttctgtgagcacccgctggtcgtgcacagctccaagccatccggcatctgcaaatataacacgatcgtcccatccaattacaactaatacattccttgatgtgatatggtgacgattgcggtgcaaattagcttcttcaactgcaacatgaactgggatgtgggtcccgtctgcagctcctgcatccccagcaaaaggcaagaaattttcatcttgcgcaacacggttatgcactcttcgaaaactaggatccacaggcttgttgatatcagctgccatggagtaaactgcatggtcaacagacactctcctaccaaggtcaacagacatcatcagcgaagatcaaacatacgacaacgaaatcggttaagaatttcacttacctgctggcaggcagcttcaacgtcctcctctttggaggaggagccagactacctgtatcccgcgtaagatagcaaatcatgaccccattccggtatctttgaaaaggagtcaaagagcgaggacggtgcgctttacctcggagccggcagacttctgccgagaaccggcgggagcgctcgatctcgcccacggcttccgcttggtcccgctgccccctgcgatggcatgagcggatgagatcttggcgacctcatcagcgaccttgccctttagcgaggcggaggcctagtggtcaacaaggggaccgatgacatccgtcaatggcaagacctgcaagagttgaagtcactttggccctttaaaagaataaagatacgcggcgtcccggttctcgcttacattaatggcagcagctttctcggctgccgacttatcgcagagcggggctggcggctcttcagccgaagaggtgccactgatcaagacctccttgaccctctgcaccagcgtgtcgtcaagaagatctaaaataaatgaagatacaaggaaacaagattagatctcgtctacaagtttaacatcgaaagtgatgagatgaaccctgaggtcctctcggcactcaaggctacagtttggcccgatctttcggtgagttcagataactacgatttgggagaaacgttgatgatccgactacaaccgtacaagacgttgcgttgcgccttagcgatcgatacacctcttcgtgggttgttgatcttgccggtgcagatcaaccctattcctgcaagcaaatcgaagaaacaagcaagaacaagataaaagcaatctaatattgcaaataggaattgaatataaatgataagttggggtttcggggtttcgaatacaagcagacggacggtctagccgacacgtgcgcttcaaggaagtagcaatggctaaactttcatctaaacaaaacccaactaactctgaaggggttactagctatttaagggatggaggaggtcagaagggcgttctccctttgtttggggcgcagccccccttgggccccacttgggccggggtcacaggcccataggcccattacagacaatgctgccccttatttcttcaattgccgatgactcagatggaatttaacaatgagattggatccgttggaaagaggattccgagagctttccatcaagtaatcgtgggcccaaaacggaggccatatggagatttagcaactgtttgaattcagcactatctcaggtggccgaattggattccagaacgcggcggacttcatctccatctctgcatgcaccatggccatcgtgtttatcttccatatgcaggccaaaataagtgaattggtcctgaacatataaacacatacattatgaggcagtgtcatattcttgattagattaaattgacacttgttatgaaacgataccacctatgggtatatgacatgatcaatggttgtatccgtcgtaggcatggtcacatcatcctccccttcttcacgggaaaatgtcctcggttttaacatgggtaattcacatagcatatcctcacgcaacgcttcatatggcgcattctttactgtatatggcagcaacattgagcgatctcgtcgctccccttcttcagaaccaacctgcgtctttggacaaaagcaaaacaaacttgaagtaacattagtggtcctaacactactctccagtttgcattttcttggcacaacaacagagggttgcatatctgaacaaatgtaaactttgtgcaccaaataaatttctctatcactatatttgccaaagatgtgaaaaataacattacgaggacatggcaaatcagaatgagcaaatattttgtccttcaaacaattgagctcacaagaatcatcaaacagaatatagcccaatgtatttaaagaagattgcaattgaagttcatcattctcactggacgtgtgaataacatgcttaaattcagtacatggagaatcaagattaaaagtagcatgttcattcactagttgtggaatggatataagtgaagtgctatcgcacaactcttctttatcacaaggaacataatgtaaatcaacttgtgacaaaggcaattcagaagtaggttccactaaagtttgctctaggttagcatggaaagtggaaaagtgtaattcatcagaaacatactcaccttgagtaatttctgcaccatttaatttaccttttatcccctctttagataatgtaggtgcatcagccttctcctcattcgcgagtgatggaagtgacatctcaaacatatcgttcttctcattttggggactgttctgaacttcctgcaaaacatcagtgataggaggcacaagcatagcttgttgctctgttgggttctccaaaattttgcgctcaacattgcaagcaagcatgaacaattggcctatatgattatatgtcacattaacatgcccatcaaattttaaaatcatgaaagtactccctaacagttttgtcaccttgttttagatgttgaaatttctcaaggagagcacgtctatagtatgaaaacacaaatctttttctcaatagtattttgcattcatcccaagtttcaagcttatttcccacagtatgccatcaaaaagatgcagaaccggtacacttattactagcagccttaatcatttgagcattagaaaaatcatactcatcaaattgtttttctactgctagctcccaattaacgtatgcagcagaatcatactttccatcaaaagatggcaaaaacagactcactcttgcaagattatgatcatgtaccttatttgcgtcatgttggtcacttgccatgtgttgtcgaaggtgaaaatgtccacattgagcacgaacagctccaaactctttgtgtaaccctgccatagttagtagcaaacaagaaacatatacaagaatatatacgttcctatcaactactaggtagtggaagctcacaaatcacacacactcaagctttttatcgagctcttacaagttcttaccaatgcaaactagaatatggtgtccacaccgactcaaccaaacactcgatggagttggatgtatcgacactttggcacacatgttcacaatctgtatagctgcagtcaaatctgtggagctctgggtaggcttaaatatgtagcaagtatggcaaatggttaaatcagagaatgcaaagttgaataatcgttcaaagtcaagtatcgtgctggtcctaggctagaacgaactagagacgcgagcctagaaacaaacaataccacaagataacactagaataagctcaagcatcactttttttttgagaactactcaagcatcactttgatataagagaacaaaatcaaagataagagctctttttttccttttttttcttcttccttcctctctctttttttcctttcgttttcttttctttttttttgttgcgcctttttttttcttttttttcacctttctgcctttttttcccttttttattttttttcaaaaaccaactcaaggacccggatgcaagattacagggactcaaatgtaaatataaaaattacagggacttaaatgtaaaagtgcaaacccaaaattaaaaatacacaaaaatagaatgctctcgtcccataggttccgtttttgcaaacagaattctaatctgatactccaaaaaaaattttaccaagttgtatgggagatcacggtatagatgaacccagagaggagatactcggactcggcctggttgcggacccgcggtggtggtgggtgaggaaaggaaggatgcggccggatttgttggggaaaaatgggaaacttatttttagccgaaccaacctactatttctttcccaatcaaacgcatacttccaaaaactgattcgtcctctcgctcaggtcacaagcgcggccgaatcaactcgcttcacatacaaaccacaaactcgagcaaaaccttgatgcgactccaaaactaaccgacaaaaacttctaaaaactacaaaaatagaaccgtggcagcgaactgattccgacaaggggggaggggggcgacgactgtggtacaaaacgtgaccagaactcgaaactttaaacgaactagacgctaagaccagcaacatgacatgacgatgcaacacaaaattcaacaaagcaaaaactgaaaagaacagtgcaatggcacaatatggctaggtaaatgacacaattttttttttgtctggctattttctggttatggatagataaaaaaaactcaacgagctttcggttatggatagataaaaaaaactcaacgagcaagaaagctctgataccacctgatgagatgaaccctgaggtcctcttagcactcaaggctacagtttggcccgatctttcggtgagttcagataactacgatttgggagaaacgttgacgatctgactacaaccgtaaaagatgttgcgttgcgccttagcgatcgatacacctctccgtgggttgttgatcttgccagtgcagatcaaccctattcctgcaagcaaatcgaagaaacaagcaagaacaagataaaagcaatctgatattgccaagaggaattgaatacaaatgataagttggggtttcggggtttcgaatacaagcagacggacggtctagccgacacgcgcgctgcaaggaagtagcaatggctaaactttcatctaaacaaaacccaactaaccctgaaggggttactagctatttaagggatggaggaggtcagaagggcgtcctccctctgtttggggcgcagcccccccttgggccccacttgggccgaggtcccagacgaagttacaggtccataggcccattacagacaatgcagccccttgtttctgcaattgccgatgactcagatggaatttgacaatgaggttgatccgatggaaagaggattctgagagctttacatcaagtactcgtgtgaagcatctaggcccacgttgttaattttggtaattaatgacaagcgctaattgtggactaaccattgctattgagatgatattttaagttaggtccacgtcatgtgtgcgcatggatgactatcgatcgattaaaattgacggcgcaaaggaaagagaaagaagacggtaaaactagtgctttaatttagaattgatcgaggtgtagggcgatcaaatttgctagtttattttctagtttcgctgtactattaagaggggtaatgacctagcaaagagatgattaaattgccacattaggtcattgcattttcacttgtgctcacattttcatcacacacacaaatactcacctttgctttcactgagctcggcctgaccaggggcggtcaaaccggccacatagtggcggtctgaccggtgtgccctggccagtctgaccggcctcacaacggtggtctgatcggcccataaggacggtctgaccggcggcacatgcccggtcagaccggcccgctggaggtcgggatggtgctactcggggtggccgatacagagccgacggagccttattcggtcagaccgagtcgatggcggtctgaccgagccgaggccggtctgaccgcctgctcaacgccagtctgaccggccaggccgatggggccctctaacagcactacaatggctagttttctagccgtcgcagagtagcacggtctgaccagccacatacctccggttagaccggcagagcacaaagttgggggatttcacccccaacggctagttttggttggtgggagtataaatactccccctcaagcagcaaggggactctcttggcacccaattcaattgcatacaccccttgcacctctctcacacccacttgagctttgtgttcatccatctagtgtgttagagggttaattagccaagagtcaagtgcattgcttccatttgtagagctagtatggcacttgattgatcatctccacgccgggtcattgcttgttactcttggaggttgccgcctcctagacggcttgtggaggagttgcccggtgacctctccgagaagattgtggaggaggcccggcgccggtttatgagtggtttggagttcaccaccttcggagtgaaggaagaactaccttagtgatcgaggcttgggtagtcctctccgtgggccggctcccgccttgcccaccccttgacgaagggggcgtgcggtggcttcgtggttgagcggtggagttgggctcgcctcaacggggagtaggaaaccgacgagtttctgaacctcggtgaaaaatctcttgtctccttgtctcatttgattgtcgcatttacatttgtgcaatttacatttctagagacaaacttgagatcatatcaccctaggattgctaaacattgacataggagtgtgatttactttcctagagatataattgagccactatcaccctaggtttgcaaaacataacctagttgcttagttagagttgaccctcaccaagcctagcaacttaggttagttttgattatgtgtcatttagttttaaatcgcctattcaaccccctctagtcgacatctcgatcctacaagtggtatcagagcttggtctctcttgattgggttttaccgcctagagagaagatgtcgaacgaggtgaaccatgtagggaaggctcccatgttcaatggcacaaactactccacttggaaaattaaaatgtctactcacctcaaagctatgagcttccatatttgaagtattgtggatgtaggctttgctatcaccggcacgcccttgactgagattgatcaccgcaacctccaactcaatgcccaagccatgaatgctttgttcaactctttgagccaaaaggagttcgatagagtgagcaaccttgagaaccgcatatgagatttggaacaagttggcggagatccatgaggtcacaagcgagtacaaggatgccaagcttcatttcctcaagatccaatatgagacattccccatgttgcctcataagagtgtgaatgacatgtatgggaggctcaatgtcattgtgaatgatctcaaggggcttggggcaaactacatgtcacaccctaaaaatcgttaatatataaattgttgtttaattggaattattagaaataattttaaaagccttgaaaagaagatctaattttaaataataaatcccaatataaaatggggccagataaaatttcattaaatactttgcttgattctatagttcctagagttttctgggatttatttgagccaaggaggtatttttaataaatggaattgcatttcatgaattatttaaattggaaaaggttttaaaagtctcttttggctttgggccgaaagtcggaccaaaaccctctctctctcctccttggcccaagtcggcccaagtcaagccgagccgcccgcgcgcgcgctcgctgccgctaacaggtggggcccacctgtcaggcctgtcgtctacctccggccggccgccgcccgaaccctagccgagctgcgccgccgtctccttccaaatccagccgcccctttccgtttctggtgaaattaatagaggggacatgatccctgggatcccctctatcttttctcttatggaatcgtcggctaatttcgtttggaaattcgtggattcgagttcgattcggatcgatctctctcctccgaaccctaatctttccttctcgtcgccggtcgccgtgggcctttgccgccaccttccaacccctataaaaggacccccaagcccgccgctacccgtcgccacccctgccttcgtctctcgtcgtccgtagcgccctagccccgtgagacctcacgccgccgtcgtcgccaccgctccagccgtgcgtcgccgtcgctccagtcgtcgctgtcgctcgggaaggccgccgtcgtggtcgccgtcgcgtcgccgtcctcgtccgcccctccatcgttgctgtagaccgccagagcaccgccgtcgtcgtcaagccgaaggtcgccgccgcttcttcctcgacgccgtcgccttccgttgatcttccgccgccgttttggtcaccggtgagttcgccgcgtcgctctctatgcgctggtgccctccgttcgtgccatcgcgccgtcgttcgccggcgagcttgcgcgcccgagccgccgccggtgatgacgtcatcgccgacgtcatcgttgccatccgtcgtagaccagtcgtagaccgttagatcttagccgtccgttgtggttaggatcgatctcggccgtccgttcccgtgaaccgtcgccgtgcacccggtccaccgcaaaccctagtcgctgacgcaataattcccttttccttttcaaaaataattcattattgcgtcataattcaattaaaacccatataagtgttttaatccgatttaatctttaaaaattcataactaattcatcttagctcggatttagttggttcaagtctctaaatttttctaaaattgagatctacatgttaaaaatatccacattactattcatgcttgtttatgtgctgttttggtgtttttgctcttttctgtttagattccgacgtttccggagagttcattttcgcaggagaagaatttgaagagttccaaggccagcaaggcaagtcacacagatcccaaacaaccctttgagcatgttgatcccgtttaaagctatcatttttattcaactattgcatttattttcgaatgtcattgggtggaattaacctatggtttgttatagcccttttgttcttgattattttattccttgataccttgggttattataacttgactagttgggctttatatattggttcagctagatattagatacgattgcttagccatgcttagaaacatgagcacactattgggataacttataattcactattatttaatgatggcttgatgatagctcacgatggtcaatcgtgattggttaattaattaaattgccaactaaaacttgctaatggtgggttgtgagcacatggttttgatggtcgtgctcatgacaattaaggaccggttcacgaatttcggttgtgaaacattaaccgtgccaaccacaagccagcgtgggcaacggctttaccttttgtatagcatggttcattgcggggcaccagactgagaagtggcggagataagctcacgggggtcgctggggagtccatgccttgtttataagggggtgattatgatccaggaacggtgcgctgtggtggattgtgttgtgtgaggggtactatcacagctcctttctgaggtaccgtggtggtattgaggcgcatggtgacatgtcgtggggctgtgtcttatgggtacagtggtacatctctggccagagtaaaactattcgaatagccgtgcccgcggttatgggcgggtctaacaatgtctttcgtgattagtttcacatttcccatcataaaaaaagatgctataactggtaataatttgattagctcctggtttggaatggtacattcctggtttggagatagaactgtgcagccgggatggttgttcagaatggttgggcctatgcaacagggtatgttgtatagcgttggattaatattgtttaattattacttaactgctttattaaattctgaaatgtttaataaatgttgtttaagcaaatgaaaccctactatgccatcctttgttatcctgtgcacttgcatatttgctgcgtggcttgctgagtatgtcatatactcaccttgcaatcattcatcagaggaggagttctacagtgatgctgatggtgtggatgattaggcgtagccctggtcaagctgcctgtggagaggagtcgcctgcgctgtttcttatttttccgctgcttagatctttattgattgagaggaactatctacctctgtaatgacattttattcgcttattaattagagtaataattgtactctattatcaatatgttattgtgtgcctcggctgattcctggacgagggttcacacacatgtaagcgtttggaattttggatagaaattccgggcgtgacactacaccgatcttgaggttgcccaaaagatgcttagggctctaccggagaagtatgagacccttgtcaccatgctcatcaactccgacatgtcaaggatgacacccgcaagcctcttggggaaaatcaacaccaatgacatgtacaagttgaagaagaaggagatggaggaagcctcaccttccaagccgaagttgaagataagggcaagggcaaagtgaatgaagtcaatgaggacttggaggaagagattgctcttcttgctagaaggttcaataatctcttgggaaggagaaaggagagaggaaggggctccaactcaaataggagaagaaacagaagacccaacaagatagaggagaactagtgatgcttgcaatacatatatctattagaataataatattccactagtattaggtatactaatcttttgcagagaatgacaataaagtggaggagaatcaacatcaactccgacgataaatcaatcggatggtgtcgagaactagacttatgtatgaatgggccaagaactcagaaataacacgacacattgggccaaaattcacaagtctacgaagaaggacaacaaaggaggccgccagccgaagatgggctgggttgggccagcccatggttcggccgaaccatagggttcagccgaaccacccgtggcgccgatggatgcagggtttggacggacagctgggattgatccccaatggcggttggagggtattaccgaccattccaatcgtcccaaccgtcattacctacctataaaaagagcttctcttctcacttcactcacacacctcaagcaattgctctctcatttctctccagtttagtttagtagtatctagctggtggaatagaaatagagtaggaatcaggagtccggaagccttcggaagagttcgggtatggctctagcagctttcctttcttcttttgtaaattttgtacttttattagcatactcttctaaatacatttatggtattgaaatactttccgagtatgtgagtacctattttacattatgttcatgttatactgaatatacggctagcatatctaggagatgctttggtgcgggtataatgtttgcttatgcaattactctatgtcatgacgatgatattagagtaatatctggtagtttagacgtagtgtctagattacgggatatcattatttggggttatatgttgcggatgagaggtgggccgctgatggtgacagctcagtacgggtattcctccgcaccggtatataatcctaagttaatttcctggggagggtattcctccgtatttagccccggttgtatggtcatgacagactatcgtaaggaactcggcagtcaggggtggcttctcgaaatactaggagggcatcggatagagggtattagctagtatatcagttaactagaatgtatgtatactatgtatattagaagtataggaatatattttctttctcttttctttccacttagctcagataatatattatgagaatgagtagtaatgcttgtgtgtcactctacccttggattatcttaacccctgcttagaatatgattatcataagtaatatataaattattagtcaatctatctctacatgatcttcccacgggataaaataaatacgatacccttagaatactctcgggtgaaatgctacaatggtatatctgtgcgcttgcggatgatctctgtaaccataatataccagaagtatttctgcgccattgctgggaattatatttctagtaatgtcgttaagaaataccagcaagcatttttggcaccgttgccggggaagattcataatagagattgcttgaactaatactttatatttacctctgtataatcatttcctttgcaggctaaccttggttgttttcactttttgttgtgaaaacagggtagtgcatgactggtttcaacctgccggaaaacttcaaagaatatccagaagctttcttccggggcgtcagaccgcgagccgttgctccgcagaaaactctaccaacagagaaaccagccataccagcgccaccgatcttcaatactatggccagcaagactcttcgcgagttcgctgctccctctactgacaatgtggccattgggccgcaaatcaacataggagacatggatttcgacttgaagtccagccttatcacaatggcgcaggctagcccgttctgtggcaagcctaatgtggatgccaatgctcatctgcaacagttcctggagatctgtagcacgtacaccatcaagggcgtcagtcccgacgccatcaggctgcggctgtttccgttctcccttctcgggagagcgaagcagtggttttatgccaaccgtgctgctgttaacacctgggacaaatgctcaccgggattcctctcgaaattcttcccgatgggtaaaaccaatgcccttcgtggaaggatttccaatttccagcagacaagggacgagtctattcccgaagcattagaacgactgcaggagtatgtggccgcttgtcctcatcatgggatggacgactggctgattgtcacgtcctgataaattcatcccgaaataaaattcattctctaaatggaataatagaattaattaaaattcgaaaagaaattggttaacactaaaatacgtacaagaaaaattcgaatgtggcccggagaatttttgttaaattctccttggtctaaaatgagccctcaaattttacttgaattttcagagcaccggaaatatttattaagcaacaaaaacaattatcaaagtttattaaaaagaaaaacctaaaaataatcctccttcctcatttgggccaagtctggcccaaagtcctctctctctctctctctcggcccgcagccaaagtcctctcttcctccctctctttctctccctctccttctctccctccttctcttgggcctccccttccccctcggcctaggtcccttttcctcccctcccgcctaggccgcgtcccggcccaagccgccccacccagccgccccagcctcccgaggcgcccccctgacgcgcgccacatgcgcgccgcatgcgcccgcgtggggcccacgcgccggtcatcttcctcctcccggacggcctcctctctctcccgtgcaaccctagttcgttcctccccaaaatccacgccattcaaaccgggaattccaaaattgattagggggaattaattcccattccttcctcttcaattccccctaatttcccccttgattcgtgcccccaatcgtcgggaacgcccgcgccaaccccggccaccttccatggccgccgggcgcctattccgccgccggtccccgcctctcccgtggccagctccctctcctcccctataaaatggaaccccctccgtgcgttctctcgttttagccccttcccgagattctccgtggctgcaccacctctccccacctcctccttctctttcctcggcgccggccaccctccagccgcctgtgccgcctcgcccgtgcggtggctgacgtcgccaccaccttcctcggcctcgcaggtgtcctctctccaccggcgtcgcctccgtttcgcgcggagaccaccggaggcgtgttcccaccggtgtccagtggcatcgccaccactgcaccgcctccagtcggccgttcaccgtgcctaaagcgttggccgacgctgctgccccctccctcggcacggtgacatcgccatcaacctcggccactccccggtttcgccgaaatttccccggtcggcccttcctccacccatgcgccgtcggccgcgccaccaccgcctccggcatcgcagcggcaaggtcgccctcggcctcgcctcccctccacccgaaccccgtcggtgttcgtcgtcgtcgtctccgtccgacgtcgccatcccctcctccggtcggccgttcctcctcgccggctcatcatctcgcggtgccgcctccgtcgtcggattcgcagcggcgtgtaccgcgccgtcctcgcctccgtgcagctgctgccggctgcctcgtcgcctcatcgccggccccggtcgtcgtcgtcgtcgtcctctcgtcgttcccggtcgtcgtggcgtccgtccctccgtcaagccgcgttcgttcgtcgtccgcgttccgtcaagtgagctgcggcagccccgtcgtcgtcttcgtcctcagctccgcgtcgtcaagcgttgcgccggccgcgtctcgccttcgtccaaggatcgtcgccgaagtcgttccctcgccgttcgtctccgtcgtccccgagccgtctccgctgcacccgtttgccgttgtcgttcccacgcctcgtcgtgtggtggtaaggatccgtcctctcgctgcccccgtcctcgtcctttcggtgtcgcccgtgcccgttgtgcggttgtcgaccccggtacctgtgtactggtgtcagtagtcgttcgcttgtgcgtgtggtgaccgtgttagtgtgcccgcttggtagccgcgtggtttccacgtgtgcagcccgcgtggtgtctagtggagtccgtttgtcggccactcgcctcggttgacacacggggtccgcttccgtcgacccgtggaccgtctctgtgtactcggtctaccgcggtcctttaggttgacatgtggggtccgcatgtaaacggcgcagccttcctgtcttttctaggctagcgcttacacatgttttatagttgcaaaacctaattataataatccgcaaatctccatgtaacagcattaaacttcggatgatcatatcttggtcatacgaaccccgaatcaacccgttcaagtctcctaatgtttgttataacataaagaaccgtgtgctttctttttaagtattgttattgcttatttataggcttgtagctttgcttgtgtgcttcgcgtagcttctgtcgttccgaaggttctcgaagcgtggttcgcggtcgtcgccgaaggttcggaaggccgttctctctgagcaaggcaagtcgcatcacccttgagcatattgaatcccagtttataaaattattttgatttaaattattgcattaccgctttatttaaattcctgcgttatcactgttttatttagcacttcctattaatcctttgttatgaccttattattattgctattgtttattatcaccttgttcaccctaggaaaacaaaaccccaacaagtgggtactctattcatggttccactagtatgaatttaggtagatgcttcgctgattaattaggcaacattaggtggttttataactttagactttgggaattctcaaatcacttggatactatgaaatggttggcttatggtggaattggacatacccctctcttcctctttcaaaacccctaaaacatgttttctggtggggtattgtatgcatgccagttatgggaagtagcaccccggccaatataaggattaagctcgggcctctgttgcaaagcactaccgtactaaccacatgtctaatgggtaaggcttaactcggtgctcagtctagtcctgaacaataattgacaaaagttcgccg

SEQ ID NO: 5252 - DNA, 25387 bp, Oryza sativa
ggcacttgtcaaatgatgaaacttaaacaaaccaaaatggggttctgaatacaagtatccgggtggtctagccgacacacgcgagtacaaggaagtagctgcagctaaacttccatcaaaaacaaaaccccaaagtgcaaaatggtggctgctaggagtttatataggtggaggaatgaccagcagaggaggtgggagcaaaccctaggttttgtggacccctaatgggctataatgatacaaggcccaagcccaagtttctgatgtaaagaactattttcgtcattctgagcagcctgggtcaaagttgatggtgaggccacacatagctgacagtagacgacgagatctttccaacaagtactcatttgccccgtttgccctccggagtgaagagcattgacttcatcaaatcagcgctgctagtgttgcttgcgatttggttcctctcccatattcctaacaacaagtagatcacaacaaccatttagtagcacccaattctgagaagaacttgtatgattagctaggaatgactttacctgataattaagttcacgagctcgagctctagtcattggtccttgctgtgtaataggcgtggttgtatcgttggaagggatgtcctcatcatccaccatgtgcgccaggtgcatgatggtagcgtcatcctccgagctagcatcccggaaggtggcgtagtcgcgggctcctccgcgacgagggtggtagcggtagggcaagtgctgcaactcgtccgggtagcgctggtgaagagtgccgatggcaaggagtgcggcgttctggcaagcagcggagaaggaatctccacccgcggtgaccgccaacgaagtcctctcgggtgagccagtgaggatcactgcagtaacctcccaagcagcgtggggctctgcatcgtcaccctcctgctccgggagctgcttgccctggtagtccactccatgcggataccccagaacaacgcacatgccccgcagttccaaaacgaatccagtcaggtccagaccacgacggttgatgctgccggccatctacaaacaaaaacaaaagagaaaagcaacattttaaaggtcagattttgacggtaaatgaagcagcaggacagagagagactagaggattttcacaaataagaaaggatttttattttgaaaatattgctaaggcttgggatctacggctcgtcctagggtcaagggggctctgataccaacttgtcacgaccggaattgacccaacgggcgttccttacgtgcgtgtattattccttatcccaggaggcaaggtacaccaaaagttgatacatttcagagtttatcaagcggaagcgtaaatagttaatttattacatgggcggcgaaggcccagcacacacaaagacaaacaagaaacagcggaagactagggcgacgaccacaggcgcttgacggcaggcacgagctagacaccaaagccttcatcttccaggggctcctcttctgggtttgggaaaaattgagcaagactgagtacaaccaccgtactcaacaagacacacccacaagtgcaggataaatgcaagggagtacaagggggttgtaatataaagggttaggttttgcagtaaacagcattaaaagacacttagttgctcaaagctattttgtaaacacgattccagagctatacaatattattaatcaaggccgtgaacccacacgaacctgccttaacccaaggcctacgatgattcagaccgaactggcaacccgaccctgggtcccagctcgtcccaagccaacccaggccaaccattccacattttagttgttaagcaggttttaagaattaaaacactaacttgggtacattgctcggcttgcccataaccgagggcgcggctattcgaatagattatactctgatcagaggtgtacatctttacccacaagacacatcttcctcacgtgtaaccacgtgccgcataccaccacggtatacggacggaagacgtgacatagtttccaacccatcctagccatagacaagagtaccgacccaaccccacctacggccggaacccccgggacaggtaggcaggactgagcccctagcagcaggacaccggccctgtgccatgacatcttggctaccaggccgtagctcgtgtagccttcatttgtcctagagatgtccatcgacccccgacttcgtccatctccatccgtgtacttttgtttataaccagactgagccacaaactaagccttacccactagacatgtggaagtacggtagcgctttgcaacagaggcccgaagaccggtccttatatggccgaggtgctactatcaaaaccatgcaccccgagcccagcctaaaaccattttgagggttttgaatagagggggaggtgtgaatccaattccacaatgatccaacaattccatagtgtccaggtgatgagaatattcccaaagtgtagagttgtaaaaccacctaatgttgcctaattaaccagcgaagcatctacctaaattcatactagtggtaccatgagtagagtgtccactagttggggttttgtttattctagggtgaacaaggaaataataacaataacaataataaggtcataacaaaggtaaataggcatggctagataaaacagtgataacgctggaatttaaataaagcgataatgcaataatttaaatcaaaataattttataaactgggattcaatatgttcaaggatgatgtgacttgccttgctcgctttcccaaccgtcggcttcaacttccacgaagagcggatcttccgaagctgcagcgtctacacgatcaatggaaaagaaaaggcttttactctaataaactccatataacaagcaggaacaaagcacaaaaatgggttcttgacttcttaaggaaaaattagagacttgaacggtccaattccgagttcaaacggccaagttatgaccatttgaagtttatatgctctttaaatgaatatttgcgaatttcttcatttaaattttaattttaaaagggtttattgcatcagccgaggggagggggcgagcggaccgggtccacgggagtgggacccacgcggcagcctcacgatccacggtggaccgggtgcacccgggctcacaccggccggcgccgtgggccccacgcgtcagccacacccgagggcgcgagcggctgacggccaggccccacgcggaagccgctcggtgcgcccgaaggcggccacggcggcgcggccggcgggaggcggcgcgcccgcgcccctatggtcgccggcggcggccataggcatggcggagcggcggccgagagaagggagggaaagggggaaatgaggcggcggtccacggctcaccctaggtcgacggcgacgacgaaaaggcggccggagcggaggaaggcggcggcgcggttcgggtcgacggggacggcggcgctccggcggtcgacgagcgaaacggaggggtggacgaggtcggcgaggatgcggcgaagccgaaggaggcggtgccgaggtgggaggtggtccggggcgacaacgacggtggaccggagctcggcggcgacggcggagagagagagcgacggcgcgagctcgattccggcgaggaggaagggcggcgagaggcggaaacggacggaggaggtgcagggagggtttatatagggttggaagggggagagagcggccggcggggaaggaataggtgcgggaggtccggccgccatcaatggcgccggcgagatttgcgggggcaaatccgcccgtttgaatgcgagggagagagggaaaaatggggggaaagggagagggaatcacggggaataattcccccctattgattgcacgcggggaggacggggacggcgggattcgcggcggccgcggcgctagggcgcgggcgaggcggcgggaggaaggggatgatgggtgggccccacccgtcagcgagggtggcgggcgggcccgcccgtcagcggcgcgcgcgcggggagaggccggatgggccgcggggagaggagagggagggggaaggagatgggccgagccggcccaagagggagagggagggaaaggggactttttagagtttttctttttataaaatcattttaactttgtttatttcttaataattattatttgtgttctgaaaattccactaaaatttatttacgcattttaggcttttaggaaatatacaaaaatcctccaagccttatttgacttttaactttgcacattttaattgttggaggctttcacacggattttaattattctaggcataatttagaggatgtattttagagtcgttttgggacgtgacaaacctacccctcttaaacggaatctcgaccccgagattcggaagaactgccgaagagattgggatgggctgccttcagctcgtcttcacgctcccatgtagcttcttcctcggcgtggttgctccattggaccttgcaaaaacggattacccagttcctggtcctgcgctccatggtgtccaggattttcacgggcctctccacgtaggtcaagtcttcgcgaacttcaatttgctctgaatcggcctgctcggatggcactcgaagacatttcttgagttgcgacacatggaacacatcatgcacgttgcccaaggaggcgggcagctccaactggtaagcgacttccccgcgtcgagcaatgatacggaaaggacccacaaaccgaggtgcgagcttccctttcgtctgaaacatgtgtacacctcgcaatggcgtgacccgaaggtacacaaaatcgtccactgcgaattccaggttacggcgtcggttatctgcataactcttctgccgggactgtgccacctttagattatcccgaatggttctgactttagcttcagcctctctcaggatatcagtcccgaacacttggctttccccaacttggtcccacaatagcggtgtccggcatttgcgtccatacaacgcttcatagggtgccatttataagctggcttggtagctgttattgtaggagaactcggcataggggagactcttatcccaggtcttcccgaaatctaggacacatgagcgaagcatatcttctaggatctgatttagacgctcggtctgtccatctgtctgcgggtgatacgcggtgctgaaatttaatctggtacccagctcttcttggagcttcttccaaaagtgagaggtgaattggcttcccctatcagatacaattttcttaggaacgccatggagactcacgattctagcgaagtagagctcggctagtttgttccctccataggtggtcttcacaggaataaaccgagctaccttggttagtcggtccacaactacccatatagaatcatatccgccttgggtttttggaagtccggtgatgaaatccatcccaatttcatcccatttccattctggtacttggagaggttggagaagtccggccggtcgttggtgctctgccttgacacgctggcacacatcacaaagggccacgaactctgcaatttcccgcttcatactaacccaccagtatttccctttcaagtctaagtacatcttcgtactgccagggtgaatggaataaggactttcgtgagcttcctgaagtatcagctgtttaagttccctgtcgtctggaacgcatatccgatttccgttccatagggttccgtgttcatcctctgtgaaaccagcggctttaccctgtttcatattcttgaggagtccatgcatatccggatcattcttctgagcctcgcggatttgatcgagcaaggtgggcttggcttccagcgtagccaagaatccacgaccaactatgcttaggttcaaggcttccatctgttgattaagttcgggtggaatgccacggacgtcaagagtgttgcaatggctttttcgacttagagcgtcggcgaccacgttggccttaccaggatgatagtgaattcccacatcataatccttgatgagttctaaccatctcctctaccgaagattcagatccgactgggtgaagatgtatttcaaactcttatgatcagtatatatttcacagcgattcccaatgagatagtgccgccagatttttagagcatgaactaccgcggctaactccaaatcatgggtagggtagttgccttcatgaggccgtagctgccttgaggcataggccaccacatgaccttcctgcatgagcacgcaccccaatccttggcgcgaagcgtcacagtacaccatgaagtccttgcgagtatccggtcagactaaaactggcgaggaaaccaacctttccttgagagtttggaatgccttctcgcattgcgggctccacacaaatttctcttctttcttcaacaactgtgtcatgggtcgagcgattttggagaagttctcgatgaacctccggtagtatcctgccaaacccaagaagctgcgaatttgagtgactgtcttgggttgcttccaatcaatgacggcggtcactgtttcggggtccacagcgactcctttagcagatatcacgtgccctaagaatttgacttcggacaaccaaaactcacacttgctaagtttggcatacaattgatgttcccgcaactttcccaacaccagacggagatggtgctgatggtcttcctctgattgtgagtacaccagaatgtcgttaatgaaaaccacaacaaacttatccaggtattccatgaacactttgttcactaagttcatgaagaaggcaggagcattggttaaaccgaacgacatcaccgtgaattcatacagtccgtatcgcgtggtgaatgcggtcttcgggatatcttcttcacgaatacgtaattggtgatatccggaacgaagatcaatcttggagaatacagtggcacctttaagctgatcgaacagatcatcgatccggggaagagggtacttgtttttgatagtaacttcattgagagctctgtagtcaacgcacatcctctttgtcttgtctttcttctccacaaaaatcacaggagcaccccagggggaagtactcggccgtatataccccttttctttcaactcttccaactgtttcttgacttcggccagttcatttgctgccatacggtagggtcgcttgtacaggggagtggttcctggagcaagatctatccggaactcaatctctcgcttcggcagcataccgggtagtttttctggaaacacgtctccgaactctctgacgatggggatttctgacagtcctatctgatgaagttctgaactaccgacagaagttgggggtgcaaagaaaacaaccggttgttccggccctcggtacagagtgacagtgcgtcttgcgcaatccactactccttggaattgagccaaccaattcatcccaaggatcacatccaagttcttggtgtctagaagaatcagatccgagggaaaaggaattccctggatttctataggaatggcagggctataatactttgctgtcataacccctccaggggtggtgatgagcagagggttcctaagcctttctatccccaaccgatttctccccacgaatggcacagatataaacgagtgggaagctccagagtcgaacaaaatggtagcagggatggaatgaatgaggaacgtaccaacgatgatgtctggagttgtcagcacgtcctcggccgtcacgtggttcacacgtccccgaatgacatccttaccaccgttgttggagcggggaggcgcttggccttgctggcgcctcggctttgggcatttatccgcaaagtgcccatgctcgaagcagttgaagcacagacgctgctgaccttgaacgtccctgcggccttgaccaggctgcacggctggcgtagggggacggggcgcacgagtcccttgctgactctgctgttgctgcggctgtgggatgcgcaccacgaattgaggtcggggcgcggagcgaggttgctgctgctgttgctgctgcgaggatgatccccctggatagggattggtgtagcggaccctttggttagccccctgttgattgcggaaattcgccaagcgacgcttgtgcgactccagttccttgtgcttggcttccaagcggatgctcttgtccaccagacgttggaaatccgagtagtccccggagaccagacgcacggacagctcaggatccattcctgccaagaacttctcttacttctcctcatcttcacgaacatcctccggggcgtaccaggccaggttgttaaactcatgcaaatactccatcacggagcggttgccttgcttcaactctcggaattcccttttcttaagggccatgactccggcgggcacatgggttctctggaaagcggcggtgaagcgggcccaagtaataggttgcccctctagctgcgtagcctggaaatggttccaccatagagatgcgggcccctgcagttggtgggcggcgaagatgactttctcctcatcactgcactgcacggtgtctaactttttctccacggcatgcaaccaatccaatgcatccacggggttattagagctagagaaggtaggcggacagatgcggaggaactcggcgagtttagagtgttgtgggggtggtggtggagcattatgttgtggcggattttggatgtggtggaggaaagcagccatcatgttggcctactgggcgacgatttgggtgaggatggcgttggtgtctggtggtggtggtggaggcggagaaggaggtggaggtgggctgacatggttgttgtggttgctgccttcggggtgactgccttcaccggtagcagcacttctcctggttgtcaccatctgaaaatcccacacagaaccagcaaacagagagagctgacaattaaaactaaccacccacgactaccataattcttgaatttattactgctattaaattggttcattaaagttcaagttgcttaagcaaataaaataaagacaggctccgacacagttataccacacaccggcataaccatgccccatacgactctagcagaaaaacaaaaaacgagaagaacacacgcgcaagcctactaactgctcgtctactgctgcgacgggccagggcggaaggtgagcaacagcgcatcctccgtactgccaacgccggaggctccatcctcctgaggaaccacgggcgcgggctcggcacgaggggtctcgacgaagcaggtccacgccagggactgacgaacaagctcgggcctggaggtactcttgcgggcggtgatcttcaggctgcggcagacgcggcgacgcttggggcgacagacctctccctgggcgatcttgagctgacgcagctgcgcctccactgcgtctaagtccttcttcaactgcagattctcctgacgcagctccaggatcttcatgttgttcttgaccaacccgcgacgcaccatctgatggaagtcgatacgggccgcgtcgtatgcctccactgatgcagcaacgggggttcccgatctttcgatgagaggaggataaacttcgatttggggaaggatacgacgttggcggtccgactacaactaccacaggggtgctacgccttagcaaccggtacaccgactccacgttattgctgttcttgccgtgccaagaacaaccttgaacctgcaagcaatcgaagaacaagcaagaacaagttgacaaggaaacagctcacggcacttgtcaaatgatgaaacttaaacaaaccaaaatggggttctgaatacaagtatccgggtggtctagccgacacacgcgagtacaaggaagtagctgcagctaaacttacatcaaaaacaaaacccaaagtgcaaaatggtggctgctaggagtttatataggtggaggaatgaccaggagaggaggtgggagcaaaccctaggttttgtggacccctaatgggctataatgatacaaggcccaagcccaagtttctgatgtaaagaactattttcgtcattctgagcagcctgggtcaaagttgatggtgaggccacacatagctgacagtagacgacgagatctttccaacaagtactcatttgccccgtttgccctccggagtgaagagcattgacttcatcaaatcagcgctgctagtgttgcttgcgatttggttcctctcccatattcctaacaacaagtagatcacaacaaccatttagtagcacccaattctgagaagaacttgtatgattagctaggaatgactttacctgataattaagttcacgagctcgagctctagtcattggtccttgctgtgtaataggcgtggttgtatcgttggaagggatgtcctcatcatccaccatgtgcgccaggtgcatgatggtagcgtcatcctccgagctagcatcccggaaggtggcgtagtcgcgggctcctccgcgacgagggtggtagcggtagggcaagtgctgcaactcgtccgggtagcgctggtgaagagtgccgatggcgaggagtgcggcgttctggcaagcagcggagaaggaatctccacccgcggtgaccgccaacgaagtcctctcgggtgagccagtgaggatcactgcagtaacctcccaagcagcgtggggctctgcatcgtcaccctcctgctccgggagctgcttgccctggtagtccactccatgcggataccccagaacaacgcacatgccccgcagttccaaaacgaatccagtcaggtccagaccacgacggttgatgctgccggccatctacaaacaaaaacaaaagagaaaagcaacattttaaaggtcagattttgacggtaaatgaagcagcaggacagagagagactagaggattttcacaaataagaaaggatttttattttgaaaatattgctaaggcttgggatctacggctcgtcctagggtcaagggggctctgataccaacttgtcacgaccggaattgacccaacgggcgttccttacgtgcgtgtattattccttatcccaggaggcaaggtacaccaaaagttgatacatttcagagtttatcaagcggaagcgtaaatagttaatttattacatgggcggcgaaggcccagcacacacaaagacaaacaagaaacagcggaagactagggcgacgaccacaggcgcttgacggcaggcacgagctagacaccaaagccttcatcttccaggggctcctcttctgggtttgggaaaaattgagcaagactgagtacaaccaccgtactcaacaagacacacccacaagtgcaggataaatgcaagggagtacaagggggttgtaatataaagggttaggttttgcagtaaacagcattaaaagacacttagttgctcaaagctattttgtaaacacgattccagagctatacaatattattaatcaaggccgtgaacccacacgaacctgccttaacccaaggcctacgatgattcagaccgaactggcaacccgaccctgggtcccagctcgtcccaagccaacccaggccaaccattccacattttagttgttaagcaggttttaagaattaaaacactaacttgggtacattgctcggcttgcccataaccgagggcgcggctattcgaatagattatactctgatcagaggtgtacatctttacccacaagacacatcttcctcacgtgtaaccacgtgccgcataccaccacggtatacggacggaagacgtgacatagtttccaacccatcctagccatagacaagagtaccgacccaaccccacctacggccggaacccccgggacaggtaggcaggactgagcccctagcagcaggacaccggccctgtgccatgacatcttggctaccaggccgtagctcgtgtagccttcatttgtcctagagatgtccatcgacccccgacttcgtccatctccatccgtgtacttttgtttataaccagactgagccacaaactaagccttacccactagacatgtggaagtacggtagcgctttgcaacagaggcccgaagaccggtccttatatggccgaggtgctactatcaaaaccatgcaccccgagcccagcctaaaaccattttgagggttttgaatagagggggaggtgtgaatccaattccacaatgatccaacaattccatagtgtccaggtgatgagaatattcccaaagtctagagttgtaaaaccacctaatgttgcctaattaaccagcgaagcatctacctaaattcatactagtggtaccatgagtagagtgtccactagttggggttttgtttattctagagtgaacaaggaaataataacaataacaataataaggtcataacaaaggtaaataggcatgtctagataaaacagtgataacgcgggaatttaaataaagcgataatgcaataatttaaatcaaaataattttataaactgggattcaatatgttcaaggatgatgtgacttgccttgctcgctttcccaaccgtcggcttcaacttccacgaagagcggatctttcgaagctgcagcgtctacacgatcaacagaaaagaaaaggcttttaatctaataaactccatataacaagtaggaacaaagcacaaaaatgggttcttgacttcttaaggaaaaattagagacttgaacggtccaattccgagttcaaatggccaagttatgaccatttgaagtttatatgctctttaaatgaatatttgtgaatttcttcatttaaattttaattttaaaagggtttattgcgtcagccgaggggagggggcacgcggaccgggtccacgggagtggggcccacgcggcagcctcacggtccacggtggaccgggtgcacccgggctcacaccggccggcgccgtgggccccacgcgtcagccacacccgagggcgcgagcggctgacggccgggccccacgcggaagccgctcggtgcgcccgaaggcggccacggcggcgcggccggcgggaggcggcgcgcccgcgcccctatggtcgccggcggcggccataggcacggcggagcggcggccgagagaagggagggaaagggggaaatgaggcggcggtccacggctcaccctaggtcgacggcgacgacgaaaaggcggccggagcggaggaaggcggcggcgcggttcgggtcgacggggacggcggcgctccggcggtcgacgagcgaaacggaggggtggacgaggtcggcgaggatgcggcgaagccgaaggaggcggtgccgaggtgggaggtggtccggggcgacaacgacggtggaccggagctcggcggcgacggcggagagagagagcgacggcgcgagctcgattccggcgaggaggaagggcggcgagaggcggaaacggacggaggaggtgcagggagggtttatatagggttggaagggggagagagcggccggcggggaaggaataggtgcgggaggtccggccgccatcaatggcgccggcgagatttgcgggggcaaatccgcccgtttgaatgcgagggagagagggaaaaatggggggaaagggagagggaatcacggggaataattcccccctattgattgcacgcggggaggacggggacggcgggattcgcggcggccgcggcgctagggcgcgggcgaggcggcgggaggaaggggatgatgggtgggccccacccgtcagcgagggtggcgggcgggcccgcccgtcagcggcgcgcgcgcggggagaggccggatgggccgtggggagaggagagggagggggaaggagatgggccgagccggcccaagagggagagggagggaaaggggactttttagagtttttctttttataaaatcattttaactttgtttatttcttaataattattatttgtgttctgaaaattccactaaaatttatttacgcattttaggcttttaggaaatatacaaaaatcctccaagccttatttgacttttaactttgcacattttaattgttggaggctttcacacggattttaattattctaggcataatttagaggatgtattttagagtcgttttgggacgtgacaccgtcctcctcctcccgtcaacggcaccgcgctcctttccctagtcggcgccctcacctggtcggcggcgcgtcctcccctcgtcggcactgtccaccccccttaagaggcgccgtcctccaccccttctcgccgcccacctccgcgcgctcgttgcccgccggccacgagcacggcccccatctggctcagccatccccggcgctcctctctcccttcctctctctccacgattgcgggtattttggtcttaaaactcctcaaagtggcaaagtatactgatgataatctatttagtggcattttatcctttgtattctaatggatggcatttttgcactcttgtggagtggcatattgtccgttttctccaatttgcccctgttctgttagatcggtttgacggtgttaattctgggataaaaagacatatataccctttgcatattgttgcagtttgtctgtacttctgtaaaaaaaaaagtcgtgcttttgcgatgtgtactcctactgtcctacatgcggcgatggctagaaacgtatcgagcatgtttgatgctccgttggtgttggtgccctgacacaagcgatcctccaaacagatcaatttaattcccggctttcatgaacaaaaacgttgcatacatcaggaagggaaaaggaaccgagaacacaagcaaaaattattccccaaatccatgaatctatcacaacctaaaaatgaattttcccagctgcttgcaaattgattcgatcaatagaacgaactgtgaaaacctactgctttgcacgatgtcaggatgtggcgtggctgcatcgccagcttcatgcggatggtggatacagcgaagtgaagcaacagataaaggccgggaatcggaggggagcttcccggcgccgacgttggtggacgacgcggactgcagcgtgtcgaggccactgggagtcagcgccgtcgccgtgctacacctccccctgctacacgtttgccgtgccgcgtcccgtacggccgtacctcacctcttccagctgaaactcaaccctgccgcccctccacatgcgcgcctagccgtggagctacgtcgactcacccctcccatggcttaccgtgtcgcctccctgatcgcgcaccgcttgcctgagcagcagtgctgcctccgccgtctgctcctccctagccagggcgttgggtttaaggggataagggatttttggtcgggagtagaacgattattttgcattttgtaaatcatttttcttttctttctacttttaattgattgaatcggagcacacctaacagccattcaaaataggggcaaaatgcaggttcagtctaaaaaagtaagggcacaaaccctaaaaataagaggtaaaattataattgcatagctaacagagaaaatgtgaaaatcgaaccaattgcattttaggatcgaataccatcctcaatctaatggcaaaaccaagaaggttaacctatgcttggagctctatttgcgttgctttgttcatgctatgccaactaagtggaattcatggttgtagcataattctgattcaatatctcatatcactcagttttgcttaagtctcctttcgaagatctttatgggtatccatctagtcagggtgtgtttaatttcacgccaaaattgaaagtttgactaaaattgaaagtttgaagaaaaaagttgaaagtttacgtgtgtagaaaagttttgatgtgatggaaaagttagaagtttgaagaaaaagttggaaactaaaccatgcctcagtttggaattggagatgatgcctgcagtgttccaaatttggataactggctaaaggaaaggaaactgctgactcaattgctcaaacaacacctcaatcgagcaaaacagtagatgaaaacttatgccggtaagaaaagaagttcaagagaatttgttgttggggaccttagtcttttgttgctaagagggcaaatcacaagctatcatttcgttattttggtcctttccgggtgattgccaagatgggtaaggtagcttatcgcttacatattcctgaggacagcaccatccatccggttttccatgtatcccaactcaagtcaactaccgtttgctggtgctgaatttcgttgttactactgcttagcatcacgcgtggggagacgtgggtagatggagatcggcgtcaggaaggggagcgtgcaatcgcgatcaccttgggaggacttgaaagaccgatttctgttgttagttttacaaagaacccatttttttaattttaggaagtctattttagacgttctcttggagagatacatctcaaattctgtttagaaaaccaaaaaaatatttttacatctcaaattctatgtagaaaaccaaaaacaaaattttggaaattgatttttgggtatcacttggtgatgctctaagagagtcatcgtgtccaattttacagttaaggattacgaataagatctaatatatatttaagagtcaaattggaccttttcctttgaagaaccgtactactgcagaccatagttcgtttattcaggtactacatttcggaactagtataaataaaacctggcctactgctgattactgattttttatagtatatgttcaaaacagaaattgttatagttacttcttttcttttttaaaaaaaaagctgtgattcatacatgttcttcaatacatatgtgggtaaggatggtttgtctagattaatagtaaaaaagaaaaggctgtcacattagttgtaatggaatgcactcaaatccaatccagtgagttgctgatatgcctcagaatagcaaggctcatcattggtttgataacatttgcatagtcacacaagctgtactacgagaatatagtcgtgtgtatgccaacctgcgacattatagaaaaagcctgtcaacctgtttagtcagtatcagaagaaaaattaaccctacggaataaaatctttaagcatcctctctgctcaacattgagcctgatatctgaacatatgacatctgagtgtagccattgaaaactgaggcatccaatctcgctagaccaattcgttgaaacatgccaaaacgaccatcttcgatgataggatcagatgcacgggctgggtcatatcttgtttggtgggttaaggatggaccagcaactggaggtagctcccaatacaaatccaacacggattcaacaagtctgctgttctggaaatgctctttgtatgagatggctttgttgctatggttgaaattgtcacgcatataacctctaactccccaccatgcatcatcctttccacaaagctcatctgtttccacagctttctcccaaaaactctttcgtctcgaccttaatcttgcttcgtcactatcccaaaagcagctatgtccaccacctgggtagaaaaaatacatgaaaattagtttttcagtgtggagggctgcctttttcagttttattgaggaatttcaaaaaggaagattataatccagctgaagaatatggtgttgcaatgtagtgttaatagaggaaaatggaacaagatagcattataggaaaaatgaaggagacccactgattagcatatctttaaaaaaaaactgcaatctggaatatcaccgactaaacttctggtatacattgatattaaatgggttcagaaaatgaaacatgatgcctgatgaacaaattaatgaagttgtggtaatcggtatcattaccaagacatcacaagttaagagcttcaagttcctcatatcagtttattgaattgtagtcataaatgtttctttcctaaaacccaacataagtaaacaaatatatgtcaagctgccagcagattatagttgcatacaaacaattataggatatataacatatcatttctagttggtctagtatgctccatcggagtaaaatattaagctgagaaaaaacataaatttcgacaataattgtatttggaagaaaatctgcacatgtttggacatgtcgagttaaaaaagaacagaaaagttcttagtaacatattggaaaccttggtagacatagtgtttagatcatgataataacaaaaaatgtaaggttatcttatatcttagaaatacaacaaaaaaaagcacaaacaaaaacatgataataacacccagaattcataatcgcatgattagaaagaaataaaataatctcaatatgcccaaaatttactttttaaggaagtcagtacaagagattgcagaagaaatataaagaaaataaggagaacattgaaaaaggaaaactgtgtcacattaagaacgttaaccattcaagaatgtcttatggtaacagaagacatcacctcatattataatgccttctacttcagaagataaacaaacctaactgcacttatactaggaagacaagctaatggaactactccaaagtaatgtgacacagctggctcaacatctatatgcaacatctgatgtatcttgattattgaaaacttagaatccaaggacaaggtgacacacctctgatgtgttcctgatcgcagatctgtcttaaggagtaatgatcgcctgtaccagtgtcataattgtcctcaaatatgatatgtcggaatccaactattgaagcctgttttaacctacataaaacaagacacatcaaaataaatttaagtttcgaaaacttagagataagagtgcactatttattagagtgaatgcttagcatgtgtcatgctgacagttaagaatttgatcataagaacagttcaatacaaaaacactacaaatatggcaatacccaacagaaaatagtttgtccacagttcaagagaaaggttgaacaatgatgatctacagaaagactttacctcttcaactcactttggtgatcatcaaagaaaacaagcactctgctgagatcagaaatgccatgattcctcaatagcttcccccaatcaacacttccgaagtcaataaaatccttcccagcaagataagtgcagttcccatcaacatatgcaggccccttcttcagatatttctcagggtgtctgggtgagagtgatataatcttagtatttggcatggcctgacgcaaaacccatgtagagtgccccttgaatgcaccactctcaatcatcagatctggcttaagccagcgagccacaaaccaaaggccaaaactgtggtcaaagcccattccatacatgttgttcttgataggtcgtgtttcatatattggtacaaattcttccagtccacgaagtagatcctttgaagtccactccactatctttccagtttttgatctgcctttagtgaagaaaaaggacaatgatattccatacagtcaaaagtgatatttcaaacaaattaccccagtatagaggttcttgtgaaataataacaaaatataccccaagaaaaactcagcactacgtagagaaacataatcatgtctaccaacagctacaaacataaatataagtacactggtggcaactaagatggtcaattgttacaggacttcaagaaacagaataatagattgccaccgcaatgttcgcactcctatctagcagcagtcattgttcaagaaacagaataatagattgccatggccatgttctcattcgtatctagcagcagtggaacaatgaccgaggaacaaatctgaacaagtataaaccaacagagatcagttaggagcaaataactataataaatttgcacatataatgtggtcatcactcatcgaacaagctatcaagctattctgtcaaatacaattcaagatttcaggtgaatatgcattgcgctcacataaagctagcctacaacctatggtgttaggtgtctaagacactaacgatgaggaatatctgcatgagcagaatcattttcaaacagggaggagattagttgcgaaagggtgattacttcgcagaaaagaaccggatgtccggatctatctcacaagaatcaacagcggcgtgagggcttacaccagggtaccccgagggcgccgaagtcggaggccgcggccgcgtccgggagagcgagaaagcgcgcgtcgagccgcggcggcgggcagtcggcgcgggggcgggcgcggccgatgaggaaggcggtggcggcgacggcgaggaggaggaggaaggaggcagcggctcggtgggaagagtggaggcgggcgtaggcggcggccacgaacgcggggttcgcctttcggatcttggactcgtcgtcgtcgtcgccgacggaggtggcggaggatgcgccagcgtagggagaggaggaggaggaggcgccggcggcgcgggctgagagaccggtgtcgtgcatggaggcgggacgggagcagagagagatcggagtagtagaaagtggcggcggtggtagaccggtggtatttggagagagatcgagggaccgaccgttccacacgaagggagggggtggggggcgtgttagggaagatgtcaacatggggaggatcttgcttgcacgggccacgcaaatgttccagtagcttttttaacgcgtgaatgataaacatgatctctactattatagtattataaaaattgaagatgtttttgccgatagttttgatacgtcatccgtgtttgaatcgttttttaagttcattcgtttttgaaagtacagatccgtttttgagtcggtttttaatttggttcgttttcagaaatacagaatgagtcgtataaaaagaattttatcttagctaacttgcatgctaacttgagatgatcggaaccctaattacagctcatgattttataaaaggaatattcaagcgaattcctacagtaaatttcaccttagttaacccgcacaacaataatcttcacccgttgcaacgcaagggcatttttctagtaataagaaaaggagaaaatccaaaaagaaaaaaacaatggacaagcatcccaatgttaaaaaaaccattgatgaacccaacttcctataaatgctactatataatcatcttatttccaaaattttatcgttgttatgtttccattaattagtagccctccattaagtactatcaaaagaccattttaccctacgaattgttaaaagctcattaaattttttcttttttagtcaacttataaataataatttagtataaagaacaacctacaaattagtgtaagcttatggaaagagcaaaaattttaattgccttttagcaattcctatgggtaaaataattttttatagcacttaacggagggctgctaacgaaaatctaaatgaaatggtgcgtttgtatgatgacatttcttggattcgtatgtttatcgatggtgtttcatggatttctctaagaaaaaacatagagtagggatatgataagaataaacatgtaaaacattaggaagcctataaaggttcgcacgctggggcgtgccacgttggattttacttttgcagaaaagcccttcggtttgtgtgtaattcaatcgagtacccagtgaaaagttcctctgaggtgtcaattcacgaataggcccttacataagttagatattgcatgcgaaggagagaaaattcacgaattaggaccgcgctctaaaacgtggaagccgagggggtttctagcaaacgacgccctaacccacccaccataatcctagccgccgccgccgctcacactctctcctccctctcgtcttctcctctccctctccagctcccgccgccgccgcctcatgccgcctccgcctccccctccccctcgtgctagagggatgaagaacgtgttttattatcaattctgacgagttaaagtaattatttccatgcttttaacatatcaatgctcgtacttagtgtgatgtgtggtgcactaaggatgtcaataatctaagttggaaatttcaaaccagttgttttatttaccaataggccacactttacacactacttgctcattgagcagtagcttatatgttggtatgttagctgaggatctcatcgttaggctggtaaatatattctctagatttgcgtcgcttgaaatgtttttgtggacaaatgctggtatttttcttctgtgcaaaccttggggccaaaacgtatactccctggttctcattatatttattgatccctttccttgcatgtttgcaaaattagcggtctattaccttccgtgctgctgaaataatgttctcatggtttgttaaaaatggtgatagtgatagggaccatgatcgtgacagggagcaccgtgatagaagcaaaagaagataacaccgtgattatgaatattctcttgatcatgatctccccttggaccaagattctgaaaggtattgcttctaaatttctaacctaagcaattacttgcaactgcacaaaatatgggtgtttttttcctttattaaatctacttatttgattgactaatgttttcctgatgcatttatttatttttatcaattagtgaattttcccctatgcgtgggaattcatggtgatgcctaataattatgaaaattaggttgtatcctttctgataataagatttaaagttaatgatatgttcgatctatctgctgcatactacactctgttgtgttcctctcttatatcgagcatcttattattagttttagaacatcttaatataactgacaattaattgctatagcaatcatgctgacaaaatcaggttagtccataattatctctgagaatctgattaaagctgccagatgtttagcatatgaagaaattcaaattctaatgtccctggcattcattctcttttgatctttatattgttcatttttttaccttctgttttacaactggatagtgcagtgggtactatattggcattgctctcggtgtactggagcattgcaactagctgctaattatctgattgactcattaatgtgtgctcaatttttcagccactgtttcttagtagaagaattggaatgtatatgtttctgaaatgaactctcccaattaacaaatttagaggtgcatccccttttaagttggttcttttgtttccctatctattaggagggggagaaacctgaattaagagatgttagcgtgtaatttccccctgaaacgtatgttaatctaatttttgtctaaatttactaaatgaattaaacgcctggcctccattacctatcacttatttggaaaattctgcagtaccctagagtgaaatgcaagcattgtgttcatatggggtttgttggcatatttcaactaaatccaatttttaaatgctacagtgctacaagaggctagaaaacaacagttgcgctattgttggtgactgacatgaatccatcgccgctcaattttaacaaagttgcaaagaagtttctaagacaataggggcttttttttggcgctgcaggctcttgcatcacccattcatctgtcattacggtttttgatgcacactgcctaattagttgtttttattatacttggattatttttctgacagaacaaatcacttcagttcccctcctgccaatgaggagtgtatgcttatacagtgaaagtattatgaggtttcatcaaggtattgtaatttgtaaaaccaatacaaatgctatgctcaataattgttttgaaattgcaatttttgatgaatcttatgctcaaaagatgattaaaattatctccataatgctcaagagaatacagatggttgtttttgtacagaacttagattttattataagctgttgtctatcgacaatatccatcattttatcagtctatcgacaatagtaggacgagctcttcagtctaaataacagttatatgtttgctgatgcgcctcttataacttttgctgccatgacactagccccatgtctcttgctcttgatcttcctttatgagtcactccatctaatttgtgtttgcttcctgatatttttgtagatgcaacaacatgaagattgaaaaggctgctgcctgcaaggtgtttgaaatcactgcctctggaatttaaatgtgtgaaagtgattgaatagttctgaaaatttatccttgctttgctagaagattgaatgggcggctattggaggaagaagaagcatgctacaggggtaatgacaaaggtagcagggtccctcttttgtgctcatggcatgtcaatttatcctttctgttgatttcgtgtctagaccagaaattttttaattcctacttgaaatcatgctaaaatggtttggtatcatatccaagaccaagcttaaatcatcttgtatatggtttcatcctacatttgttgctatgaagagtcaacacaaatgttgatattttccaaaaatcaactgaagcgtcgactctaaaatcaagttctagaaaagagtaagaaggatgtgctccgtcaaataatagaactgtaaactatagaaactagaagtcttaaggacactacactaaccctaaagtcactcgtcatcataagcaaagtgcaaatattgtctgtctggagtctggactcatcatttaggtgctctttggcagggcagcagctgtatgtttcagcttttgagttgtccttagaatccatctcattgagtaagcgcacttcaattgaaatctataactttctcgcattctgggaagttcattttcttattgcctgcaatttttgtagcaactacagatacaaccattgctcacatcatgaaagaacaagatgatatcaagatcaaatcctccaagtgctggaatcagattcggccacctgctacactgctgacttcaaacggccgccgaatctgcatacgacctccgttttcggcccatgagtacttgatggaaagccctcggagtcctctttccaacggatccagcctcatcgccaaacttcgtctgggaccccggcccaagtggggcccatgtggggtgcgccccaaccaggtggatcatgaccctagggtccctttggtcatcctcccacctccttaaatagctagctaccccttcagggtttctcgggttttgttagattaaagtttagccattactacttgcttgcagcacgcgtgtcggctagaccgtccgtctgcttgttcttcggaaccccaacttatcatttgtattaaattcctatttgcaatatcagattgtttttatcttggtcttgcttggttcttcgatttgcttgcaggaatagtgttg

SEQ ID NO: 5253 - DNA, 28766 bp, Oryza sativa
ggctgctatggtggcggttcgggtggtgtggtggagtgacggttccagcggcggaatggaggagcggaggggatgccggggtacgacatgacacagcgaagccgtcggtggcggttgcgcggagcggtggtggcgggagcaacggtggcgaccggctagagggcgtcgacgggcggcggagctcgggcgcgcgttgcggcagtgtttcggaggcggagacgggaaaaggagtaggggccagggtgtggcatggcacggcgatgcaaatggtggtggcggcgtggcgcgacggcgtctggagcggcagtggcgtgcggctggaagcacggcggcgagcggcggagctcgggctcgcgcggggagagcgggagaaggcccgatgggctcaggaaagttggggaaacgagcgaggggagtgtggggaggagttttatgggcgcgggagggcgacagtgggctggggcgatgcggattcggggcggcaaccaccggcggtgtggggtggcgacgtgggcgcgtggcggggcaaaccggtgccgttttcttggtggaaaattggtgaaatggtggaagaagtggtgggggtgcagttccaccacttgggcgtgagcgggaagggctgggtggtgcggattttgcgacggagtgggcgacaatggcggccacgggcggttgctggcgaggtggctggaggaacggggaggagatgacaggtggggcctagggtccacctgtcggcgagggaaggagagaggaggccggggggcttatgtgtacttagcgaaggaaaggaaatggcgagtgaagcaaatcgggccgagcggcccaaagaggagaggggagggaggctgccgggctggagggcaaagaaggagggagagggattgggccgagggcggcccaaaaggaaggagagggaattttcttttttttctttttatttaattgtttaaatgaactttgtgactttaaaattatttcttgagctccgaaaattcgtggaaaaatccggagagtactttagggcacagagaatattgcaaaatatttctggccaatgatttttatgggaaaattttaagtctaccattatttcacttgattaaattgctttaacttttatttaatttatagaaaatgatttattaattgatttttaatcccgaacgaaatcgaggtgttacaaatctaccccccttacaggaatcaagtcctaagattcgggtatggttagaaagaaagctgggtgtaggcggtctgatcgatctggccgatctgcacactgcattgatcccttttgttttaaactgactgatggactgaccaaccagcataacttaactgaactgactggcatcgaccattctattcttttgctcaaaacaaccgaactgactgggattcgaccctggagttctattgcttcgcaaaacttaattgattagctctactcgatctgaccctgacctgaatcacgagggctcatggaacttcctgtccctgtactgaactgctagcattatcaccttttggtaacctgagagctcaccaagcagactagaaattggcagatctttcatgaaatcttgtatgtgacctgcatgaatgacagattctaactttactttgacctgctcctgactaccagaactattctaagaggctgcttgaccggtctttcgtctgaactgcaactgtacctgatgttacttctctgatgtgaattgttgtcctggcctcacgggtgtatcttagaattcaatcggatgacttgagatcggcatgactctattgacaccttgtagctggcttcttcgagtactacctaaattgttgtactgggttgaatctttaagggaaatggcgacgaggtgaaccaaaattcatctctgcgacctaccccccttacagagagtagtcatactttcgggtgaccgggaataattgaactattgtccttcaagaacaatcgacacttctcggatttacgaatggccctgacattgaaaacagaaaacttcatcgatcaatcaaaataaagcaatgacgatgcactttcatccaggtcaaggcttggaacttaaccctcagttgctgataggaaattccacataaagaaattctcatttagctcttgatcttactaactcttgactacttcccaatcagttctactgctggcatatttagcatgcttctggcctgacttcggtgtcatatgcttgaacagattgcatagtcgacattctttgaaacacatactgaccacttaacagatcaaactcaagagtccttctcatgacataacatcacacgtcgattattcttttgctgactcttcctgtattgatgaactgtaaaccctgcaactgctttcccaaaaatattgtaatctgcacggctgccagaaactgactttgatgctgtcgagagtttctgttctttgatcataacaacttcgctttcatatcttcggtaaagctgatctgtcgaaaagaggttctctgccacacaccctgctgactacacatttctgaacctgattcttggatatttcttgcccatgtatggaacaatttctgccaacttccgagaaacatcatgaggatttctagaattcgtagtggttccttcgaacatatggagaaccatccatgattcataatcgtaccactagggtgtaattgttgcttaccattctctaacagtttccaagggtagagagttcccaagattccttgtatgatgttacttctgaatttttttttcattactccctacacttgaatacccttgatactacctttagagagatttcatagtgtcgagcgctatggatccaaccattgtcacttccttggttaatcctttctttactcgctcgcaaacaggttttggagcacaacaaaagtgcgatgagttagaagggaaactcttggtttcttgtaacttgcagatacacatgttaacttgcttttgcatactcaaaggtgaaaagaagagaaacgcttgactcctactctattcaatattcccttttcaactatatcactggattggaacttctatgcacaaggaaggtatttgaacaccaaaggcctgtgcacaattgttgactcttgctgacagaactgctgatcagtagcacatttacccattgtgattctgacatggttgacttgtccttttgttggttactagctgaagctcccacaagaacaaaactttgactgatgacgttcctaagacaaacatcaatcctcttggtagctaaaaggaacgagaccttctcactatcggtgcaactcttctgttaatttcttgcgagacctctgaattggagcagtatgagatgcatggctgatgttgacaaccacattgaagtctgatgcttgagacattgattgcagtcgctgctgaagaattgagccgtctctccgtagctaaagtagatcactgatttcctggcttcgtctgctctgctggtgctgattctgtaatcttgaagtgattgctagagaaacaatagagaccttgtcagtgcacttaatgacaattcatcatgatggaaactttacacccaagtgacggttggtagtacttctctttctagggtctttggactggatctgaccacttcatacaggaactgatgtaacttgaggagacaaaggagttttaaccatgttgctgacttgatgagactgacgctttggcgctgaacaaccttttgagagatgataggtcttccaacaattggaaacaatggtggactatctttcttggtctcgagagtagaccattactgaggtggtgtcccggctcaaaacgattgagacacttctcacttgatggatctttgatgtgcactcttcccgctgtgcatgctcccaactgaaaccagagtagagaactcataaccttggtgacaatgttattactatcactgtgggttgccactgcagatggagctaggggaagaacggaactattgctactgctgttactgagtgccataagttgacgaacaggttgcaaagttgtcttttggtctctcattgccttagctagtaccaaactcaattgattatccttgagcacatggtgcattccctcacacaagaatcgtgcatcctttctctgccaaagactggactgcagtgtaccatagtttttgtaagcaagctaacctggacatttcttctctcctgggcacagtgccctattgtcggtcgttttgacaaataagtccaatgggtgattgaacactttgtaagaaactgcccttgtacaccataaccaccgtgggtagcacttgctgcttcagggatcgatggtggcttagctgtgctggtttcctcaggacacgactgtacaccggcaggggttgtaggtgcttccattggacaacaatggcgttgactctgactccgactccgggcttgcacctgagcttgtatctattgttggggacactgtcgttgcatctactgcattggactctgcggtggctgcatcaatctatgacacattgttggtaattcttacggtcacagataaaatccgcaagcgcacggatataccgatgtagcacttcgcctacggagtattccaatggtatcgaatccaaggaaacgtgtgtgatcagatcttcctccggttaatccaaggacaccaagcaaatgataggccaggatatacaggattttctagtgagaaacagtgtctagggaaagcttaactttaatcctaatgcaatacttcaggcactggcaatccgctgttcccagatgtcgctctactatgcacccggacaggaaggacttaagtgatcttgagggttgtcaccacctctacacctacctcaaacagagtgtgggatacgcagccattactatattgaatattatattgaattcagagtaataaacagaggagaagattaccgacaactccggaattcttccgacttcttctactctactctcttcctattctagtatacaatatagtacaatagagcctcttataattcagctcaagcttggaagtgtgtgtgtgtgaagtgagggagtgatgtccttttatagggcagttatgacggttgtgagaaggggaaatgtccgaattgtcccgcaaccattattgggagagcatctggagcgtccacgccaaaccctaggatcaacggtgatcggggcggtttggccgaacctgggctgggccctcctagcctagccttcggtcggtggactccctagactctcctctgtctatttctcggagttttgggttgatttactgatgttttgatgaagttcacaacccttccttgtatggatacataattctcactttagtctagatttcctcccaacatcagggtttatcatctgcatacaaatatacaccaacacttgtggaatatgtgagattaagcacctatcactatgttggatgttttattatctaaactttatgcagatgggatttttataaattttcgcaaacaagctcttttcctcatgttgacttcctctcttgtctctcaaggatgtatattttctttttggatcctcaatcaaggcaaagtgtgccaaaatctaccctattctaaggctgatatgtggagcttggtagggataaattgtgacatacttgcatcatatatatattgtaaagctaaaaatacggactcaagaagatcatcaatcatacttctagatcaagagtctttatttgtggtgaaaaaaaaatggaaaagtaaaatcttttgtggaataatggaaatgattctcccctttttcctatacttcctcctcccttttgttttcttggcatgaatatggaaggggcatggctatattttctttccaactttgctcaatgatttgggagcaagcatttattttcttcttcttttttttatttttttttcatagtcatgcctttcctccccttttttttcatttttctttttgccgagaacttttttaggagaagaaagcatagtctaatgtagaagtttattcgaatggaatttttgtggaaaaccaacttccagtttagaagcttagcttaattatatatgtggagaaatggaaatggaaatgaccccttgatcatgggagtacgaaagatatctcacacgagtcacctaaatttaacaaagctcaatataatgtcaagcagtcatatgcatgataaggttcatcaaagatatacttgcatatggccttggtaggtataaaatgaagtcaattaggaggattgtgctttttaaaatgattttattttgtgaaaaataatttcccaagagtcataacaagagttacaagagttcccttcatcttgaatcatctcgcataaagcaattacttagatgcataaggttccctaaacatggatggttgttcataagcacaagttcggctgagaataatgaatatacaagatcaatcacatgaagaatttcattagttggaaattttatctttcgcttatgcttgaaccaattgttttctgaattttcagctcaaatactataccatggtggagatatacagataaaagacgtgctctcctgcttacctgtgaaaactgggaggtattggggccaacactggttcggccgaactactctggtgcccaatacctctgcaattttttgcagagttcagtgccttccaggtgtttagacattcagtaattttcagattatgtgcacgtcagaagctgtgatatctcccccatacttattaaacatgaaacaaaacaaattttgacaaacattggggttaacaccaatgagctacattattcatagcaagtgcttatatgattggaaaaacaaaaaccaagcacctactactattttactcatgggaaaggaagcatctagttagcataatacttattttcctttcccatttctacgattgcgcgcttgattttagcgcacaaaccgtgactaagggtgtcgaaattatttctaatttcagcaagctttatccctagctccgcgttgcgatccctaatctctatgttctctttgtggattttcttcacttgtgcgcgagcatatggatcgagggctccggcgacttcacctcatcttcttgatattggccgggagccctcacaattggagggggcgtcaagtgatgcttaaccttcataggtggaggtctacgggattctgctgccccctccttctcctatgtcgttaaaggccggagtaaacccttgccatacccaccgccgggagttcgcactccctgaatgcagaatcgctcctccttcggagtggatggagtagcggtgggtgtgacatacttatggaacacctcattccctgccttggtgaacagggtgcccacatagcgctcggcgggaggcggcgcggccttcccgtcatcttgaaaaaggcaacgtgcctttaaaagaccgagctctcccgttgtcggccgacgcgcaggcgaatccccccgaaattttgtctttgtgacatggcgaggggagagggatcttgctactgaacggggagccgaacggggctgagaagggttcggccgaaccagggagctcgccgacgggctccagaatcgcaggggagcccgacactgttgcgaggggctgcgcccacagtgcattcaccccttccatggtgtattgctctacagggatcaattgattcgccggtgtcggctctccgtcaaggttgtgtgtggagttggaggaagagccaatgaatgggatcaaagatttgccagccattggtgaattagaggtgatggagaacggaattgagatgagaagaagaggaggtttgcaaaagtgggagagaggaagaagaacagggttctgggtctgatacgactgatctacctccgaatgcgcatcacaacatactatagacaagcgggggagactgaggttcaaaattggggctgatcgggcgcctgtcacaccctgaaaatcgctaagttataaatcgttgtgaaaaaaggaatttttagaaattatttaataattaaagtaattgtgtgaataaaatctatgaaatttttgaaagttaaattgatatagataaaattttattaaatactttgtgtgcccaagtattttcaggatttttcttggatttatttgagcattggaagtatttttaataaatgaaagatcatttcagtaattatttaaattaaaaagttgattaaaatttctcttctgtccactcctctcctgtctctcttccttagcccgcagcagcccactcttcctttttgtcttacttagataaagtccattttgggtccctcttgcaatcaggcctagtaaagaaaaggaagcccgaaaagaagtctatttgacagagccagttcatcccgataccgcgccaatctccaccgaatccgtcgcatcccgtgctctgtttccaaaattggttgcaaaaacggattcccctcgatctcctctaccttgtccctaagaaacccctttgaataccgttgtatatcgcgtgaattcgatgcggttttgagctccgtttttccggcgaaccctaactaatccgtcgccgattcttcccgtaaccgagccgatctctccctcttccggctataaatagcagtcccaagacctcctcttccgtttgctcctttttcccgaatttttccctaaccctagagccgccgccacgctcggctttgctctcctatgctggccgccgctccagccacgtcgcgccgcctcctcggtcgaccccgacctgcgccgtcgcctcccttggcttcgcaagggtgagagctacctcggccactggttgttttgcgccaaatcccaccagaaggttgccgtcgccgtgaaccagtgggttattgccgtggtttggtctccagccgtgtcgttcgtcgtcgtccatcgtcgctttcggacgccgttgcttccactggattcgcagctgtgaggagaagcccgtccacccctccgttgccgccgcttgtcgccggaaagccgtcgccatcgtcaaccaaggtcgccgccctttggagctcatcgccggccatctccctcgccgtctgtcgtcgcgtaagtggtggtaagggccgtgcttagaaatattagctcattaatgggataaattatgcttcactattacttatggttctattaaatggtagctcacgatgggcaatcgtgttatgataattaattgataattaaaatatgattaatggtgggttgtgagcacatggttttgaaggttgtgctcataacaattaaggaccggttcgcgagctactgttgtgaaacattaaccgtgccaaccacaagccagcgtgggcaacggctttaccttttgtatagtatggttcattacggggtgccagactgagaagtggtggagataagcccacgggggtcgctggggagtccatgcctctggtttttgagggggtgactacgatccaggaaagatgcactgctttgagttgagctatgcgagaggtcttgtcacaactacacaaatggtgacatgttcagcatgggcacatgatgatatggtgacatattgtggagttgtgtcttgtgggtacagtggtacacctctggcttgagtaaaactattcgaatagccgtgcccgcggtcatgggcgggtctaacaatgtctttcgtgattagtctcatacttcttaccataataaatgatgctataactggtaataatttgattagctcctggtttggaatggtgcattcctggtttggagatagatctttacagccgggtatggttgttcaggttggttgggcctgtgcagcatgggtgtgctgttcagtgttgattaatattgatgattaattactctattcttttacaattcttaaatgtttgctaaatgctgcttttgcaaatgagccatatattttgccattgtttggtatccttgtgcacctgcatatttgctgtgtggcttgtcgagtattccatgtactcaccttgcaataatcaatcaaacctcggttgaagacaagttgcgaaggagaagacgtttggcttataccctagttgagctgcctgtgggagtagagtcggagcttcgctagaccgtaattccgctgttgttttctcttttcttttgtaagtatgtaacgttattattatgatgaatctgtatattaaattatcggtttgtgtacctcggctgattcctggacgaggatttcatgcacaaattagttcagaaattactagtgaatttatgggcgtgacaagttggtatcagagccatctcgactgtaggataagtcaaatggtcaaactttaaggaggaattttccgaaaacatgatttgtgaaaattttcctttcttccttctccagaattctctgtaaatcattttatcatcctctcccctcccgctttcaacttgagtagttctgaaactagttgtttaaacttgaagacatcgatgtggtcttcttatggagattgagtcaagtggatcgaggaaaatgaagttgatggtcaatctgaagtgcccaaatgtcaagatgggatcgtgcattagaacctaaaccaccaaagtgactctaaagaatagttagtagggtagaacgtttgttgcttgcttctttgtaggtattgttgcatttcccatcattggtgttgttcagcgatgagcatgtaacgatactaggttgcttgtttaatcaacttaaacaatataatggtctacatacaccagattagtattaacctggttaaggtctgtctttagtgtaacccctctctttctatcttctctaatctgcaacaaatggtgaacattcgcgccagtggaagtgggaacaataacaatgaagggaacccaactcttactcaagttcttgctcaacagactcagttaatgaacatgatgatgcagcagatgcataaccagctcaaccaagggtacaacaatgctccactaccccggagcaagctagctgatttccttcgtgtgaggccacctaccttttctaagaagcaggtgattggctgcacactattgagaagaagttgaaattgctccagtgcactgatcaggagaaagttgtattcgcttcacatcagttgcaaggatctgcttcagaatggtgggatcactttcggatgaacagagcggaaggacaaccaatcacttgggaagagtttaccgaaggattcaagaagacacacatacctgcaggagtggttgctttgaagaagcatgagttcagggcattgaagcaaaaggatcgtaccgtgatagagtatcttcatgagttcaaccgtctagcacgttatgctctagaagatgtgcgtactgacgagaaaaggcaggagatgttcttggaaggcctgaaggatgaactgtcagttacgttgatctctcatgactatgctgattttcagcagctagttgacaaagcaattcgattggaagataagaagactaggatggacaaccgtaagagaagaatgactgttttccaggaggcacagggtagtagccagaggcagcgtatcaagccactccaagttggtgaatcaggtctgacatctcaagaacaatcgcaacagatgaacatcggtggtgagatcaattcagagactaatgcaagcaatgaagttaatatcgagcaagctactcagtcggagccagttcagcaggatcagtctcaagaaggtaatagtagtgcaagggagcagcgggtatgttttaattgttatgagccaggtcacttcgcaagaaagtgtccgaagccaaagcatcagtagccgcaaggtcaagtcaacaacattgtcgtcacaggagccaatgcagtgccagttgcgtcttcaagtgttacagttcagccaccagtctcaaatcagcagtagttttctttaaagccttagaataattatcggagttatggaataggatagactgtagtttagccgttccgaatcacgggacgagattctttgtaaggggggtagatttgttacagcctaaatttccatttcaggatttataaattgttaatagaaattatattaaatgttcattaatttacaagtgaagttaaatgtgggaaataaaatttcctaagtataaagcatggctggatttaatttttattaaattctctatgattaattatactctctggaattttctcgaattttccagtgctcaattcctaaattctaataatacaaaaaatatttcagtaattcgttaatcattaaattaatcaattaatgatctaattataattatgttaaatgattttcttgtttaaaaatccttaaattataaattgttgtttaaaaggaattattagaaatgatcttaaaagcctaaaagagaatttctaattttaattctctaaatatcaaaataaaagtgggctagataaaattttattaaatacttctctcatttctatagttcctagatttttctgggatttatttgagcaaaggaagtatttttaataaacggaatatcatttcatgaataatttaaatagaaaaaggttttaaatctctctattggctttgggccgaaagtcggtccaagtctctctctccccggcctgcgtgtgctcggcccagccggccaagtccgccacgccctcccttctctctctcagccgctgataggtggggcccacctgtcagtcgtcttcaacctccggccgctcctagccgcgttgcaagccgccgcctccttccaaaatccggccgccaccttccttccccggccaaatcaattgaggggaaataatctcctcgatctcctcttccttttctcttttggaaacttcggctaatttcgtttggaaaccgacggatttgagctcgattcggatcgatttttcttcctccaaccatagctttccttctcggcgccgatcgccgtgggcctccatcgacacacctagacccctatagaaggacctccgggacctcctctctgcatcaccatctccaccttcgactgccgccttctctagcgtcgcctccgcgtggttctttgtatcgccgccgccggcgggtctccagtcggtcccgctgtcgcttcggtcatcgccgtcggtcgccgtctccttcatcagcatcgcgatgtcgtcgccgtcctcgtcccgtcctccgtttccgccgcagatcatcggagcgccgccggcaccgtcgactcgaagctctccaccatcatcgtcgatccagccacaccgcgccgccgtctcagccgccgccttcggtcgctgtcgccaccgtcgagatcgcaaggaggagccgcaccttgtccaccccttcgttgccgccgtttcccgccggagcactgccgtcaccactgactcgaagaccgccgccgtctcagccgccgcctttgtttgccgtcgcccaagtgctcggtgagttcactgtgccgatccctacctgttggtgccctccgtttgtgctgacgagcatagtgtgccgagccgctgtcggcgatgacatcatcgctgatgtcagcgctttgtcagccgtagacccgtggtagaccggatcgatctcggccgtccgattcggtcaagtttaggtcaattagatcttggccgttggttccgtggaccgcttctgtgaacccggtttaccgtggaccgtccttgatgacgcaataaatctcttttccttttcaaaaataattctttattgcgccataattcaattaaaatccatataaatgctttaatgcggtttattctttagaaattcataactaatacattgtaactcggtttaatgcggttcaagttgcaaaagttgtataaaataaagatctatatattaaaattatcaataaattgtgttaaatttattcaatcctttttaaataggctttaattatatttaatcttgtaaaattggtaattaattcttatgaagtcagaatgaggccgttcaagtctcataattgatcaaaaattttgatctacatgtttgtttactttatatgtattgtttatttggtttttattagtcttttttctcgttttgcgtgttagcttgtcgtttccgtcgttttgaaggatcgtgagtgcgtcggaagtattcaagaagattaattgaagaccctttattgcaaggcaagtcacacagatcccaaacacaattcctttgagcatgttgatcctatatttaaattctctatttatttcaactgtacatttattttcgaatgtcaccggctggtgtgaaactattcctttgttatggccactttgcattgattactctatcctttgataccttggattacaatttgactagttgtacttatataatggttcaactagatgtattagatgtaattgcttagccatgcttagaaacattagcacacaattgggataactaatgtttcactattacttaatgatggatatttaattgtatctcacgatggttaatagtgattggttaattaattaatttgccaactaaaacttgataatggtgggatgtgagcacatggttttgatagtagtgctcatgacaattaaggaccggttcacgagtttcggttgtaaaacattagccgtgccaaccacaagccagaatgcgcaacggttggacactttgtatagcaaggctcattgtggtgtgccagactgagaagtggcggagataagcccacgggtgtcgctggggagtccatgcctctggtttttgagggggtgactacgatcctggaaaggtgcgctgctttcagttgagctatgcgaggggtcttttcacaactacacaaatggtgacatgttcagcatgggcacatgatgatatggtgacatattgtggagttgtgtcctgtgggtacagtggtacacctctggccagagtaaaactattcgaatagccgtgcccgcggtcatgggcgggtctaataatgtctttcgtgattagtctcatacttctcaccataataaatgatgctataactggtaataatttgattagctcctggtttggaatggtgcattcctggtttggagatagatctgtacagccgggtatggttgttcaggttggttgggcctgtgcagcatgggtgtgctgttcagtgttgattaatattgatgattaattactctattgttttacaattcttaaatgtttgctaaatgctgcttttgcaaatgagccatatattatgccattgtttggtatccttgtacacttgcatatttgttgtgcggcttgcggagtattccatgtactcaccttgcaataatcaatcaaacctcggttgaagacaagttgcgaaggagaagacgtttggcttataccctagttgagctgcctgtgggagtggagccggagcttcgctagaccgtaattccgctgttgttttctcttttcttttgtaagtatgtaacattattattatgatgaatctgtatattaaattgtcagtttgtgtacctcggctgattcctggacgaggatttcatgcacaaattagttcggaaattactagtgaatttctgggcacgaagattctattgtctacaacgaacaagatcgcataagttaaaaatgcatcggcttgtagttgataaaattaacagaaggtgagaattttaccagtgggacatcgtcagggaaaaggtttgtcaaatacatggacggtgattgatggaacaggtgttttttccattctatccaccatcggtcaaaggccatgctcctgaatgtccttagtttgatgttgtcaatattgccaagaggtggtcctggtagattcagcagccaatccatcatatggaatgatgaaatctctcctctactttgaatcctgtcggcaaagaataggctaattggcagttgacccatgccgaattgccttgcagcgcttgttggatgatagaattcgtaggtcatctggatattcttatcttgatagatgccaacagggatgatacaggggctgatagctgttgagaatacttctctggatttatcatatttttcagagttgatttcatcgaatcgaaaatcacatgttagttcaaagctagcagatccttcatatgcaaaccagatcctatcattcttggggaacccatcatagaaattgttgaaccactccttgaaaggttcggtcgatagcttggacacggcgctaaccgatgctgcttctccgaaggacatacatcatcagcatgtggtgcttgtttctccatcgtccctgacgatcggctcaaatcttgggaattctacattggctagtgctggctgattggcaacttttctggtatgaagattcagccaaatttggagtaaccacgatggaccccctgtgccgattgtttttccagaggctatcttgtcaattgcagtattgagggtctgatacaagtagcccagcagatacttgccaaggggaaaatgcttcttttctaccagattttcatctacccgttaccagtttgcggtcggaccataggttggaccacagaataagaacttttccagccacatcataagaaaagctgtgttcatggcaaccggcccagtcacatcactcttggggtaaccggcctagttcccatcttcttggcaacataacctgaccaaccacctatgcttctggttttgaactcatgggtaagttaggtgttcaggctggacaagttagctgatgaagtgatatctagaccagtgatcatgatgatatctaatagtattggggtcatcggtccttgagagaaaaggaacgtgttcatggctgtggaccaaaaataggtggatgctatcatcatgggttcattccttgccatacttgctgcagttaaggccaaagcttgcgatatgtcgatttcgtcccagtgggctaatttgctagccaacatcctcttgtaccaggcaagccagctgacttcggttgatggccaggatttgaaggtgcctttccaagggctaagatctggattggcaaatctaaaggggattcggttggtttctccattgatgaactctatggggtctaagttgccgattgggccaaggaaaaactggaattcatcggctacgctaggaattgcaacctggtgggtgagatgctacagaggaggaaaatcgaggattgagcgaaagaagaaccaaatctatgaggaaaagaagggatttagctgatgggtacttacttcgacgtattcggtggccgatgagctcggtggactagcgaaggttgacattgtcgttggcagagattggaatcgtcggaatcgtctgcggatcgccagaaagcttgaagggtgtcgccggagaactcaaaggagaatattggggaaagtttttggctagagcggttaaaacggaagtgacgccgtgaaacgagaagagcggtggttactatttaaaagggagcgctgtaacggccaaaacggaatcggtttttgaaaccctagatcggctcggaaaagaaatttgagaaaatccgccacattacaaataattacaaatatagcggacttggggggcatgtgttgacgaccaaatttggtaagatatgaaccaggttcgacattggaatcgaggcggattcggtaaagagatagattcgaagaacagagtatgcatcggctgcaaaggcatcggctggagtctgcatcggctaagatggatcggacagaggacatccgatacagctgatagaggtgatgtagccgattctgatgacgatggtttcaaggatttttctagaaacgatcaaagtgcttcacgaggattgccacgatagagataaagctcttggataggaaattgtatctattaattaggatatttcatgtaatttccttagagatatgtttgggcaaaagtctgccgcaaagacttatggtattttagagtttgttagagataagtgtcgtgtccggcagggacatattttgtaatctcgggtataaatagaacccgaacccatgtaatcaattatcagacgatcaatacactttcggtgcatcgccaccctttttacttttgttctatttcgacgagttcttactttcgggttgagcttcatcgattcgatcttcaactagaggtaaacttgtcatgacggcttgcgttatcaggattagtgcttccatctttatgacactctaatcctgttcatgtaattcatcgagttatcataaatataatctttgtgagcgtgcgggccgacgaggcggagccggaggtggctggcgatgggtagaggcggcggcgctcctcgaggaggcgaagcggatggcgctccggcggccttccgcgagcgggaactcgcggacagcggccggaagaacctggagaagaagacagggagtttagggagcaaagaacaggcacggcgccgagggaaatgttagccggaagcggcaaggatcggcgaagctcaccttggacggagggaagcggtctctcacgatgattcgcgaggagggagggctggacgggctacgcacgatgactgcggtgccgaggaaggcgacgacacagcgcgaggtggtcgggaacggcgtcgagaggcgactagaggtggctgctatggtggcggttcgggtggtgtggtggagtgacggttccagcggcggaatggaggagcggaggggatgccggggtacgacatgacacagcgaagccgtcggtggcggttgcgcggagcggtggtggcgggagcaacggtggcgaccggctagagggcgtcgacgggcggcggagctcgggcgcgcgttgcggcagtgtttcggaggcggagacgggaaaaggagtaggggccagggtgtggcatggcacggcgatgcaaatggtggtggcggcgtggcgcgacggcgtctggagcggcagtggcgtgcggctggaagcacggcggcgagcggcggagctcgggctcgcgcggggagagcgggagaaggcccgatgggctcaggaaagttggggaaacgagcgaggggagtgtggggaggagttttatgggcgcgggagggcgacagtgggctggggcgatgcggattcggggcggcaaccaccggcggtgtggggtggcgacgtgggcgcgtggcggggcaaaccggtgccgttttcttggtggaaaattggtgaaatggtggaggaggtggtgggggtgcagttccaccacttgggcgtgagcgggaggggcggggtggtgcggattttgcgacggagtgggcgacaatggcggccacgggcggttgctggcgaggtggctggaggaagggggaggagctgacaggcggggcctcgggtccacctgtaggcgagggaaggagagaggaggtcggggggcttatgtggacttagggagagagggggagcgagcgggccgagcggcccaaagaggagaggggtgggaggcggccgggctggaggggaaagaaggagggagagggattgggccgagggcggcccaaaaggatggagagggaattttatttgttttttctttttatgtaattggttaaatgaactttgtgactttaaaatcatttcatgagctctgaaaattcgcggaaaaatccggagagtactttagggcacagagaatattgcaaaatatttccggccaatgatttttaagggaaaattttaattctcccattattccacttcattaaattgctttaacttttatttaatttatagaaaatgatttattaattgatttttaatcccgaacgaaaatcggggcgttacacctggccattcagaccgggatcagaccgccaggcccgctgccggctgtgcacagcccttgcacaagccggcaacccccacacaataaaatccaacaaaaaaaatttttttggagcaattttgaaatgtatgagttgaaatatttcttatcatccataataattgaaaattatgaagacttgcaactaaactcacttaagtgctaggaggtgacctattatggtctatagggtttttttggctaaactgattttcaaataacttttaaatgatttggtttttgaaatagatttgaataccaaaaacatttgaaaccttctcctctaccaactttgtttaacacttttctcaaattcctcctcaaactcattttgaagataaatcccattttggccaaaaataaaaatctagtttcttcaaaagaggaccaaaagggcattttcattgaaacttcatttttcttgcaatgtgaggcttggaaaacatatggggaaccttttgaaatatttttcaagagatagttttcaaattactttgattttgcaaaagttttgacttatgttgacttctagtttatttgctcacacacaaagagagttagagcacatgtaagagtgcaaaactcccccttaatgtgacatgctccattttcgcaaataagagccaaatgacaataaatccaaagcataagcacaaataagagcaaataggcaaaatgaacaagaagcaaccatcgtgcacaatctcaagccacattagagaaatcaatcacatttaactcattcctcaatttgcaaaagtgggtttcatcaagaggcttggtaaagatgtcagctagttgatcctcggttcttatgtggctaatgactatgtcactcttggcaacatgatctcttaggaagtgatggcgaatgtcaatatgcttggttctagaatattggaccggattgttggctatctttatggcactatcattgtcacataggagtggggttttggtgaaggatataccatagtccaacaaggtttgtttcatccaaagcaattgggcacaacaactacccatcgaaacatattccacatcggcagtagagagggctacggagttttgtttcttggatgaccatgacacaatggatctaccaagtatttggcaactaccggatgtgctctttctatccactttgcaaccggcataatccgaatcggaatagccaactagcttaaacttagtacctttttgctaccacaagccaatagttgaggaatgctttaaatatgttagaatccttttcatggccactaagtgacactcgttaggagcggcttgaaaccgtgcacacatgtaaacactaaacatgatatccggcctagatgcggtaaggtaaagcaagctaccaatcatagaacgataaagctttaaatctaccggtttacccccctcctcctcatcaaggtcgagatgcccgttggttgccataggtgtcttgatgggcttcgcatcctccaagccaaacctcttgagtagatccttgatgtacttggtttggctcatgaacgtcccgtccttgagttgtttgatttgaagttcaagaaagaagctcaactctccaatcatggacatctcaaattccctagacatcatatcaccagactccttgcaaaatacctcattagtagaaccgaatatgatatcatcaacataaatttggcaaccaaagaaatcatcaccaatgatttttgtgaaaagggtggtgtcaacttttccaattttgaaattctttgacaaaagaaaatctctcaatctttcataacaagctctaggagcttgttttaaaccataaagagcttttgagattttataaacatggttaggatttttagggtcttcaaaaccgggtgattgttcaacaaagacaagttcggcaatttcaccatttagaaaagcacttttcacatctatttgaaaaagttttatatcaaaatatgatgcaaatgcaagaaggatacgaatgggttcaagtcttgccatgggggcaaaagtttcaccgaaatccaagccttcaacttgtgtgaagcctggcgccaccaatcttgccttgtttctcaccaccaacccgttctctcttgcttgttcctaaagacccactttgtccctatgacattgtggtctctaggtctttcaaccaaagtccataccttgtttcttgcaaagttgttgagcttttcatgcatagcatttacccaatccggatcaccaagagcttcatctacatgttttggcttaagacaagaaacaaacaagtaatgttcacaaatcgaagcgacacgagatcgagtttggacacccttactaatgtcacccaaaacctcgtaaattgggtgatccttggaaagagcggtgtgtatccttgttagcataggtggatcttgtgccttctcctcctccacttcaacttgagcttttcttggcatagcggaagtagataactcatcttgagtggaggtagatggcttgttttccacttcaataggcttgacatctccaatagacatgttcttcatagctcttatcaagccttcatcacctacatcatccaaattcccgtgcccctcttaggagccaatagtctcatcaaattgaacatcggcggtttcttacacaataactttgttcttgttgtagaccaggtatgccttgctattggaggcatatcctagaagaaacccttttcatcacaccgactttcaaatttggttagtctaacaccctttcggtgtgatgaaaagggtttggccccttgatgctggtgggggagtactcccacccaccaaaactagccgttgggggcgaaatcccccaactctatgtactgccggtctgaccggatgtgtgtggccggtcagaccatgctactctacaacggctagttttctagccgttgtaggctgtcattgggccccatcggcttggccggacagactggagttgggtggccggtcagactggcctcggctcggtcagaccgcccccagctcggtctgactgaatgcggctctagatcgccacgccgagagcaccacagggagaggtccccttggctggtctgaccggcattcacccgtcggtcaaatcggccgacctacgccggtcagaccaccactaggcggccggtcagaccggccttggtcacacagcaagcacaacaggaaaatgagacaaagccaaatctaaatgcataataatctaatgtggcaatttaaatcatctctttgctaggtcattacccctcttaatagtacagtaaagctataaataaactagcacaaattgattgaccaacacctcgatcgatttagaactcaactactagtttaccgtcatctatactttgctttgcgccatcaatttttagtccatcgataattatccatgcgcacacatgatgtgaacctaactcaaaacacataactcgatagaacggttagtccacaattagcgcttgtcattaattaccaaaactaacaacgggggcctagatgcttcaaagatcatgcacgatactaaaaggctagagaacaatggacgtggtgataaagaatctatatagtatactgttggcggatgttaaatgctgattctataccgccaacatctgcataaagtttagataataaaacatccaacatagtgataggtgcttaatctcacatattccacaagtgttggtgtgtacagttgtatgcagaagataaaccctgaagttgggaggcaaatcagactaaagtgaggaaaattatgtatccatacaaggaggggttgttaacttcatccaaacatcagtaaatcaacccaaaaactccgagaaatggatagaggaaggtccatggagtccaccgaccgaaggctaggccaggagggcccagcccaggttcggccgaacccccttgatcctggggtttggcgtggacgctctagatgttctcttgcagttaagggagttcttttgatgtgaactttgtttagcaagcatggtggaataaactcattcatagcacaacaataataatatcataaagaatatcacagagttccacaaatagcacataaatcatgatgcaatcgactgcataagtacgcagcccaaatagagttcatccaaaagctacatcgagctaatcatcaaactactcgtcaatctaggtggggggtgtgtctcgcgctatccaaaaaccatatgaagcgagagcgaagtcgcagtagacctccattctagtcgtccaaccatccgcaggatccttgcgcgggaagagggtatcgcatgctcatgcaaatctgagtccccacggctcagaggtggtggcctccggatctggcttgggcttcttgcccggggtcgtgtactcttgcgggcagtgctgagggtgcgagggcgtccaactcacagttgcggggcagttcggacatttccccttctcacaaccgtcataactgccctataaaaggacctcacttcattcactctcacacacacttccaagattgagctgaattataagaggctctattgtactatattgtatactagaataggaagagagtatagtagaagaagtcggaagaattccggagttatcggtaatcttctcctctgtttattactctgaattcaatataatattatcttgtgagaattatctcttggttagttcctaaatagcatacgggattattgttcactataatcaactaaaatatagtgattgctttggttagttataaacactaaagtagattctaactgcttagacgtggtgtttaggtaattattatccagtaattgctgcgtatcccacagtacgtttgaagtaggtgtagaggtggtgacagccctcgagatcacttaaatcctcccaatccgggtacgtagtagaacgacatctgggaacagcgggttgccagtgcctgaaatattgtgttaggattaaagttaagctttccctagacactgtttctcactagtaaatcctctctatcttggcctatcatttgcttggtgtccttggataaaccggaggaagatctgaccacacacgttccctaggattcgatacccttggaatacttcgtaggggaagtgctacatcggtatatccgtgcgcttgtggattttatctgtaaccgtattaaataccaacatatacaagagggattgtgtacgtatggaaagaggagtcaaatttaggatccgaattcgggaagattaatagagataaggaaaggaataagttggatacttgcaagagagtgtttcctacatggttaggagttctaagttgtgttagattcgtgggctttgcacagcctacctcatgtataaatagagggggagggtgtggcctcctggtatcggttttagagagacttgagttgagagaaaagttagggtttcgagtttagttcgagattttgtgagggctgctgttgatgcactttgtaaatactagttgatgcaacaaagttaaaagtttcaatgtacatctttgagtttattatctaccggtgttttctaggtcccgacggtctagctgcagtgtgcgcgcggtttgacaggtgggagtgtagcagtctgaccgcaggtgtttgggcggtctgaccggcaaggtttcggtggtttgaccggcggcaggtgggtgttttgaccggtggcgacgagcttcgtcatctactccattcgaggtaaatcttttattccgcaaaagattttaggtttttggtttatcctaccattcaacccccccccccaaatctggtaggttttttttggtcttattcgatcctaaacttacgatgtacaatttttttatttattggcttattgctttccttcacgtatacctttcactgtccatttgttatactccttcaattaaaaatataacaacatagcgcattataggtcgtattattaagataggtcattcaatactagattattatattatatcaaacaaataactaaaaattaaggagcaattgcattcttaaccttactttcaattgtaattacaattttacttttttttagggttcatgattttgccttttttttcaaatcgaggctacaatttgccgagaaaacggacgttatgccactccctaaactgggttcggatgaaatgctactcaatacaatgcaccggataaaatgccactcaatatattgcctaccgaatgaaataccactttggagatttttgtacccaaaatgtaactgtggagagagagagagagagggaggagagcatcgggagagccggtcgggcggcggcggaggcggccggcggtgacgacgggaggaggaggacggggcagtgacgacggagggaggaggataggcctcgccgggcggcggaaggcggtgacgggggggaagggagggaagatagggcggcgggcgagtcgcagtgaggacgatggggcggaggaaggaggaggcgacgacgtgtggaaggaggacggggcggtgagaacgcctgggtgccaccgtcgccgctcgctcgctcgctcctcaccgccccgtctgtcacgaccggaattgacccaacgggcgttccttacgtgcgtgtattattccttgtcccaggaggcaaggtacaccaaaagttgatacatttcagagtttatcaagcggaagcgtaaatagttaatttattacatgggcggcgaaggcccagcacacacaaagacaaacgagaaacagcggaagactagggcgacgaccgcaggcgcttgacggcaggcacgagctagacaccaaagccttcatcttccaggggctcctcttctgggtttgggaaaaattgagcaagactgagtacaaccaccgtactcaacaagacacacccacaagtgcaggataaatgcaagggagtacaagggggttgtaatataaagggttaggttttgcagtaaacagcattaaaagacacttagttgctcaaagctattttgtaaacacgattccagagctatacaatattattaatcaaggccgtgaacccacacgaacctgccttaacccaaggcctacgatgattcagaccgaactggcaacccgaccctgggtcccagctcgtcccaagccaacccaggccaaccattccacattttagttgttaagcaggttttaagaattaaaacactaacttgggtacattgctcggcttgcccataaccgagggcgcggctattcgaatagattatactctgatcagaggtgtacatctttacccacaagacacatcttcctcacgtgtaaccacgtgccgcataccaccacggtatacggacggaagacgtgacatagtttccaacccatcctagccatagacaagagtaccgacccaaccccacctacggccggaacccccgggacaggtaggcaggactgagcccctagcagcaggacaccggccctgtgccatgacatcttggctaccaggccgtagctcgtgtagccttcatttgtcctagagatgtccatcgacccccgacttcgtccatctccatccgtgtacttttgtttataaccagactgagccacaaactaaaccttacccactagacatgtggaagtacggtagcgctttgcaacagaggcccgaagaccggtccttatatggccgaggtgctactatcaaaaccatgcaccccgagcccagcctaaaaccattttgagggttttgaatagagggggaggtgtgaatccaattccacaatgatccaacaattccatagtgtccaggtgatgagaatattcccaaagtgtagagttgtaaaaccacctaatgttgcctaattaaccagcgaagcatctacctaaattcatactagtggtaccatgagtagagtgtccactagttggggttttgtttattctagggtgaacaaggaaataataacaataacaataataaggtcataacaaaggtaaataggcatggctagataaaacagtgataacgcgggaatttaaataaagcgataatgcaataatttaaatcaaaataattttataaactgggattcaatatgttcaaggatgatgtgacttgccttgctcgctttcccaaccgtcggcttcaacttccacgaagagcggatctttcgaagctgcagcgtctacacgatcaatggaaaagaaaaggcttttactctaataaactccatataacaagtaggaacaaagcacaaaaatgggttcttgacttcttaaggaaaaattagagacttgaacggtccaattccgagttcaaatggccaagttatgaccatttgaagtttatatgctctttaaatgaatatttgcgaatttcttcatttaaattttaattttaaaagggtttattgcgtcagccgaggggagggggcacgcggaccgggtccacgggagtggggcccacgcggcagcctcacggtccacggtggaccgggtgcacccgggctcacaccggccggcgccgtgggccccacgcgtcagccgcacccgagggcgcgagcggctgacggccgggccccacgcggcagcagctcggtgcgcccgaaggcggccacggcggcacggccagcgggaggcggcgcgtccgcgcccctatggtcgccggcggcggccataggcatggcggagcggcggccgagagaagggagggaaagggggaaatgaggcggcggtccacggctcaccctaggtcgacggcgacgacgaaaaggcggccggagcggaggaaggcggcggcgcggttcgggtcgacggggacggcggcgctccggcggtcgacgagcgaaacggaggggtggacgaggtcggcgaggatgcggcgaagccgaccgaggcggcgccgaggtgggaggtggtcaagggcgacgacgacggcggcccggagctcggcggcgacggcggagagcgagagcgacggggggatcctctactactagagcgg

SEQ ID NO: 5254 - DNA, 30888 bp, Oryza sativa
gcttgcatgcatcaactttccaaatgaatatttgtcacgtcccgataaatttatcccgaaataaaattcattctctaaaacgaaaaatagaattaattaaaattcgaatgtggcccggagaatttttgttaaattctccttggtctaaaatgagcccttaaattttacttgaattttcagagcaccagaaataattattaagcaacaaaaacaattatcagagtttattaaaaagaaaaactaaaaataaaccctctcctccctttgggccaagcgtccctctctctccctcggcccgcggccgaagtccttctcaactccctctattttttcttctctctctctctcttgggccgccctccttccccttggcccagctcccttcccctccccctccctcccggaccactccctcctcctccctctctcccccgggctgcctctccctcctctcctcctgggccagccgcccggcccaatccgcgccccccctgctcgagccgcgcccctcacgcgcgttgcacgcgagctgacgtcgcgcccgcgtggggcccacgcggcggtcgtcgtcttcttcctccagccgcccggcctttcctttttttcccgaaaacttagctcctttcctccctcaaatccgtgcgattaaatcatgggattccaaaattgattatagcgaattaatcccctttccctcctctctctttcccccacaattcccccttgattcatgcttttaatcacccggaacgcccgcgccaatcccggccgctttccatggccaccggccgacttttctgccgccgttctcacctctcccgtgcccggctccctccctcggcgtcgcagcagccgcccctaccgcctcgcccgcgcgccggtcggccgcgccgtctcctccctcggcgtcgcagcagcctcccctccaccggcgtcgccttcgtttcgcgcggaaacccccggaggtgcgtccctgccggcaacagtggtgttgccgccactgctccgcctccagccgcctttgccgcctcgcctttgcaccggccgacgtcgccaccacctccctcggctccgcttcgccgtcctcatctccggcatcacctcctcctcgcctgaagctcgccggagtggcctcctcgtcggtgtccagtacctccccgtctccggccggctcctgttcgtcgccagtacgccgatcgacgtcgctgtctcctctatcgacgtcgcaacgtcgtcctctcctccggctgctcctctgtttcgccggaacgccgtcgcccgtgccggcctctccatcctcctcgtcgccgacgtcccttcggtcggccgctcctcctcgccggctcatcaccccgctgcaccaccatcgtcggcatcgcagcggcgtgttccacgccgtcctcgtctccgtgcagctactgtcggctgccctcgtcgcctcatcgccggtcccggtcgtcgtcctcatcgtcgtggcattcgtccctccgtcaagccgatcgcgttcgtcgcccgcgtttcgtctagtgtgctgctgcagccccgtcatcgtcttcgtccttggctccgcgtcgtcaagccttgtgtcggccgtgtctcgccttcgtccaaggatcgccgccgaagtcgttccctcgccgttcgcctccgtcgtccctgagtcgtctccgccgcgcccgttcttcgtcgtcgtacccacgcctcgtcgtgtggtggtaaggatctctccttcactgcttccgtcctcgtcctttcggtgtcgccccgtgcccgttgtgcggctgtctaccccggtacccgtgtaccggtgtcggtagtcgttcgtgtgtgcgtgtggtgaccgtgtttgtgtgcccgctcggtagccgcgtggtttccacgtgtgcagcccgcatggtgtctagtggagtccgtttgtcggccacccgtctcggttgacacacggggtccgcttccgtcgacccgtggaccgtctctgtgtacccggtctgccgtggtcccttaggttgacatgtgcggtccgcatgtcaacagcgcagccttcctgtcttttccaggctagcgcttacacatgttttatagttgcaaagcctaattacaataatccgtaaatctccatataacaacattaaacttcggatgaccatgtcttggtcatacgagctccgaatcgacctgttcaagtctcctaatgtttgttataacctaaagaaccctatgctttctttttatgtattgttattgtttctttataggcttgtagctttgcttgtgtgcttcgcatagcttctgtcgttccggaggttcccgaagcgtggttcgtggtcgtcgccaaaggttcggaaggctgttctctctgagcaaggcaagtcacatcatccttgagcatattgaatcccagtttataaaattattttgttttaaattaatgcattaccgttttatttaaattcccgcgttatcactgttttatttagccatgcctatttaccttggttatgattttattattattgctattgttattattaccttgttcaccctaggataaacaaaaccccaactagtgtgtactctattcatggttccactagtatgaatttaggtagatgcttcgctgattaattaggcaacattaggtggttttataactttagactttgggaattctcatatcatttggacagtatggaatggttggcttatgttggaattggacacacctccccctcttttcaaaacccccaaaacggttttaggctgggctcgaggtgcgtggttgggttttgttagtcgtacctcgggtactataaggattaagctcaggcctctgttgcaaagcactaccgtacttccacatgtctagttggtaaggcatagtttgtggctcagtctggtcataaacaaaagtacacggatggagatggacgaagtcggggctcgatggacatctctaggacaaatgaaggctacacgagctgcggctcggtagtcgagacgtcatggcacagggccggtgttctgctgctaggggctcaatcctgcctacctgtctcgggggttccggccgtaggcggggttgggtcggtactcttgtttatggctaggatgggttgggaactatgtcacgtctttcgtccgtatgccgtggtggtatgtggcacgtggttacgcgtgaggaagatgtgtcttgtgggtaaagatgtacacctataatcagagtataatctattcgaatagccacgccctcggttatgggcaagcctagcaatgtacccaagttagtgttttaattcttaaaacctgcttaacaactaaaatatggaatggttggcctgggttggcttgggatgagctgggacctgggtctggttgccagttcggtctgaatcatcgtaggccttgggttaaggcaggttcgtatgggttcacggccttgaataataacattgtgtagctctagaatcgtatttataaaatagctttgggcaactaagtgacttttaaatgctgtttactgtaaaacttaacccctattattatccccttgtacccccttgcattaatcatgcatctgccggtgtggcttgctgagtactgtggttgtactcattcttgctctatcttccccccctttagtaagagaagctttggagaagaagtcttaggtgaagtcctggcttataccccagttgagcacctgtgaagatggagacgtaggcccgctagtccgctgctgtttatttttgtttgtcaggcctgaagtgcctttttaataatgtaaatattatcgatataataaagatgtgtcttttatatcatgtttgtgtggtgtaccccggcttttcctgggacggggattaatacactagcgttctggaaaaggtatttttccgggcgcgacaatatgattgtgattgcatgaatgtaatttatttccaaattatatgtacataatcaaacccactaatttcgatgtaattgctttatttccgtccatactaattaatactttctatgtcttgtgtgtatatatatacgtgcagcgatggcattctattttttacacactccagtttcatatctctatgccgttacaccgctggacgtcgaccgtatactcgagtcgctaccggcctatcgtataccgagccgttaccgcaaactgagttaagtctactggtcgtgccacagctgtacactagccataaatcgttcgttcgcacgaagtatagtccaaagcctagttcgttcggtcgtcccgagttgctcattattaatagagtcattttaagccaccgattttgttcgccggttcggttgaccgtttgagtggtctcgtatcacggtgggttgactcgttgagttgatatcccgcgaggcttgcttaccaaagttatatttccattgatctattttgtttaatatgtaataattgactatggttttccggttaatagtaattacacatctcatattctaaaatctatatccaaacaatctgagctccgttttaacccattcaagtttgtagtgaatttgttgaaatgtctagaatccattaaaattggtttcttttgctgtttcaatagccttattgcttgtatttcttgtgtgctttgtttgtcgtttagattccggcagttccgacgctccagtttattttgaagtggttgtcgaggttccgtcagctcaagagcaaggcaagtcatacatacagcactgatcatgttgaacctattttataaaatcccctgctttctattaaatagcagtatttttgaacgtcatgtgggatggatgtctatcgtactcagcctgttgatatctcatgccattgataacttgggatataattgattagatgattggtttaggaatgcttaaccatgcttagatcaattagttcacaatgggattcataataatttagtccttaattatatgatgatgtaccaccatggttattgtttaattaaactaaatatgcttagaaggtgggttgtgggtgcatggttttgctagtcttgcccatgacaattaaggaccggttctcgagaatccctgaaagatataatcatacttaccacaggctagcatgggctccaggctaaatctagagtataacttaacttagctaacatactacggcagtgatagatgcgatggtgccgttcggacctggctttggtctctgttgtttccggatttacctaggcacgagaggggactgcccgacttggctaaaaaggagtagggctggacgaaaagctcgtggctcttgtctggcttggctcggctcggctcgtttgaatttgctaccgagccaacctaaggttttagctcgttagctataatgagccagctcgagctagctcgcgagctgctcacaagctaaacaagtctagcccaagtagccatctatgactcatttagtgaaggagcctgttgacggccgttatcgaccagtttcgaccatcaatattacccaatgtgtgaagactagctattcttgcaatgcataaattccaaataaaatatctacttccactatatactatgctactaacatgtatgcaggagaagcacatataaatggaggagaatcgacagaaaatagaagaatgatcaatcagacgctgtcgagaagtagccttgtggatagatgggctgataatacagaattaacatgagtaaacaagcccataattcacatcactaggctgaggaataaacgaggagtacacttgccaagttctgggccagatggaccagactagggttcggccgaacccctaggttctgccgaaccatggcccagaaattccacaggccgatagttatcgacatccaatggcggttatgaccgtttctacctgaagcaaccgccgtggacacttttcacaaggagggagaaagatgctctttggatgcttcaccatgccacatgtcaagaggagagcaaaaatgctcctaggatgcttggagcatctccacactcccaaggcacctctccacctataaatacccctcctctcattcattccctcacacacctcaagaagaagatcaagagctctctcaagtattgtttagtagttctacagatagtggagtaggaaatagaattgtcttcatagtcctcgagttttcaggagatttcgggtatggctttaatagctttcctctcttcttttgtgagacttattaaattaatagaatattcttctttatacaagttcggtattttattccattcatattacttgagtgctgactttactttatactcgtgtaacaagctttccagataggtgtattgatgtgggtttagtgtccgattattcggttgctctatgtcggttgcaaggatgtagagtagtattttactaatgtaagcgcggtgcttagattattaggtaccactaattggggttatatactgcggatgagaggtgggccgctgatggttacagctaagtacgggtattcctccgcgccagtatataatcctaagttaattacttggggagggtactcctccgtatttagccctggttgtatggtcatgacgggctagggtggcttctcgaaacaccaagaggacactgggtacggggtattggttgcatgactgtataatagcaagtatagactaaagatgtatgtatactagaagtacaggaatgatacttttcttattctttcaccacttagcttagactatattttagagtgagtatttcttagttctttcttctgtgtgtcaccctaccctttgaactgagttaacccctgcatagactttgatgtatataagtaacatataaactattaccatagtactctcttatcatatcttcccttgggataaaataaatacgataccttggaatactcccgggtgaaatgctacaatggtatatccgtgcgcttgcggatcacatctgtaaccataatataccatgagtatttctagtgctattgctggaaattatatttccagtagtgccactaagaaataccaaacaagcatttctggcgccgttgccggggaagataaatgattaagagttcactacttgctaataattttatatttacctctatataagtcactgtcctttgtaggcaaaccttgtttgttttctcttttatgtgaaaacagggtagtacaggactggttatgatctgccaaccaaattcatatctagagtcactggtgaagtgaagccgacctcgtgtcgttcatcctcaaggttactctatcggcaaccagaccagtcaatttcgcgccacaagaattgcatgatacggctgagaagaccctttgcaagtttgctgctccctctgttgggtaacatgctagatggaacccacgtcagtatgggagatggtgctttgatctgaaaatctgcttagtcaagatggcgcaggcttgcacattctgtggcaagcctaaggaggatgcaagtgcttatttacagcaattcctggaaagctgtagcacgtataccgtcaaaggaatcagactccaactgttgccgctctccctcctcgagagagcagaacagtggttctacatcaaccgtgtaacagtgaatacccggaataagcgctcaacggcattcctctcaaaaattttcccgatgggcaagaccaacactcctcgtggaagaatatctagctttcagcagatgagggatgaaaccattcttgaagctggggaaatgctgcaggagtacgtcaccacccgtcctcatcatgggcgtccatcctgcagaatttcttcaacggattaaccctctcgtcctgggatcacctggacgctgctgctgaaggagcacccttctcaaagacggtcagtgatgccaaccaacctgattgagaagatggtctcaaatattggttggagcaaggaacgactccaaacccgtcaacgcggcatgtacaccgtcgaagggatggaaatgctcgccgcccagttggatctccttatgaagagactggacaacaatgagaaggacgccaagcagagtgccgttaaggctttgggctctcacataacatgtgaggtctatggcaaaaccggtcactctgggacggatcgtccggaaacccgtaagaacgtcatgctcatgaacaacaacaatgggtatcgtccacaaggagaccaaggatggagcattgctccatagggtagatcaagaacggaccgaacccacaaggaggtcaaagtaaaaccccgaaggacgaaaagcctcaacactttcatgatgaacttcctggagcgggaagaaacgaggaaccatcagtaccttaagctggcttccaagaagccgggaatacaggtcaggtcaacctgcgctcccagtttcaaagatgccgctgcctgcacctaagaccaagaaggtatggcggattaaggagaagacacccgttcctataccttctgaactaggtgcctcatcgagcaaaatgcgttggaggtacggtcgtgctcgtcggacctgaaacgacgtcgctcttgccaacagataaattggtagttatctcatatttattttccattgcatcaaagcatgtttgaattttcaaacgcacattgagatttgaatttgaggcgatttcttcaaatgaatttttgtgagaaaaataaaatgcaatttttggcaaaatttagcacagccaccttcacactagtcgttggaccccaatggctgctgatttttgcagggtagcggctagcggggcccacatgccattactagccgttatccatgcactatatatgcagctcggctgggagagggaagtcacaccactttaactcattttcactccctctcaaaaccttgcaagcttgcctcaaattcacacaatttgctgtacttagtttaaacactttgcatatacaagtttgctttagttcgatgcaaggttaatcggcgggtatttgcctaacccccgtccgagtagtcttgtattcttgctctttgttgtagctatgaagaaacgacttttgggcatattcaagagacaatcaagctcacggacaagaagacatgataagccgagtacaccttcttccgcggatgcatccatcgaggaggcgtacgttccaccaaggctgtacgacaactccgatctcgacctcgtgggcgaccgggaaatgcaagcctatcatatgctgaaagaccgaacgtgtgctcagacctgagcatacgactcgaccttctgaaaaggataggtgtggatgctgagtttcatattgttcagcgtgctataggttgggataaatttgcatgtgtagatgtgccgggttcccgtttgcttaacatgcagtttttatgtaccttgctagaggtaggtgatgggttaccttccggctattctgcaaggaatatcaactttcttggaagaccttagcttgcatctaggctttgacaaaacatgcaaggttaatttcaggaacacatttcctgattttaacaagcgtatgttttagcaaagtatttcgggtctcatcctgtaaaaagcctagaactagtgacatccataatcctaccctggggctattgcataggttgcttggttttgtgttgtttcctagagctgatatccggataggacgaacttatcctcttgtatgccatggttagaaaaaaaatcagagtttcacctgttcaacccatgatcaagcaatggttagaaaatgtgaagttgtctagtcctgttgagtgtatttatttggtgactcatttagcatgaggagttgggactatgctttatatgcaagtatcttgtatccctgctacccgctcttatgttggtgaggcctacttggttcaatgccacatactcaaacatggtccaaatgattctcttatatttttgtttcctggctatacaaatgagattccgtaacctatacgggagtttcatttgtataactaccaagaactaaccatttctctccaagcggagttgccttgtgatgtcctatgcaggtaacatgacggatggcgagagaagcacctcaggaggcgtcttcctcttcaccaccagagcagatgtatttagacagttgggacccgaccgtgcatgcccttgattggacccaattcatgcaacatgacaccggaggttcgtcctggcagagtgccagcgacagccggtggcatgagccataggagttgcactggggatactcacgctccttcagtccaagtggtcaacttccatcttcttggatgcattgctcagtctcctctcgaggggggtctaggagaactcatccgggggacggatacacttgaactgcaggcagtgaacgagcaacacaccttggaggatcatgtggtacagtcacgtgaatggtagcactctgttggtgcacagctcgcaaacttcaacactatgatgcaacaacaacaagttggcaaaattttgcacggccaccaccacactagtcgttggaacccaatggctaaatgtggggccggttgggtccaccaggggttcggccgaacccctgcatggcactggctagctgcaaatatctgtagggtagcggctagtggggcccatatgccattactagccgttatccatgcactatatatgaagctcggatgggagagggaagtcacaccactcattctcactccctctcaaaaccttcctctcaaaattcattcaaagttttgcaagcttgcctcaaattcacacaatttgctgcatttagtttagacactttgcatatacaagtttgctttagttcagtgcaaggttaatcggcgggtatttgcttaacccctgtccgagcagtcttgtattcttgctctttgctgtagctatgaagaaagacttccgggcatattcaagagacaatcaagctcacggacaagccaacacgataagccgagtacaccttcttcagcggatgcatccatggaggaggcgtacgttccaccgaggctgtacaacaactccgatctcgacctcgtgggtgaccgggaaatgcaagcctatcatatgctgaaagaccgaacgtgtgctcagacctaagcatacaactcgaccttctgaaaaggataggtatggatgctgagtttcatactgtttggcgtgctgtaggatgggataaatttgcatggtagatgagctgggttcctgtttgcttaccatgcagtttttatgtaccttgctagaggtaggcgatggtgtacttcccggttattccgcaaggaatatcacctttctcgaaaagaccttagcttgcatctaggctttgacaaaacatgcaaagttaattccgcaggccggtagttatcgacatccaatggaggttatgaccgtttctacctgaagcaaccaccgtggacacttgtcacaaggagggagaaagatgctctttggatgcttcatcatgccacatgtcaagaggagagcaaatatgctccttggatgcttggagcatctccacactcccaaggcacctctccacctataaatacccctcctctcattcattccctcacacacctcaagaagaagatcaagagctctctcaagtattgtttagtagttctagtgctagtggagtaggaaatagaataatcttcatagtcctcgagtctttaggagatttcgggtatggctttaatagctttcctctcttcttttgtaagacttattgaattaatagcatattcttctttatacaagttcagtattttattccattcatattacttgagtgccgactttactttatacttgaatcaatatagtcgtgtaactagctttccaaataggtgtattggtgtgggtttagtgtccgattattcggttgctctgtgtcggttgcaaggatgtagagtagtatttagtaatgtaagcgcagtgcttagattattagataccattaattggggttatatactgcggatgagaggtgggccgctgatggtgacagctcagtacgggtattcctccgcgccggtatataatcctaagttaattccctagggagggtactcctccgtatttagccccagttgtatggtcatgacggctgtcgtaatgaactcggcagtaaggggtggcttctcgaaacaccaagagaacactgggtacggggtattggttgcatgactgtataatagcaagtatagactaaaaatgtatgtatactagaagtacatgaatgatacttttcttattctttcaccacttagcttagactatattttagagagagtagttgttagttctttcttctgtgtgtcaccctaccctttgaactgactttgatgtatataagtaacgtataaactattagcatagtactctcttatcatatcttcccttgggataaaataaatacgataccttggaatactctcaggtgaaatgctacaatggtatatccgtgcgcttgcggatcacatctgtaaccataatataccatgagtatttctagtgctattgctgggaattatatttccagtagtgtcgctaagaaataccaacagagcccacgtatgtagccaacgagcccaagtgaagtggctaagcccatgaaggaaaaatgcaaatagccctgtagcatctagtcctttactcatttacttgtctgatgtctccaactctggatcgaatcaattgattccttctcttctcgttcacctagtgacgctgcttccttgttctcgttcccctcttgccgattctctcatctcgcgttgccattgattatcatatcttctcgtagtgccgttctaggcccccaaccatcgacgcctaccctattcagattctcctcgccgtctccttcaccggctttgcctcgcggcactcgacctctgccactcaacctctgcttcgccggttgaagcactgccacaccacgccatcatatcccctctgtcggatattcctcgtgtgctttttcctcgttgacctagctagcctgttgccagtagccttcactgggcaacaaagtcgtggaggtcgcggtaccccacctcgtcgccccacgcagcagtcatggctccacctcgtcacctcactagcttggctcacgagccaaacgtgctagctcgagcttgcaggcaagccgagccgagatggggttctagctcgttaggataacgagccaagctagctcgttatagctcgttatcctaacgagctagactgagccgagctgagccgagccagctcgatgtccatccctaaaaaggagggggtgaaacctgaggtgggtatgtttggttagggagggttatataaagggttttttcatgatttccccctttgcagtatcgcggtggtactttggggcatggtaacatatgtagaatcgtgtcttgtgagtaaagttgtactcctctgatcagagttaaaactattcgaatagccgagcctgcggttattgggcggtcaaccagctcaccgtgattagtctcattctagttaatatgacataattaactggtgtagttaaggtggtttggttgggactattgcaacgtggtttagcgttgagcagtgatttttaatattgcttaattataattattgttttattgtattcactttatgatttataaatgctgcttttgttgcaaatatcctatagcctatcctttgtgaatatcttgcatcataccttgttccggacattgaggatccctgtgggttatgaaggaagcaacgtgttttggtcgtgaagattaagtttagattatttgtttatttctatagcatttgtaaaaattatttattatttttgtaagacgtggatttgtttatcaaattatcgtttgtgtactctagctggtcctggacagagattttattacacattctacttggagttcaggtagggaatttctgggcatgacattagctgagaaggaattactggcggctagcttgccatcggctgtgtggccgatggctgtgaacttttggaaattttcattgtcttgaacaattgagccagccgtggcgactgttatccctaattttgcggacttgctctgattttgggaaatggaaagaggagatcaagtggataaataactctcaaccaattttaggagataaaaaaaggctcaactggattttgatataagggcacacaagaattgtcatacaaggattgtctttcaaaggttctagacgctgagtgaggcagccggccgtgctagcttggtctacgactctatttgtggacgggatagaagagcggcaggccgagcgaaaaaaggtaggaatagactgtgctaggactgaaaaggaaaaacttaatgggcttttggctcaaaaccaagaaaaaattttgattaactttttcattatagtgtatagcaatcataatatttcaagttattgctcagtttataataggtgttgtttcactatgaaaaatacatttacccgttgcaatttttttcagagcgtgtacattcccgtgtttgtctgctccggctccacccgaactccggcgcccaatccgccggcctcgacgccggttcgatacccccgatgttatcctgtgggcggaggacctaatcctatctatcctgttccccaacacccatggcaactagccacctcacctctcgctccctcctcgtccaagcccagtaccccatctcacggctcccatccaacctccgcctctccctctcccaccacaagcaaccagccgccgtcgccaagcgccgccgagcccccgccccctcccacccggccttctcttcggtcatccgcggccgtcccaagaaagtccccatcccggaaaacggcgagccagccgccggtgtccgcgtcactgaacgtggcctggcctatcatcttgacggcgcgcccttcgagttccagtacagttacacagagacgccgcgcgcgcgccccgtcgcgctccgcgaggccccgttcctgccgttcgggcctgaggtaacgccgcgcccatggaccgggaggaagccgctccccaagagccgcaaggaactgcctgagttcgactccttcatgctcccgccgccgggcaagaagggggtgaagcccgtgcagtcgccggggccattccttgccggcacggagccgaggtaccaagcggcgtccagggaggaggtcctcggggagcctctcacaaaggaggaggtcgacgagctcgtcaaggcgaccctcaagaccaagcggcagcttaatatcggtgagttgcatctgatgcagcatcactcaattgtacacatggaacatcaactaattcgacagataaatgtctgcaagatttgtttcccccttgggctctggtaccctgttatgtctgtctgtgttcttttgttttctttcctataaaagactcgtgctctatgtgttttggctttctttacaaagccagatcaataataaatattgagtaaatttcacaaaactacaggtatttttgcacaatttatcagaaaactacagatttaagagctttcgcaaaactacagatttagtatgtccgtttattgtacaatctatcacaaaactacagatttaagaacttgtttcacaaaactatagatttagtgtattcgtttatcacaaaactacatatttagtgtcttcatttatcacaaaacgataaatctagtgtctccattatcacaaaactacaggttttaacaaggaaggggatggagaaagaaaaataagtatattttgttattatactcaccgatcaccgtgacatttatctcttgagtttagttcttatcatgtagccgctttgtcagccctttcttgtattcctagtcagtctctcattgccaacttttgcaggtagagatggtctaacacacaatatgttggagaacattcattcgcattggaagaggaagagagtgtgcaagataaaatgcaaaggtgtatgcacggttgatatggataatgtctgccagcagctagaggtcaaattttgctacttacctcagaattcttaaaatgcatacggtgtactactcagttaaattggtgactgttttattttttttttctttatggaccaatgttctagtaactcatctgaaactaatagaatttagaagttgtcttagctctggttattcattagtgaactcctttctgcttgaacttctgttttccatttccatatctgggagcaccttatctgtgactcttccctgattacttcatatcatacatgagcaggagaaagttggaggaaaagtaattcatcatcagggtggtgtgatatttctctttcgtggtagaaactacaattacagaactcgcccaatctatccacttatgctttggaaacctgctgcaccagtgtacccccgcttggttaaaaagatcccagacggcttaactccagatgaggcagaagatatgcgcaagagaggacgtcagttaccaccaatttgcaaactcggtaagtctctttgtttccatgtagttgactcctttaactgcctttcaaattgtggaatctgcaaatttcatagttaaaagaatgaaaaatatatgcgctagttgccaaagtttatttttgaaaatattagtgcctttgcagccaagagtaatgtccaaaataggaagtacctgagggaggttgatgtcgaacatgaaactactacttttatttgtcagaaacacttgaaatgtggaattacagttgaaccaatgctgcttcttttgctgagtgtggtacatattgtctatccacattagcccatcttcttgcatagcactgttccatgtttgtgcagtttgttgtcattgtttacattccattttttttaaaaatttttaaaggaaaaaatggtgtttatcttaacctcgtgaagcaagttcgagaagcatttgaagcatgtgatcttgtccgggttgattgctcaggtcttaataaaagtgattgcagaaagataggagctaaacttaaggtttggtaaatgctcagaatattatatcgttatgttattttgttcaaaacatgattaattctacctttgcaggatctagttccctgtaccttactgtcttttgagtttgaacatatactgatgtggagaggaaatgattggaaatcatcccttcctccattagaagaaaatgattttaaagtggcgagcgaccaaattttgaatagcaaagaagcaggttctggaagtgctctgaccccaattgagctggtcaacaatgccacgtctctcaagaaatgcaacttgattgaaggtgcagaaaaattggaagattccatgaagtctagttttgaaaatggtatgattttgggttctgcatgtggaaaccctggagtatgcaactctgaaggtatagatggaactgagtcctcagctgatgctccaattgaattttctccttcaaattcagcaagggatttagatccatctcaaacatcaacattgtattgccaaagctccctattggacaagagtgaaaatggagagctcattgagatgtaccctgacagatgtggaaactcggaacaatctccagatgtaccagaagctttaacttgtctaatgggcagcagtgatgagattcatgaattggaaactatgaggagaaactgcaaacatttaaacggcagcgatggtgttaacagtgattccatagtcccttcctacatggaaggaattttactccttttcaaacaagccattgacagtggcatggcactcgtgctgaatgaaaatgagtttgctgatgccaattatgtgtatcaaaagtctgttgcttttacaaagacggctccacgatacctggtactccggcatacaccaaggaagtcccatggtacccagaagactgagccagccaagaatgtaaggataaataagcatcttgaagaacataaagtatctgatcatgtcaaaaagaaagaaattgtcatgggaggatcaagaatgcagagaaatgatcacgcacgagaatttctatcagatgttgttccacagggtaccttaagagtagatgaacttgctaaattactggcttaaaggtgatcggtcctttattaaccgaaggtgtgttgcgttatcaaccttgaattaacgtgcaaagtatatacatgtacattgatatgggacgtataaaacttttcgtcaatttggtcatgctgtgtaactgatcacgctttctgcattgaaatgttggaatgtaataatatggaacggcgaagcattttcagacaatgagctctacctatagtgtgatcatctaggttgtgtccgttagctatggttgggaaccttcccacctagcacgcaaaacggatcaattcattagtgcatgattaatcaagtattttaaaatatttaaaaaatggattaatgtaaatttttaaccaacttttttatagaaactttttctaaaaaacacaccatttaacagtttagatgtgcatgtgaggaaaatgaggacttgaagttggtaaagtgttcgaaataacccttttcaaaccattgatcctaagcatatgcctggaagttgaagtaagattttatagatgtagcttactgtaaaatcaagaagttgatttagattttgtgatgaaaatattggttgtttgctgatgaaattttggagatttatagacgattgattttgtgaagtgagagtgttcggttgaccctggcgatcagaccagccaaaccaatggtctgaccggtgggatcttgaccgttgtcggtttcaggttgtcttattggatatggatgtttcctttagggatttgactttaagatgatttctatgcatatggatattgttgttatactaatatgagtcaagttgggacgaacttgtgctcggaatatggtttcttggttgttttacatgtgcaggtgttgcttgaggcctcgggagagtattgctggtgatagattggagttaacttgggagaagttgatgtctaggtatcaacagattataggatcaagatgtcgattagagggggggtggtgaatagacgatttaaaaatgaatggcacctaatcaaaactaacctaagttgctaggcttagtgagggttaagtctaattaagcaactaagttatattttacaaacctagggtgatagtggcttaagtatatctctaagaaagtaaatcacactcctaagttaagtttagcaatcctagagtgatatgatctcaagtatgtctctaggaatgtaaattgcacaactgtaaatgcgacaaataaatgagacaaggagacaaaagattttttaccgaggttcggaaattcgccgatttcctactccctgttgaggcgagcccaactccaccgctcaactagtattaggtttactaactttttgcagagaatgattatgaagtagaggagaatcgacatcaactcggacgataaatcaatcggacgatgtcgagaaccagacttgtgtgtgaataggccaagaactcagaattgacacgatgaattaggccaaaattcacaagtctgcggagtggagcaatagaggaggccaccagccgaaactgggctggattggctagccccaggttcggccgaaccaatcctggcaccgttggatccaggttttggcatggacgtccaggattgcatcccaatgacggttggagggcacttcggacaattccccttccacaaccgtcataaccacctctgtataaggagctcactctcttcacttcaacacacacctcaagcaatagctctctcattcctcccaagtttagtttagtagtatctagctggtgtaatagaaatagaatatgagtcaggagtccggaagccttcagaagagttcgggtatggctctagcagctttcctttcctcttttgtaagatttgtacttttattagaatactcttctatatatatttatggtattgaaatactttccgagtatatgagtaactattatacattatgttcttgttatactgaatataaggctaacttatctgggagatgctttggtgcgggtatagtgtttgcttatgcaattactctatgtcatgatgatgatattatagtagtatctagtagtttagacgtggtgtctagattacgagatatcattatttggggttatatattgcggatgagaggtgggccactgatggtgacagctcagtacgggtattcctctgcgcctatatataatcctaagttaatttcctggggagggtattcctccgtatttaaccctggttggatggtcatgacaggctgccgtaaggaactcggcagtcaagcgtggcttctcgaagtaccaggagggtatcggatagagggtattagctagtatatcagttaactagaatgtatgtatactatgtatattagaagtataggaatagatttcttttctctttttttttccacctagcttagataaattattaccgaggatgagtagaaatgcttgtgtgtcactctacccttggattatcttaacccctgcttagaatatgattatcacaagtaatatataaattattagttgagttctctctacatgatcttccacgggataaaataaatacgatacccttgaaatactctcgggtaaaatgctacaatggtatatccgtgcgcttgcggatgaactctgtaaccataatataccaggagtgtttcggcgccattgctgggaattatatttctagtaatgtcgttaagaaataccaacaccggcccacggagaggattacccaagcctcgatcactaggggtagttcttccttcactccgaaggtggtgaactccaaaccactcacaaccagcgtcggccttcctccgcaatcttctcggagaggtcaccgggcaactactccacaagccgtctaagaggcggcaacctccatgagtaacaagcaatgacgcggctcggagatagctctacaatggaagcaatgcacttgactcttggctagaacaaccttcaaccactacaacggatgaacacaagctcaaatgagtgtgggagaggtgcaaggggtgtatacaattgaagtggatgccaagagagtctccttgctgctggtgggggagtatttatactcccacccaccaaaactagccgttggggggtgaaatcccccaactctgtgtactgccagtctgaccggagttgtgtggccggtcagaccgtgctactctgcaacggctagttttctagttgttgtagggctgtcattgggccccatcggcctggccggtcagaccgcagttgggtggtagaccggcctcggctcggtcagaccgcccctagctcggtctgaccgaatgcggctctggcggctctggatcgccaccccgagagccacagggagaggttccctaggccggtcagaccggggttcacccgccggtcagaccggctgacctacgccggtcagaccgccactaggtggtcggtctgaccggccctggtcacacagcaggcacaacaggataatgagagcaagccaaatctaaatgcataatgacctaatgtggaaatttaaatcatctctttgctaggtcattacccctcttaatagtacggcaaagctataaataaactagcacagtttgattgcccaatacctcgatcaatttagaattcaactactagtttaccgtcatctatactttgctttgcgccatcaatttttagtccatcgataatcaaccatgcgcacacatgatgtgtacctaactcaaaacacataactcgatagaacggttagtccacaattagcgcttgtcattaattaccaaaactaacaacgggggcctagatgcttcaatctccccttatttggtaattgatgacaaacacttcaaacatatataatcaaatataaagcacatggatatatttttcaatgtatagaaaatactccccctaaacatgtgcatatcaatctcaaagaacaaatttggaacaaatgcacatttcaacatagttcaacacaaatacaacatatgatgtgaacttcacatatagatcaatcaattgcataggatggtcacaaatatatcaaaatcacatccaccatccatcattgcacaagttcacatcaataaaccatccaaatcataaaagttcatccatagatcatccaagtcacaaattatccaaagagggctcacaaataataacctaggctattacatgaccacggagggcccaaatctcacaagagagttcaacaaacgataaaaacacacaagatagataatatagcccattacatatagatatagccctcccaacttagcctaatagatatgaggactaacctcactacttctagtcccaacccacctaagatagatgaatttcttctccccctttggcatcaaggaccaaaaagcttcattcttgaggaatagagggaggatggggtataggatagtgagacgaagaggaagaagggtcacggcaacgagaatacacataggcatgtgtgttttccatggtagtcatacgccggtccaaagaagtgacttgagaggatatcctggcaacctcagaacgaatgcccctcgcatcctcatgcattgcctcagccctcatgctcggtagttagcctttgaatgctttcacttaagctatttatagccccaagcaccgagttgaaatagtcctgaggaggcatgccaaagtatgcataaggaggagtgaagtactcattgataccttgaggaggaggaggtgctgagcttgagattgccccagggtggaaagaaggttgcctcatcctaggagtatggggagtgccaagctgaagacgaggcttatattgcttatgcttctttagattgtttccaacactcccaagctgagcttgaatctacctcataatgtagggcgcatggtaaattcattgactaaacgtgcccttggatattgcaatctcttgcattatgaggttcaccacatcaaactgacgaccctgcatgatggcatctatcacatgccaagccacccccttaatatcatcattattcccacatcgagggagaatggtggctctcacaatcctgttcaccacactacgaatagtcatcaaccctgcaactttcccatgggtgtgtcgccttccatcttcatagaactgtgaaagataatcaatggagagcgggttgtgagtatgctcctcatgcagatcatcaccaaagtcaaagcggatgttgagtaacctccggaactgcctcctagagatagagtactggagggtgtgtgacatccacttcatctcactacaatcaccggcaacccacgttgtggcataaaattggcggatgagctcctcatcatagtcttgtgccataatgactatgcaatctatccccacagccctgaaaagggcttgcaagcttgtaaactctagagtctcatttatgttccgccatgaaatccacttgtgctttgcaaaagccctgctcctgtagagctgctcataaatagtcttctggaaggccgtgtgaaaacggggatcagtggtgtctctaggcctcttgaactgatcatgatgccttaggatggtgtactgagcggagttcctgatgttaaccacaaactgaacagaaggatcaatttccatctcatttccttcttcctcatcctccccactgccactgtcatcaccatctccactttcctcttcaccctcttcccgtccctcattcacatcttgctcttcttcctcacttgctcatattcctctccgctcgactcctcatgctcgcactcgggctcttgcacggccgcttgatgaccatggcgagtgcggggaggcattgctgaatccaaagagcaataaaggaatatgagcaacaaatttagaaaacactcggttaggcggaaagaaattttgcactgccggtcaggggcggtcagaccggtggccaatggccggtcagaccgcccgtagggctgaccagaccgccactaacaagtccaagcaaaaactctttcaccacaacacaaatgattctaaataggctaggataattttgcacagggtaagatcgtgaatcaacaaggatacggtctatttcatcaagattggaacaatgagggaaactacccttaaccctatttgagagtaagcacaaaagggagagtgatttaccggttgaaaggagatggtttgcacgaagaacaacccactaatttgtgcaaatccataagcacttcttccttcacctagagttccaatccatggatcaaaaactcaataaaaaaacaaaagaatccatggaatagagagcggaagagcaggagattcacttacggtgtaaccggagtgaaatccacggtcaaaccgaggggatttggtggaggagagtggctagggtttgagagaggagagagagatgagtttttcgagttggggatgagtggggaagagaagagaaggggtaggtgcaggatggagaagaagaagaagggcaaaactacctgggcccacctcagccggtcagaccggccctatgtggtcggtcagaccgcctcacctggtgtcacgtctagaaatttagcccatatttccagactattttgtgtattaaatccctgtccaggaccaggaccagctagggtacacaaaacaataaattaatatacagacccaaatgtaaataaagcgtaaaatacttacagaagaggcacttagtcctcacaccgaaagagaacgacagcagcagaaaaggcgatcctagcggggcttcagctccactccacaggcaaaactgaactagggtttgagccttggtcctctaacttcatcttcaactcagaagcactacacttctgaaaagggggaacaacagcaagactgagtacaaccaccgtactcagcaagccacaccattgatgcagacgtgcaaggggattcaaaaatggcttgtggctatttgcataaaggcagttgtaaaacattttgttgagcaaaacagtaaaactgctgattaattaaggtaacattaaatctctattgatcaacactacaccacgttgaacaggcccaaccaacccatctgaactacagtgcattgggtcgatttattaagtgtgagactaatcacggtgaatctggtcgaccgcccataaccgtgggcacagctattcaaatagttttactctgatcagaggtgtacaactttacccacaagacacagccccacaacacgttcccgtgcgccgacatgccaccatgacatactggaaagaggccgtgataggacccttcgcataaccccctctaaccaatcgcaccacacctcaggtttcacctccactcctcgcaaggcatcgggcagtcccctctcgtgcctaggtgaatccggaagcgacaaaggccgttgcagggcccatcccgctccatcatgcccacccttgcctggatacgtcggctagaggaaagctacactacaaacccagccgttgcccacgctggcttgtggtaagtacgataagttcttccagggcatcccgcgaaccagtccttaattgccatgggtgtgactagcaaaaccatgcacccacagcccaccattcagtcgcattttagttggataattacgaccaatgaaacatggccaggtgtctcgagcacgcagctcgttctgatgctaaaaaggtctaatacttcaattatcccatcaactgagctagtggtaattaagcatggctaagcatatagttctagctgggtcacataagtaacaagagctagtcgatttatcacccaaggttgacaaaggacaaatatcaagtaaacatggcacaagtgagcagataggtaaacccgattcccatgtaattggcaaaacatgcatatttatttgcaaacagtaaaacatttgtaaagtaggctcaacatgctcaaggggaatgtgtgacttgttttgcttcttcacttggatcttccgaactcttatccttgcgatcgcgatcttccgaaacggcataatctacgtgctggcatgcaaaatgaggaaaaactctaataaaaaccaaggaaacggtacataaagagtaaacaaacatgtggatctcagttttagatgaattttgcaagttgaatggcccaatttggagttcgaatgaattatatatgaattttagaagttttgagccatttaaatggatttctataattattattgatttattacgcaattaatgattatttttcacaaggaaaagggggttgctgacgtcagcaaggggtgaggcgtggaccgcgtccacaaaggggtggacccacacgtcagcggcacaagggcgccggtccaccgtggaccgggaccaccgaggcggtccaccaccggtccacgggaatcgacggcccggatcggcccaagccgatcgggcggccacgggcggcgcaacaaggacacaggcacggcatgaagctggcccgggcgagccatggcacggcagcggcacggccaccggcggcaacagccgacgacgccgaacagtggcgagcggccggaagacggcggcgttcacgggcagcggcaatgcaaacggaagggaaggggagcgggaggaggggctcaccgagcgtgtgggccgacgaggcggagccggaggtggccagcgatgggaagaggcgacggtgctcctcaaggaggcgaagcggacggtgctccggcggccttccgcgagcgggaactggcggacagtggccggaagaacctggagaagaagacaggggatttagggagcgaggaggaggcacgacgccgagggaaatggcggccgaaagcggcaaggatcagcgaagctcaccttggacggaggaaagcggtctcccgtgatgattcgtgaggagggaggggtggacgggcagtgcatggtgactgcggtgccggggaaggcaacgacgcagcgcgaggtggtcgggaacggcgtcgagaggcggccggaggcggctgctatggtggcggtttgggtggtgtggtagagtgacggttctagcggcggaatggaggagcggaggggatgccggggtacgagacgacgcagtgaagccgtcggtggcggttgcacggagcggtgtcggcctgctggagggcgtcgacgggcggcggagctcgggcccgcgctgcggcggtgtttcggaggcggagagggtaaaaggagtaggggccggggtgcggcacggcacggcgatgccaatggtggtggcggcacagcgtggcggcgtgcggctagaagcatggcggcgagcggcggagctcgggctcgcgtgggaagtgcgggagaaggcacgacgggctcgggaaagttggggaaatgagcgaggggagtgcgggaaggagttttatgggtgcgggacaacgggagggggccggggcgatgcggattcggggcagcaaccaccggcggcgtggggtggtgacgtgggcacgtggcggggcaaaccagcgcagttttcttgggggaaaattggggaaatggtggaggaggtgggggggtgcagttccaccacttgggcttgagcaggaagggctgggtggtgcggattttgcgacggagtaggcagcaatggcggccacgggcggttactggcgaggtggctggaggaacggggaggagctgacaggtggggcctcgggtccacctgtcggcgagggaaggagagaggaggccggggggcttatgtggacttagggagagatggggagcaagcgggccgagcggcccaaagaggagaggggagggaggctgccgggctggagggcaaagaaggagggagagggattgggccgagggcggcccaaaaggaaggagagggaattttcttttttttctttttatttaattgtttaaatgaactttgtgactttaaaattatttcttgagctccgaaaattcgtggaaaaatccggagagtactttagggcacagagaatattgcaaaatatttctggccaatgatttttatgggaaaattttaagtctaccattatttcacttgattaaattgctttaacttttatttaatttatagaaaatgatttattaattgatttttaatcccgaacgaaatcgaggtgttacaaatctaccccccttacaggaatcaagtcctaagattcgggtatggttagaaagaaagctgggtgtaggcggtctgatcgatctggccgatctgcacactgcattgatcccttttgttttaaactgactgatggactgaccaaccagcataacttaactgaactgactggcatcgaccattctattcttttgctcaaaacaaccgaactgactgggattcgaccctggagttctattgcttcgcaaaacttaattgattagctctactcgatctgaccctgacctgaatcacgagggctcatggaacttcctgtccctgtactgaactgctagcattatcaccttttggtaacctgagagctcaccaagcagactagaaattggcagatctttcatgaaatcttgtatgtgagcctgcatgaatgacagattctaactttactttgacctgctcctgactaccagaactattctaagaggctgcttgaccggtctttcgtctgaactgcaactgtacctgatgttacttctctgatgtgaattgttgtcctggcctcacgggtgtatcttagaattcaatcggatgacttgagatcggcatgactctattgacaccttgtagctggcttcttcgagtactacctaaattgttgtactgggttgaatctttaagggaaatggcgacgaggtgaaccaaaattcatctctgcgacctaccccccttacagagagtagtcatactttcgggtgaccgggaataattgaactattgtccttcaagaacaatcgacacttctcggatttacgaatggccctgacattgaaaacagaaaacttcatcgatcaatcaaaataaagcaatgacgatgcactttcatccaggtcaaggcttggaacttaaccctcagttgctgataggaaattccacataaagaaattctcatttagctcttgatcttactaactcttgactacttcccaatcagttctactgctggcatatttagcatgcttctggcctgacttcggtgtcatatgcttgaacagattgcatagtcgacattctttgaaacacatactgaccacttaacagatcaaactcaagagtccttctcatgacataacatcacacgtcgattattcttttgctgactcttcctgtattgatgaactgtaaaccctgcaactgctttcccaaaaatattgtaatctgcacggctgccagaaactgactttgatgctgtcgagagtttctgttctttgatcataacaacttcgctttcatatcttcggtaaagctgatctgtcgaaaagaggttctctgccacacaccctgctgactacacatttctgaacctgattcttggatatttcttgcccatgtatggaacaatttctgccaacttccgagaaacatcatgaggatttctagaattcgtagtggttccttcgaacatatggagaaccatccatgattcataatcgtaccactagggtgtaattgttgcttaccattctctaacagtttccaagggtagagagttcccaagattccttgtatgatgttacttctgaatttttttttcattactccctacacttgaatacccttgatactacctttagagagatttcatagtgtcgagcgctatggatccaaccattgtcacttccttggttaatcctttctttactcgctcgcaaacaggttttggagcacaacaaaagtgcgatgagttagaagggaaactcttggtttcttgtaacttgcagatacacatgttaacttgcttttgcatactcaaaggtgaaaagaagagaaacgcttgactcctactctattcaatattcccttttcaactatatcactggattggaacttctatgcacaaggaaggtatttgaacaccaaaggcctgtgcacaattgttgactcttgctgacagaactgctgatcagtagcacatttacccattgtgattctgacatggttgacttgtccttttgttggttactagctgaagctcccacaagaacaaaactttgactgatgacgttcctaagacaaacatcaatcctcttggtagctaaaaggaacgagaccttctcactatcggtgcaactcttctgttaatttcttgcgagacctctgaattggagcagtatgagatgcatggctgatgttgacaaccacattgaagtctgatgcttgagacattgattgcagtcgctgctgaagaattgagccgtctctccgtagctaaagtagatcactgatttcctggcttcgtctgctctgctggtgctgattctgtaatcttgaagtgattgctagagaaacaatagagaccttgtcagtgcacttaatgacaattcatcatgatggaaactttacacccaagtgacggttggtagtacttctctttctagggtctttggactggatctgaccacttcatacaggaactgatgtaacttgaggagacaaaggagttttaaccatgttgctgacttgatgagactgacgctttggcgctgaacaaccttttgagagatgataggtcttccaacaattggaaacaatggtggactatctttcttggtctcgagagtagaccattactgaggtggtgtcccggctcaaaacgattgagacacttctcacttgatggatctttgatgtgcactctttccgctgtgcatgctcccaactgaaaccagagtagagaactcataaccttggtgacaatgttattactatcactgtggg

SEQ ID NO: 5255 - DNA, 30344 bp, Oryza sativa
  unsure (1)..(30344): unsure at all n locations
tacaaccgtacaagacgttgtgttgcgccttagcgatcgataatgtaacaccccaggtagccacatacctagagtgccacaccaaaatacactaaaaaaaccaccaactcccaaaattattagaaatttcggcagagtaacctaaaagtacggacatccatgacaggcagttacaagataactcaataacgatataaaccacacaatccaacccatcctatctccacaaattccacgtgaaaataaggaccagaactttaaatgaccttcacaagttctacgcaaaacttatgctaagtagaaacatagtctaaaagtaaatttcaatagtgtgcaataataatgtgtagttcaagggtgctactcccgtcccatgccaatcaatatcattaggtacctaaaaaccaaattaaatacaagagtgagtaaaaatactcagcaagtacaatattgaactagtaaaacatacacaggtttaatgcaataagaaaaccaatatgaaatatttgtcttcctttaatttaaaaggaaggaggcaaaaagtagtagttccctcccgggcaggtgtgaatatcctcttagcattaccggtaagccgagcaagcgtgatcagcgcttctcaaggatcatgaatgaagatccaaattgcactcccatgactacgcatggtacttgaataatgtaaacaaaaacttccagaataatgaaacatgaataacgtcgtgaatttgaacatgaagtgaaatatgaatacgtaacataatactaaaatcacacaattgattataggaaggttcgaataataattggataaatgaaaccaaataaagtaacacagtttatctatcacacaagtccatcttgtacttgccttaactccttcaataatccgactcaactcctccaacattggaaccctccacacctgtggagcaaaactacgcataaaccactatatctaactaataatagttacaaggatatttactaaaatcgaaacccagttcatataaattattaccgatttgtattaaatagcctatagctgttccattactgttttatacgtaacgtacaaaccgtctaatggaacctagcaaataatataacttcggacatctagacaaaattgtctaccactttcatgttgagtcctgatttccagacccggtcagcagtactgtttttgttgtttctcccaaaccgtttatcggaattgagtgaaaccagcggcgttagaaagatatcgacgatgactacaaactttatttatgacaactaacctgaatcacgatggtttaataccagatttgaaaatactattgttagcccataatcaacaactaagaaaacactgaaccggcaatttaatcgattcccacgtgaaaattgtatttctatggactaagaggagttacacttgctgaggagaaatcgaatttgagatcaatttgtgaatacccagaaaatgcccaacttttgcctctctttcctttttccttcttttctcctgctttccctgcttcttgaaactcctgctctctgttcgttccagaagcacagcaacagaccagcatcagcagcagcagcgaggaacgttaacagaaacagccgtaacatggatacatatcagatcgatggcagcagcagcagcaaggattggcggcaacactcaccaaggagtcgagcaggagtggcgctggacggcgatggctgaacctgcggcgacggcgcagcagccattggggtgatggcgactagggtttgtagcggctgcagggttatcgatctcttccccttttctctttttttctttttttttcagttggttaaatagatatcctgatgaagatcgaacggcccaaattaatttaatcaccagtacttcattcggactccgattattataaactcatagtctattttgcactactcggcgagctctacgcatccatggttcctgatcgcctattcgaacaatggtttaaaaattgaacggcgtttgtgctaatattccccgaaatatactattttgaaactcggggcattacattcttccccccttcaatcgaattcgccctcgaattcgcccaaccaaactctagaacacggggtattacattcctccctccttcaatcgaattcgccctcgaattcgtccagttattcctcgaacaagtatggaaaggaactcataggtaggacttatataactcaccaggcgtgaataactctggctacttctcccgcatctatgtctcaagttcccatgtggcttctcgttcggtcttgtgcgtccaaagaaccttgacatatttgatagttctgtgcctcagcaccctctcagattcctccaatattcttagtgaacgggactcaaatgtcaaatcttggtcaatggtcaccggctctacggtaatatgatgttcagggtctctcaaatattttgtcaacatggaaatatggaacacatcatgtacacctttcatggactctggtaactcgaggcgatacgctaggattccagctatttccactatcgagaatggaccaatatacctacggctgagtttgcctttcgttccaaatctcacaacacctttggtaggagatacctttagaagtacttggtcacccacttcaaactctaattcccgtcttctgacatcagcgtagctcttctgcctactttgagctacgagcatgtgttttcgtatttctgctatccgttctgtggtttgttgaacccaatcgggttctaaaacagctctctcccctatggaatcccaacacaatggggatcgacactttcttccataaagtgtctcatagagtgccattcgaatgctagcatggtaaatgttgttgtaagcaaattctacaagcggcaaatgatcctcccaacatatcctctagagtttgaatagtccactcagattgaccatcagtataagggtgaaaaaccgtactgaatttcaattatcaaatgcctcttgcacagattcccagaacttagaagaaaatttaacatccctatcagaaacaatcgagcgaggcacaccatgtaacctcactacctcgcgtgtatagatcggtgccaagtcactcgcagaataagtggtgcggataggaatgaaatgtgccaccttactcagacgatctataaccacccagatggcgtcctttccttatgaagttcgaggtagcccaaccacgaaatccatagcaatatcatcccaaggccatacaggaacttccaatgattgtaactttccagcaggactcttatgttcagcctttactcgctgacataccccacatgatggcacgtactttgccacatccactttcatcctcttccaccaatagatcttcttcagatcatgatacatcttggtctcgccaggacgcacaacatatggtgttcggtgtgcttattgcaaaatctcttccttgactttagcttactgtgggacacataaatgcccatggaatcgctcaactctcgaggactccaaagtgaaatctctagtttttccttcctttacacgtttcttaacttgttgtagcaaccgatcgtgttgttgggcatctagcactcgttgtggtatgacagactcaagaatgactcgtgactcggtactcgccactccggcgtagcaataggagatacccatccgttcaaaatcaattatcaaacaattcacagttggaggaacgaccttacggcttagagcatctgcaaccacattcgccttacccgatgtatacggaatgttgagatcataatcttttattaactccagctacctcctctgctttaagtcgaaatccttctgagtgaaaatgttttgaaactattatgatcaacaaaactatcacaagactctccgtataggtagtgcctccaaatcttaagagcagagaccactgctgcaagctcaagatcatgagtggggtaattctgctcatgcttctgtaactgcctagacgcataagatataacattgccctcttgcataagaacacaaccaaggcctactcgtgaagcatcggaatagacagtgaaacgcttaccaaggttggggcaaagtaagcaccggagcagttaccagcctctacttcaattgctggaaactatgctcacattggtccgtccattgaaacttcacacatccttatgtgcgagcatcgtcattggtttagcgataattgagaaatccttcacgaagcgtcgttagtaccctgccatacccaaaaagctcctcacatccttaacattagtcggcctttcctacccgacaacacttgaaactttgctagtatcaactgagataccctgctgatcgattacatgccctaggaaagtcacttcaggaagtcaaaattcacacttctttaatttagcatagaacttgttttcctgtaaactccctagcaccatcctcaaatgacactcatgctcctctacatctttcgagtaaatcagaatatcatcaataaacaccaccacaaacttatctagaaagctatgcaacatgctattcatcgcctccataaaataggccagagcattggtcaccccaaaagacataactctacactcataatgcccatacctcgtggaaaatgcggtcttctcaatatcctcttctcgcactcgaatttggttataaccagattgcaagtcaattttagaaaacaccttttactccctttaacttatcaaacaaatcttcaatatgaggcaatgggtacttgttcttgattgtcgcagcatttaaggcccgattgtccacacacatacgacaactcccatccttcttctcagtaaaaataacaggtgcaccccatggcgacacactccgtcggattaacttcttggataatagatcatctaactgttttttttcaactcttcttggaaaggacgagctaaccggtacggggctctagagatcggtcgtgtaccaggaacaagatcaatacagaactctacatcacgctcaggtggcatccctggaaattctacgggaaaaatattgggataaacttcgttcggactccgattattataaactcatagtctatttttcactactcagcgagttctacgcatccacggttcctgatcgcctattcgaacaatggtttaaaaattaaacttttgcacgtttgtgctaatattccccgaaatatactattttgaaactcggggcattacagatacacctctcagagggttgttgatcttgccggtgcagatcaaccctattcctacaagcaaatcgaagaaacaagtaagaacaagataaaagcaatatgatattgcaaataggaatgaatacacacgataagttggggttttgaatacaagcagacggacggtctagctgacacgcacgctgtaaggaagtagcaatggctaaactttcatctaaacaaaacccaagaaaccctgaagggtacctagctatttataggtgtgggaagatgaccaacggtgccgtagggtcgttctccaccaggttggggtgcactccacatgggccccacttgggccggggtcccagacgaagttacaagcccataggcctattacaagtgatgcaacaccttgtttcttcaattgcggctcactaagatggaatttcgcaatgaggttggatccgttttaaagacaactccgagagctttttattaagtactcgtggacccaaaacggagctcgtatgcatatttggcggccatttgaagtcagcaatgtagcaggtggccgaatcgaattccagcttttagagaacttgatcttgatgtcttcttgtagatccatgatgtgagcaatggttgtatccatagtagccatggtcacattatcctccccttcttcatggaaaaacgtcctcggtttttccatgtggtgctcttcacgtagtccatttaaaacaacctgtttcttccaatcaaaacaaggcaaactcgagataatttggttagcattaacattcctctctagcttgtatgttttatccacatgtacaagaggtttctaaatccgaacatatgtaaactctatgcaccaaatatattccaacatcattatattcaccaaagatatgaaaaatagcattagttggacatggcaaattagatttagcaaataatttctccttcaaattttcaagctcacaaaaatcatcaaaccgaacatacccaaagtatttaaagaagatagcaattcacattcctctatttcattagcaatgtgaacaacatgcttaaaatcaacacacaaagaaacaatagaaatagcatcttctttcaccagttgtggcatggatataagtgaagcattatcacacaactcttctttatcacaaggaacagcaagtaaatcaacttgtgataaaggcatctcagcaattggttccactaatggttgctcttctctagtatgaaaagtggacatgttcaattaattaacggcacagtcaccttgattaattgcagcaccattaagtttaccttttatgccacttcagataatgtaggtgcatcagtcttctcttctgtcttcgtgagcgatggagatggcatctcgatcatattgctcttctcctcatggtgaatgttctgagctccctgcaaaatgtcagtaataggaggcacaagcatagcttgtttctcccttgggttctttaaaatattgctctcaacactgcaagcaagcatgaacaagtggcctatatgattatatgtcacattaataagcctagcttgaatatcggaattaagccctctaaaaaatctagtcattgtgttctcattgctttcttttaaaccactaaaagtgatacaaattttaaagttatgaaagtactcctgcacggttttgtcaccttgttttagatgtgaccatggcaactacagataaaaccattgctcacatcatggaagaacaagatgatatcaagatcaagtcctccaagtgctggaatcagattcggccaactgctacgctgctgacttcaaacagccgccgaatcttcatacgacctccgttttcagcccatgagtacttaatggaaagcactcggagtcctctttccattggattcggcctcatcaccaaattccatccaagtcatccacaaatgaagaaacaaggtgctgcgtcacctgtcatgggcctatgggcttgtaactttgtttgggaccccggcccaagtggggcccatgtggggtgcgccccaaccaggtggaggacgacctagggtcctcccacctccttaaatagttaggtaccccttcagggtttctcgggttttgttagattaaagtttagccattgctacttgcttgcagcgcgtgtatcggctagactgtccgtctgcttgttcttcggaaccccaacttatcttgtgtattcattcttatttgcaatatcagattgcttttatcttgttcttgcatgttcttcgatttgcttgcaggaatatggttgatttgcaccggcaagattaacaacccacagagaggtgtatcgatcgctagggcgcaacacaataacgtcatgtacggttgtagtcgggtcgtcaatgtttctcccaaatcgtagttgtctcaactcactgaaagatcgggccaaacaacaaccttgagtgtcgagtggaactcagggttcatcaggtggtatcagagctttcgttgctcggtgagtttttatctagctataacctgaaaattttcctacaaaaaaaattgcatcctgtacctagccatctttgtgccattgtattgttcttttcagtttttgcgttgttgaattttgtgttgcatcgtcacgtcgtgttgctggtcttagcgtctagttcgtttagagtttcgaattctagtcacgttttgtaccactgtcgtcgcagccgctgtgtcttggttgtcatcgggacctacgaaattggaatcgtctttccgccagagttccatatttgtagttttcagaagtttctgtcggttagttttgaagttgcgtctagggtatgctgtttagacgggcttgtgtttgtgccgtggttatgttttgccgtgaggaagaaaaaatgggaaaggaatatagcatatctgtttggattcggttcggtggaaggaaaggaaaataataatacattggatcggcaaatcagtttctgatttatctcattcatttaatctggccggccgatccatccacccactgtacccgcacctccccaccatctacagttgtttcccccaataccgtgagtagctcaacaccatggtgaaaatttttcaagtgtcggattggaaatccgtttgaaacaacggaacctatgagggacgagagcattccatttttgtatagttctaattttgggattgaacttttacacttgagtccctgtaatttttagattcgcatttgagtccctgtaatcttgcattgaggtccttgagtttgtttttttaaaaaaaataaaaaaaaggcagaaaggtgcataaaaaaagcaaagaaaagcagcaccaaaaaagaaaagaaaagaaaaagaaaagaaagaaaaaaaagaaagaagaaagaaagaaaagagaaaatattgttatctttgagctgaacttcatatatcagagtgtgcttgagttgtttctagtgctatcctgtggtatcgtttgtgtttaggctcgcgtctctagtacgttctagcctaggaccagcacggtacttgactttgaacgattattcaactttgcattctctgatttgagcatttgctattcctttgctacatatttaagcctacccagagctccacagatttgattacagccgtacaacaagtgtttgccaaggcattcatacatccaaacttcgttgtggtgcttggttgagtcggtgtacatcaccattccgcttgctttggtaagaacttgtaagagcttggttaaaagcttgagtgtgtgtgatatttgagctaccactacctagtagttgataggaacgtgcatattcttgtgtgtgtttcttgtttgctactaaccatggcaggattgcgcaagggaatacgagaacatcaacttctacaccttcgatgagatatgacgacttctccacgtgatgcatatgaggtacatgactataattttgcacaagttgcatcaaagttaccattctatgatgggaagtatgattttgttgcatatattgattaggagctagcagtagacaatgaatttgatatatatgatttttctgatgctcaaatgattaaggctgctagtaataagtttacctcttctgcattattttggtggagttatgtttgtaacaaacctgaaactttggatgaattcaaaaccataatgagaaaatgctttgtgagttcttattacaaatgtactcttcgggagaaattagaacatctgaaataaggcgatagaactgttaaggactacattcatgaatttaaggtctgtatcatctacagtgatctcaaagagtgcaatgaaaatacaatgcgtagatttttcaatgggcttaattctaaaattcaggttttgtttgataatgtgacatataatcatattgggcacctattcatgcttgctcgtagcattgagagttagatcatatcaaatgcgaggaagcatgaacaatgtgatttatctcccatttctgaatctcctatatccttatgcaatgatgatgtgcaaacattggaggagcaatcttttgtctctcctgttactaacgttttgcagggagttcagaacattcaacaaaaggaggagaatggtgtacttgataagaaagaggatgaagcacctgcggtttcggaagaaagtttgcaaggtaaattaaattgtgctgagataaatgaatgtgagtattctcaagctgagctacacgtgtccacttttcatgctatagtagagcaaccattggtggaaccaattgttgagatgcctttgtcacaagttgatttacttgttgttccttgtgataaagaagagttgtgtgataatgcttcacttatatccatgccacaactagtgaatgaacatgctatttctagtgtttctttgtgtgctgattttaagcatgttgttcacattgcaaatgaagtagaggaacatgaatttctatcttatttaaatactttgggctatgtttggtttgatgatttttgtgagctcgaaaatttgaaggagaaattatttgctaaatttgatttgccatgtccaactaatgctatttctcatatctttggcgaatataatgatagaggaatatatttggtgcatagagtttacatatgttcggatttagaaccttctgtacatgtggataaaacatgcaagctagagagaaatgttattgctaacaaaattatctcgagtttgtcttgttttgattggaagaaacaggttgttttaaatagactacgcgaggagcaccatatggaaaaaccgatgacgattttccatgaagaaggggaggatgatgtgaccatggctactacagatacaaccattgctcacatcatgaaagaacaagatgatatcaaagatcaagtcctccaagtgctggaatcagattcggcttacatgtgtgtgaaccctcgtccaggaatcagccgaggcacacaataaaaaattgataatagagtacaattattactctaattaataagcgaataaaatgtcattacagaggtagatagttactctcaatcaataaagatataagcagcggaaaaaaaataagataaacggcgcagacgactccactccacaggcagcttgaccagggctacacctaatcctccacaccatcagcatcactgtagaactcctcctctgatgaatgattgcaaggtgagtatatgacatactcaggaagccacgcagcaaatatgcaagtgcacaggataacaaaggatggcatagtagggtttcatttgaataaacaacatttaatgaacatttcagaatttaataaaacagttaagtaataattaaacaatattaatccaacgctatacaacataccctgttgcataggcccaaccattctgaacaaccatcccggctgcacagttctatctccaaaccaggaatatgccattccaaaccagggttgtttgggatctatgtgacttgccttgctggccttggaactcttcaaattcttctcctgcgaaaacggactctccggaaacgtcggaatctaaacagaaaggagcaaaacaccaaaaaagcacataaacaagcatgaacagtacatgtggatatttttaacatgtagatctcaattttagaaaaatttagaaacttgaaccaactaaatccgagctaagatgaattagttatgaatttttaaagattaaatcggattaaaacacttatatgagtattaattgaattatgatgcaataatgaattatttttgaaaaggaaaagggaattattgcgtcagcggctagggttcacggtgaaccgggtgcacggcggcggctcacgaaaacgaacggccgagatctttccatccaaaacgaacggccgagatcgaccggtccacagccggaccacggaagacgacgacgatgacgtcagcggtgacgtcaccaccggcggcggctcgggcgcgcgtcacaccctaaaaatcctaaatatataaattgttgtttaattggaattattagaatttattttaaaagcctagaagagaagatctaatttgtaattaataaatcccaatataaaatggggccagataaaatttcattaaatactttgcttaactctataattcttagatttttctgggatttatttgaggtaaggaagtatttttaataaatggaattgcatttaatgaataatttaaattggaaaaggttttaaaagttctcttttggctttgggccgaaagtcggcccaaaaccctctctctctcctcctcggcccagtccgcccgcagccgcccgcgcgcgcgtccgcccgctgacaggtggggcccacctgtcagtcttcgtcttcctcgcgccgctgccgccgcccgagccctagcgccgcgccgccgtcgtctccttccaaatctagccgccccttttcgtttccggtgaaattaatagaggggaaatgatccccgggatcacctctatcttttctcttatggaatcgtcaactaatttcgtttggaaatccgtggattcaagttcgattcggatcgatctctctcctccgaaccctagactttccttcgccgtcgccggtcgccgtgggccttcgccgccgccttccaacccctatataaggacccccaagcccgctgctacccgtcgccacccttgccttcgtctctcgtcgtccgtagcgccctagccccgtgagacctcgcgccgccgtcgtcgccgccgctccagccgtgcgccgctgtcgctcggggaggtcgccatcatggtcgccgtcgcgtcgccgtcctcgtccgccactccgccgtcgctgtcgaccgccggaacaccgccgtcgtcgtcaagccgaaggtcgccgccgcttcttcctcgacgccgtcgccgtccgttgatcttccgccgttgttttggtcaccggtgagttcgccgcgtcgccctctacgtgttcgttccctccgttcgcgctgtcgtgccgtcgttcaccggcgggcatgcgcgcccgagccgccgccgatagtgacgtcgtcgctgacgtcatcgtcgtcgtccatcagtgagccgcggtggatccgatcgatcttggccgtccgttttggataggatcgatctcggccgttcgtttccgtgagctgtcgccgtgcacccggtccaccgcgaactctagccgctgatggaataattcccttttccttttcaaaaataattcattattgcgtcataattcaattaaaacccatataaatgatttaatctgatttaatctttgaaaattcataagtaattcatcttagctcggatttagttggttcaagtctctaaatttttctaaaattgagatctacatgttaaaaatatccacatgtattgttcatgcttgtttgtgtgctgttttggtgattttgctcatttctatttagattccgacgtttccggagagtccgtttttgcaggagaagaatttgaagagttccaaggccagcaaggcaagtcacatagatcccaaacaaccctttgagcatgttgatcccgtttaaagctcttgtttctattcaactattgcatttattttcgaatgtcattgggtggaattaacctattgtttgttatagcccttttgttcttgattactttattccttgataccttgggttattataacttgactagttgggctatatatattggttcagctaaatattagatatgattgcttagccatgcttagaaacattagcacactattgggataacttatgactcactattatttaattatggcttaatgatagttcacgatggtcaatcgtgattggttaattaattacttgccaactaaaacttgataatggtgggttgtgagcacatggttctgatggtcgtgctcatgacaattaaggaccggttcacgagtttcggttgtgaaacattaaccgtgccaaccacaagccagcgtgggcaacggctttaccttttgtatagcatggttcattgcggagcaccagactaagaagtggcggagataagcccacgagggtcgctggggagtccatgccttgtttataagggggtgattatgatccaggaacggtgcgcggtggtggattgtgttgtgcgaggggtactgtcacagctcctttccgaagtaccgtggtggtattgaggcacatggtgacatgttgtggggctgtgtcttgtgggtacagtggtacacctctggccagagtaaaactattcgaatagccgtgcccgcggttatgggcgggtctaacaatgtctttcgtgattagtctcacacttctcatcataataaaagatgctataactggtaataatttgattagctcctggtttggaatggcatattcctggtttggagatagaactatgcagccgggatggttgttcagaatggttgggcctatgcaacagggtatgttatatagcgttggattaatattgtttaattattacttaactgttttattaattctgaaatgttcattaaatgctgtttatgcaaatgaaaccctactatgccatcctttgttatcctgtgcacttgcatatttgctgcgtggcttcctgagtatgtcatatactcaccttgcaatcattcatcagaggaggagttctacagtgatgctgatggtgtggaggattaggtgtagccctggtcaagctgcctgtggagtggagtcgtctgcgccgtttatcttattttttttccgctgcttagatctttattgattgagaggaactatttacctctgtaatgacattttattcgcttattaattagagtaataattgtactctattatcaatttgttattgtgtgcctcggctgattcctggacgagggttcacacacatgtaagcgtttggaattttggatagaaattccgggcgtgacagcgcgcaaactcgctggcgaacgacggcgcgacgacgcgaacggaggacaccaacacgtagagggcgacgcggcgaactcaccggtgaccaaaacaacggcggaagatcaacgaacggcgatggcgtcgaggaagaaacggcggcaaccttcggcttgacgacgacggcggtgctctggcgatctacggcgacggcggaggggtggacgagatcggcgacggcttggtgaccacgacggcgacctccccgagcagcgacgacgactggaccgacggcggcgcacggctggaggtgcggcggcgacggcggcgctaggctacacgatgctagggctctaccggcgacgagaggcgaaggcgagggtggcggtgggtagcggcgggcttgggggtccttttataggagcaaggaggcggcggcgaaggcccacggcgaccggcgacacgaaggaaagtctagggttcggaggagagagatcgatccgactcgaactcgaatccacggatttccaaacgattttagccgacgattccaaaagagaaaaggtagaggagatcccgaagatcatttcccctctattgatttcaccggagaaggaaaggcgcgagcgaatttggaaggagacggtggcgcggctcggctagggttcgggcggcggcagcggcgcgaggaagacgaagactgacaggtgggccccacctgtcagcgggcggacgcgcgcgcgggcggctgctgccggactgggccgactgggccgagagagagagagagagggttttgggccaactttcggcccaaagccaaaagaagacttttaaaaacctttttcaatttaaattattcatgaaatacaatcccatttattaaaaatacttccttagctcaaataaatcccagaaaaatctaggaattatagaattaagcaaagtatttaatgaaattttatctggccccattttatattggaatttattaattaaaattagatcttctcttctaggctttttaaaataaattctaataattccaattaaacaacaatttatatatttaggatttttagggtgtgacaaacctaccccccttaaacagaatctcgtcctcgagattcggaagaactggtgaatagatgcggatgagctgactttaattcatcttctcgttcccaagttgattcttcttccgagtgattactccactgaactttacaaaaacggataactcgattcctggttcttctctcatcggtttccaagatacggattggtttctcaacatatgtcagatcctcttggatttctatctgttcaagactagcttcctcagtgggtacccttaaacacattttcaactgtgacacatggaacacatcatggactcctgccaaagattgaggtaactccaactgataagcgacctctcctcttctactgacaatcttgtaaggtcccacaaaacgcggtcccaattttcctttagtgtggaagcgatgaactcctcgaagaggcgtgacacgaaggtacacataatctccttcttcaaaactcaaatctctacgacgattgtcggcataactcttatgacgagactgggccacacgcaatctttcttgaatgattttcaccttttcttctgcttccctcaggatatccgtcccaaaaacctgacgttcccccatttgatcccacaaaagcggagtgcggcacttccgaccatacagtgcttcgtaaggagccatatgaagactagcttgataactgttgttgtatgagaattccgcataaggtagattcttatcccaacttccaccaaagtctaaagcacaagctctcaacatgtcttccaaaatctgatttaccctttcggtttgtccatctgtctgcggatgataagcagtactaaagttcagcttagaacccatctcttcctgaagcttcttccaaaactttgaagtaaactgactacctcgatcagacactattttcttagggacgccatgcaaacacacaatcattgccatatacaattccgccaaccgacttccagaatatgttgtctttactgggatgaaatgagccactttggtaagtctgtcgactatcacccaaatagagtcatggcctgataacgttctgggtaggccagtgatgaaatccatgtcgatctcctcccacttccattcaggaatcttcaaaggctgcagcaaacctgcgggtttctgatgttctgccttgactcgctgacaaacatcacatactgctacgtattctgcgatttcacgcttcatacttgcccaccaaaatttttccttgagatcctggtacatcttggtactaccagggtgaatggagtataaagtatcatgagcttctttcagaattgtattttttaaatctttgttgtctgggacgcagattctctcacccaaccatacagttccttgctcatcttccaagaaaccgatagcttttcctcttctcatattcttcttgatttcttaaatatcaggatcattaatttgggcatctctaacttgatcaattagagtgggctttgcttctaaggctgcaacgaaacctctactgacaattcccaaatttaatctttcaaattccttacataactccaatggcaactgtcgtccttccgtagcattgcaatagcctttcctgctaagagcatctgctacaacattagcctttcccgggtgataatgaattcccatgtcataatccttaattaattccaaccatctccgttgtctcatgtttagatctggctgagtaaagatgtactttaaactcttgtgatcggtgtacacctctgtacgagtaccgaaaagataatgacgccaaatcttcaacgcatgaaccactgcagctaactcaagatcatgagtagggtagttcttctcatgcgggcgtaactgacgagatgcataggcaaccaccttcccatcttgcatcagaacacagcctaacccaagcttggatgcatcacaatacacttgaaaacccttctttgggtcaggcaaaattaaaataggagctgatattaagcgattcttcaactcttgaaaactctgctcacattcttctgaccacttgtactttacatccttttaacgtaatcgtgtcatgggcttagcaatcttggaaaaattctctataaacctccgataatatcctgcgaggcctaggaaactacaaatctctgaaactgtctttggttgtttccagttggttacggattccacattactaggatcaacggcaactcctccagctgagatgacgtgaccaaggaacttcacttcagacatccaaaattcacacttgctaaacttggcatacaattgatgctctcgtagcttctccaatgcaaggcgaaggtgttcttcatgctcttctttggttcgggagtagataagaatgtcatcaataaagactaccacgaacttgtctaggtattccataaacaccttattcatcaagttcatgaagaaagcggggcattggtaagtccgaaaagacataacagtacattcaaacaacccatacctagtggtgaaagccgtcttaggtatgtcttcctctttaatcctcaactggtgataccctgattgaagatcgatcttggagaaaacagtggcacctttaagctgatcaaacaaatcatcaattctgggtagcgggtacttattcttgatagtcacatcatttagtgcacgatagtccacacacatcctctgggtatgatctttcttttccacaaaaataactggagctctccatggagatgaactcggtctgatgtatcctttctgaagcaaatcatctacttgcctcttgacttctgctaattcattggctgccattctataaggtctcttatggatcggagttgttcctggtaccaaatctattctgaactctatgtcccttttaggcggcataccaggtaaatcatccgggaacacattgggatactcccggactataggaatctcttccaaagtcatttggttcagacttgaccttaaagactcagaagacaatgcatgaacagttacaactcgaccatcattgctggtgagagttacttttctgttggcacagtctatctttatacctggctaaccagtccatccctaggatgacatcaaggtctttggattctaacaggataagattggctagaaatggtacttcttgaatttctattctgacagaggggctacgttgcaaagagagtgcttgattacttggggtactaaccatcaaaggacgtctaagatcttctacttccatcccatgatttcccgcaaaactcatagataaaaatgaatgtgtagcaccagaatcgaaaagcactgttgcaggaactgagttaacaaggaacgtacccaaaatcacatctggagcaccttgagcttctgcagcagtaacatgattgacacgagcctttgatgctgatgcggtagagttgctctgggcagggacaaccttcacgcgtcggggcttcggacacttgtcagcgtaatatcctgggtctccacagttgaagcacgccctgggcttgctgccttgctccctcttggcaggctgttgctgtgttggagctgcaacagggcgtggagcttgattgcggatgttgttgccagcattgttgttgaagaactgacgctgcggacgaacaacagacgaagaacctccctgtggcatggactggggtcctaaagtaagacgcggcctttgactattcccctgttgtgccttgaagtgagcaatccggcgtttcttctgctccatgcggttgtacttgtcctcctggcgaatagccttatccactaacttctggaaatcatgataatccccagtcatgagtgggtaagaaagctcatcattaagtccttccaagaacctctcctggcgctcttcatcagtgcgcacatcttctggagcataacgagccagacggttgaactcgtgcagatactcggtgaccgtgcgagatccttgggtgagcgacctgaattccttcttcttgagagacaccactcccgatggtatatgcgtcttccggaaagcagcggtgaattcaagccaagtgataggttcagcagtagtcctgttaaggcggaagtgatcccaccactcagaggcagggccatgcagctggtgtgatgcaaatgagaccttctcctgatcagtgcactgaagcaaatccaacttcttctctatggcatgcagccaatcgccagcttcaacaggattagtggtgctagagaaagtgggcggcctcacacgaagaaattctgctaacttgttctggggaggtgcatggttatttccctggttctgctggttctggagttgctgcatcatcatgttcataagctgtgcctgttgagccaggacttgggcaagtgtgggattctctccattgttgttgttgttattgttgatgttggggccattcccgttgctgcgagtgagcaccatctggcatgggcaggatcacaagaagagaaaccgtggaaaactacttaggacagagaattaacttttctactaacttaacttttattgatcttaactgagtttcattattacagaactgaagactctcacaccactaaactcaccaactacctaacactcgaaagcaaacaaacgcatgcacttacatcccaccactgatgtaaaccacatgcaggacccacacacacaaccaaacttaaaacaagcaaacgaacacaacgatctaggacaacggcttgacaaggcactctaggtcttccgggcatcggagttgattgaaggctcgttcggctcgtctcaatcatcttgagtagctccccactcgacctttgaatgggtgcgcttcgattcttctccttcatcatcacttacattgacgaccggaggatccgctagggctggggtaacttctttctccaccacacggacctttggtgccaattggtagcgagggacgaatagagctctcttcgttgcggtaagacgaatcctggccttctgcggtggtgcttctcccatcaacgcggctagttccttctccaaacgatccaccttgtcctctaacctgcaaatcttaccacgattccgatcgtcacgatcttgagctgctagcacaacctccgcgcgggtttcatccatagcccacagcatctcaaccaaatgccttatggtagcatcattctcaatcccctcagtctcaagatagctgccacggtcacttccctggggttggcgaggatggtagcgatactcagtgtcggccaactaatcactgtagcgatcgcggagctctcctatggcgatccttgccacctcctgacatgcatggatgtagtttcctcctccagcttcgaacatcactgatgggatatcttctctattactgttcaaggtgactttgactcggcacttctcttcttgacgatcatgaggaatctgggcatacaaaggggcagtcccaaatcctatggcaaaggacatcgtgcgcaactcctagacaaatccctcaacaccatacaagtactcaggcttgtagcgcggcatctaaagacaagtgaaaggaggaagttaagacatttatccaattaatagcacaagtttttggattaatttgaataaagttagaaaatcaaagtaaaaggtaagtaaataaagtaaaccaagcttgcaagatacgttgaaacagttggaaacaagatcacaaattttgcacttttgaacaacaggttccaaaagaaataaaagaaagttataaaatcaacatgcgaaatttattttattgcagcaaaataaaacaatgttataaacatttgctagtaaatgagccattagtacagtaatagatgtatagtactaacaacactggaataaattttgaatgagaaccactaaaagagattatgaagtgcatgtgccattagtttggtttaattaaaagagaaagggaggagaacagttctactttttcaatatttttagagggcttctatgggtgaccatttggcataacctagggtcaaggaggctctgataccaacttgtcacgcccggaatttctatccaaaattccaaacgcttacatgtgtgtgaaccctcgtccagaaatcagccgaggcacacaataacaaattgataatagagtataattattactctaattaataagcgaataaaatgtcattacagaggtagatagttcctctcaatcaataaagatctaagcagcggaaaaaaaagataaacggcgcagacgactccactccacaggcagcttgaccagggctacacctaatcctccacaccatcagcatcactgtagaactcctcctctgatgaatgattgcaaggtgagtatatgagatactcagcaagccacgcagcaaatatgcaagtgcacaggataacaaaggatggcatagtagggtttcatttgcataaacagcatttaatgaacatttcagaatttaataaaacagttaagtaataattaaacaatattaatccaacgctatacaacataccctgttgcataggcccaaccattctgaacaaccatcccggctgcacagttctatctccaaaccaggaatgtaccattccaaaccaggagctaatcaaattattaccagttatagcatctttttttatgatgggaaatgtgaaactaatcacgaaagacattgttagacccgcccataaccgcgggcacggctattcgaatagttttactctggccagagatgtaccactgtacccataagacacagccccacgacatgtcaccatgcgcctcaataccaccacggtacctcagaaaggagctgtgatagtacccctcacacaacacaatccaccacagcgcaccgttcctggatcataatcacccccttataaacaaggcatggactccccagcgacccccgtgagcttatctccgccacttctcagtctggtgccccgcaatgaaccatgctatacaaaaggtaaagccgttgcccacgctggcttgtggttggcacggttaatgtttcacaaccgaaattcgtgaaccggtccttaattgtcatgagcacgaccatcaaaaccatgtgctcacaacccaccattagcaagttttagttggcaatttaattaattaaccaatcacgattgaccatcgtgagctatcatcaagccatcattaaataatagtgaattataagttatcccaatagtgtgctcatgtttctaagcatggctaagcaatcgtatctaatatctagctgaaccaatatataaagcccaactagtcaagttataataacccaaggtatcaaggaataaaataatcaagaacaaaagggctataacaaaccataggttaattccacccaatgacattcgaaaataaatgcaatagttgaataaaaatgatagctttaaacgggatcaacatgctcaaagggttgtttgggatctgtgtgacttgccttgctggccttggaactcttcaaattcttctcctgcgaaaatgaactctccggaaacgtcggaatctaaacagaaaagagcaaaaacaccaaaacagcacataaacaagcatgaatagtaatgtggatatttttaacatgtagatctcaattttagaaaaatttagagacttgaaccaactaaatccgagctaagatgaattagttatgaatttttaaagattaaatcggattaaaacacttatatgggttttaattgaattatgacgcaataatgaattatttttgaaaaggaaaagggaattattgcgtcagcgactagggtttgcggtggaccgggtgcacggcgacggttcacgggaacggacggccgagatcgatcctaaccacaacggacggctaagatctaacggtctacgactggtctacgacggatggcaacgatgacgtcggcgatgacgtcatcaccggcggcggctcgggcgcgcaagctcgccggcgaacgacggcgcgatggcacgaacggagggcaccagcgcatagagagcgacgcggcgaactcaccggtgaccaaaacggcggcggaagatcaacggaaggcgacggcgtcgaggaagaagcggcggcgaccttcggcttgacgacgacggcggtgctctggcggtctacagcaacgatggaggggcggacgaggacggcgacgcgacggcgaccacgacggcggccttcccgagcgacagcgacgactggagcgacggcgacgcacggctggagcggtggcgacgacggcggcgtgaggtctcacgggctagggcgctacggacgacgagagacgaaggcaggggtggcgacgggtagcggcgggcttgggggtccttttataggggttggaaggtggcggcaaaggcccacggcgaccggcgacgagaaggaaagattagggttcggaggagagagatcgatccgaatcgaactcgaatccacgaatttccaaacgaaattagccgacgattccataagagaaaagatagaggggatcccagggatcatgtcccctctattaatttcaccagaaacggaaaggggcggctggatttggaaggagacggcggcgcagctcggctagggttcgggcggcggccggccggaggtagacgacaggcctgacaggtgggccccacctgttagcggcagcgagcgcgcgcgcgggcggctcggcttgacttgggccgacttgggccaaggaggagagagagagggttttggtccgactttcggcccaaagccaaaagagacttttaaaaccttttccaatttaaataattcatgaaatgcaattccatttattaaaaatacctccttggctcaaataaatcccagaaaactctaggaactatagaatcaagcaaagtatttaatgaaattttatctggccccattttatattgggatttattatttaaaattagatcttcttttcaaggcttttaaaattatttctaataattccaattaaacaacaatttatatattaacgatttttagggtgtgacatgtagtttgccccaagccccttgagatcattcacaatgacattgagcctcccatacatgtcattcacactcttatgaggcaacatggggaatgtctcatattggatcttgaggaaatgaagcttggcatccttgtactcgcttgtgacctcatggatctccgccaacttgttccaaatctcatatgcggttctcaaggttgctcactctatcgaactccttttggctcaaagagttgaacaaagcattcatggcttgggcattgagttggaggttgcggtgatcaatctcagtcaagggcgtgccggtgatagcaaagcctacatccacaatacttcaaatatggaagctcatagctttgaggtgagtagacattttaattttccaagtggagtagtttgtgccattgaacatgggagccttccctacatggttcacctcgttcgacatcttctctctaggcggtaaaacccaatcaagagagaccaagctctgataccacttgtaggatcgagatgtcgactagagggggttgaataggcgatttaaaactaaatgacacataatcaaaactaacctaagttgctaggcttggtgagggtcaactctaactaagcaactaggttatgttttgcaaacctagggtgatagtggctcaattatatctctaggaaagtaaatcacactcctatgtcaatgtttagcaatcctagggtgatatgatctcaagtttgtctctagaaatgtaaattgcacaaatgtaaatgcgacaatcaaatgagacaaggagacaagagatttttcaccgaggttcagaaactcgtcggtttcctactccccgttgaggcgagcccaactccaccgctcaaccacgaagccaccgcacgcccccttcgtcaaggggtgggcaaggcgggagccggcccacggagaggactacccaagcctcgatcactaaggtagttcttccttcactccgaaggtggtgaactccaaaccactcataaaccggcgccgggcctcctccacaatcttctcggagaggtcaccgggcaactcctccacaagccgtctaggaggcggcaacctccaagagtaacaagcaatgacccggcgtggagatgatcaatcaagtgccatactagctctacaaatggaagcaatgcacttgactcttggctaattaaccctctaacacactagatggatgaacacaaagctcaagtgggtgtgagagaggtgcaaggggtgtatgcaattgaattgggtgccaagagagtccccttgctgcttgagggggagtatttatactcccaccaaccaaaactagccgttgggggtgaaatcccccaactttgtgctctgccggtctaaccggaggtatgtggctggtcagaccgtgctactctgcgacggctagaaaactagccattgtagtgctgttagagggccccatcggcctggccggtcagactggcgttgagcaggcggtcagaccggcctcggctcggtcagaccgccatcgactcggtctgaccgaataaggctccgtcggctctgtatcggccaccccgagtagcaccatcccgacctccagcgggccggtctgaccgggcatgtgccgccggtcagaccgtccttatgggccgatcagaccaccgttgtgaggccggtcagactggccagggcacaccggtcagaccgccactatgtggccggtttgaccgcccctggtcaggccgagctcagtgaaagcaaaggtgagtatttgtgtgtgtgatgaaaatgtgagcacaagtgaaaatgcaatgacctaatgtggcaatttaatcatctctttgctaggtcattacccctcttaatagtacagcgaaactagaaaataaactagcaaatttgatcgccctacacctcgatcaattctaaattaaagcactagttttaccgtcttctttctctttcctttgcgccgtcaattttaatcgatcgatagtcatccatgcgcacacatgacgtggacctaacttaaaatatcatctcaatagcaatggttagtccacaattagcgcttgtcattaattaccaaaattaacaacgtgggcctagatgcttcacacgagtacttgatgtaaagctctcagaatcctctttccatcggatcaacctcattgtcaaattccatctgagtcatcggcaattgcagaaacaaggggctgcattgtctgtaatgggcctatggacctgtaacttcgtctgggacctcggcccaagtggggcccaagggggggctgcgccccaaacagagggaggacgcccttctgacctcctccatcccttaaatagctagtaaccccttcagggttagttgggttttgtttagatgaaagtttagccattgctacttccttgcagcgcgcgtgtcggctagaccgtccgtctgcttgtattcgaaaccccgaaaccccaacttatcatttgtattcaattcctcttggcaatatcagattgcttttatcttgttcttgcttgtttcttcgatttgcttgcaggaatagggttgatctgcactggcaagatcaacaacccacggagaggtgtatcgatcgctaaggcgcaacgcaacatcttttacggttgtagtcagatcgtcaacgtttctcccaaatcgtagttatctgaactcaccgaaagatcgggccaaactgtagccttgagtgctaagaggacctcagggttcatctcatcaggtggtatcagagctttcttgctcgttgagttttttttatctatccataaccgaaagctcgttgagttttttttatctatccataaccagaaaatagccagacaaaaaaaaaattgtgtcatttacctagccatattgtgccattgcactgttcttttcagtttttgctttgttgaattttgtgttgcatcgtcatgtcatgttgctggtcttagcgtctagttcgtttaaagtttcgagttctggtcacgttttgtaccacagtcgtcgcccccctccccccttgtcggaatcagttcgctgccacggttctatttttgtagtttttagaagtttttgtcggttagttttggagtcgcatcaaggttttgctcgagtttgtggtttgtatgtgaagcgagttgattcggccgcgcttgtgacctgagcgagaggacgaatcagttttggaagtatgcgtttgattggaannnnaaaatagttaggttggttcggctaaaaataagtttcccatttttccccaacaaatccggccgcatccttcctttcctcacccaccaccaccgcgggtccgcaaccaggccgagtccgagtatctcctctatgggttcatctataccgtgatctcccatacaacttggtaaaattttttttggagtatcagattagaattctgtttgcaaaaacggaacctatgggacgagagcattctatttttgtgtatttttaattttgggtttgcacttttacatttaagtccctgtaatttttatatttacatttgagtccctgtaatcttgcatccgggtccttgagttggtttttgaaaaaaaataaaaaagggaaaaaaaggcagaaaggtgaaaaaaaagaaaaaaaaaggcgcaacaaaaaaaaagaaaagaaaacgaaaggaaaaaaagagagaggaaggaagaagaaaaaaaaggaaaaaaagagctcttatctttgattttgttctcttatatcaaagtgatgcttgagtagttctcaaaaaaaaagtgatgcttgagcttattctagtgttatcttgtggtattgtttgtttctaggctcgcgtctctagttcgttctagcctaggaccagcacgatacttgactttgaacgattattcaactttgcattctctgatttaaccatttgccatacttgctacatatttaagcctacccagagctccacagatttgactgcagctatacagattgtgaacatgtgtgccaaagtgtcgatacatccaactccatcgagtgtttggttgagtcggtgtggacaccatattctagtttgcattggtaagaacttgtaagagctcgataaaaagcttgagtgtgtgtgatttgtgagcttccactacctagtagttgataggaacgtatatattcttgtatatgtttcttgtttgctactaactatggcagggttacacaaagagtttggagctgttcgtgctcaatgtggacattttcaccttcgacaacacatggcaagtgaccaacatgacgcaaataaggtacatgatcataatcttgcaagagtagagtctatttttgccatcttttgatggaaagtatgattctgctgcatacgttaattgggagctagcagtagaaaaacaatttgatgagtatgatttttctaatgctcaaatgattaaggctgctagtaataagtgtaccggttctgcatctttttgatggcatactgtgggaaataagcttgaaacttgggatgaatgcaaaatactattgagaaaaagatttgtgttttcatactatagacgtgctctccttgagaaatttcaacatctaaaacaaggtgacaaaactgttagggagtactttcatgattttaaaatttgatgggcatgttaatgtgacatataatcatataggccaattgttcatgcttgcttgcaatgttgagcgcaaaattttggagaacccaacagagcaacaagctatgcttgtgcctcctatcactgatgttttgcaggaagttcagaacagtccccaaaatgagaagaacgatatgtttgagatgtcacttccatcactcgcgaatgaggagaaggctgatgcacctacattatctaaagaggggataaaaggtaaattaaatggtgcagaaattactcaaggtgagtatgtttctgatgaattacacttttccactttccatgctaacctagagcaaactttagtggaacctacttctgaattgcctttgtcacaagttgatttacattatgttccttgtgataaagaagagttgtgcgatagcacttcacttatatccattccacaactagtgaatgaacatgctacttttaatcttgattctccatgtactgaatttaagcatgttattcacacgtccagtgagaatgatgaacttcaattgcaatcttctttaaatacattgggctatattctgtttgatgattcttgtgagctcaattgtttgaaggacaaaatatttgctcattctgatttgccatgtcctcgtaatgttatttttcacatctttggcaaatatagtgatagagaaatttatttggtgcacaaagtttacatttgttcagatatgcaaccctctgttgttgtgccaagaaaatgcaaactggagagtagtgttaggaccactaatgttacttcaagtttgttttgcttttgtccaaagacgcaggttggttctgaagaaggggagcgacgagatcgctcaatgttgctgccatatacagtaaagaatgcgccatatgaagcgttgcgtcaggatatgctatgtgaattacccatgttaaaaccgaggacattttcccgtgaagaaagggaggatgatgtgaccatgcctacacggatacaaccattgatcatgtcatataccc

SEQ ID NO: 5256 - DNA, 20212 bp, Oryza sativa
  unsure (1)..(20212): unsure at all n locations
cacaagtttttggattaatttgaataaagttagaaaatcaaagtaaaaggtaagtaaataaagtaaaccaagcttgcaagatacgttgaaacagttggaaacaagatcacaaattttgcacttttgaacaacaggttccaaaagaaataaaagaaagttataaaatcaacatgcgaaatttattttattgcagcaaaataaaacaatgttataaacatttgctagtaaatgagccattagtacagtaatagatgtatagtactaacaacactggaataaattttgaatgagaaccactaaaagagattatgaagtgcatgtgccattagtttggtttaattaaaagagaaagggaggagaacagttctactttttcaatatttttagagggcttctatgggtgaccatttggcataacctagggtcaaggaggctctgataccaacttgtcacgcccggaatttctatccaaaattccaaacgcttacatgtgtgtgaaccctcgtccagaaatcagccgaggcacacaataacaaattgataatagagtataattattactctaattaataagcgaataaaatgtcattacagaggtagatagttcctctcaatcaataaagatctaagcagcggaaaaaaaagataaacggcgcagacgactccactccacaggcagcttgaccagggctacacctaatcctccacaccatcagcatcactgtagaactcctcctctgatgaatgattgcaaggtgagtatatgagatactcagcaagccacgcagcaaatatgcaagtgcacaggataacaaaggatggcatagtagggtttcatttgcataaacagcatttaatgaacatttcagaatttaataaaatagttaagtaataattaaacaatattaatccaacgctatacaacataccttgttgcataggcccaaccattctgaacaaccatcccggctgcacagttctatctccaaaccaggaatatgccattccaaaccaggagctaatcaaattattaccagttatagcatcttttattatgatgagaagtgtgagactaatcacgaaagacattgttagacccgcccataaccgcgggcacggctattcgaatagttttactctggccagaggtgtaccactgtacccacaagacacagccccacaacatgtcaccatgtgccttcataccaccacggtacctcggaaaggagctgtgacagtaccccttgcacaacacaatccaccacagcgcacctttcctggatcataatcacccccttataaacaaggcatggactccccagcgacccccgtgggcttatcttcgccacttctcagtctggtgctccgcaatgaaccatgctatacaaaaggtaaagccgttgcccacgctggcttgtggttggcacggttaatgtttcacaaccgaaactcgtgaaccggtccttaattgttatgagcacgactcccaaaaccatgtgctcacaacccaccattatcaagttttagttggcaagtaattaattcaccaatcacgattgaccatcgtgagctatcattaagccatcattaagtaatagtgaatcataagtaatcccaatagtgtgctaatgtttctaagcatggctaagcaatcatatctaatatcttgctgaaccaatatataaagcccaactagccaagttataataacccaaggtatctgtgtgacttgccttgctagccttggaactcttcaaattcttctcctgcgaaaacggactctccggaaacgtcggaatctaaacagaaaggagcaaaacaccaaaacagcacataaacaagcatgaacagtacatgtggatatttttaacatgtagatctcaattttagaaatatttagagacttgaaccaactaaatccaagctaagatgaattagttatgaatttttaaagattaaatcggattaaaacacttatatgggtattaattgaattatgacgcaataatgaattatttttgaaaaggaaaagggaattattgcatcagcggctagggttcgcggtgaaccgggtgcacggcggcggctgacgaaaacgaacagccgagatctttccatccaaaacgaacggccgagatcgaccgatccacagccggaccacggaagacgacgacgatgacgtcaccaccggcggtggctcgggcgcgcaaactcgccagcgaacgacggcgcgacgacgcgaacggaggacaccaacacgtagagggcgatgcggcgaactcaccggtgaccaaaacaacggcggaagatcaacggacggcgacggcgtcgaggaagaaacggcggcaaccttcggcttgacgacgacggcggtgctccggcgacctacggcgatggcggaggggtggacgagatcggcgacggcttggtgaccacgacggcgacctccccgagcaacgacgacgaccggaccgacggcggcgcacggctgaagctgcggcggcgacggcggcgctaggctacactatgctagggctctaccggcgacgagaggcgaaggcgagggtggcggcgggtagcggcaggcttgggggtccttttataggagcaaggaggcggcggcgaaggcccacggcgaccggcgacacgaaggaaagtctagggttcggaggagagagatcgatctgactcgaactcgaatccacggatttccaaacgattttagccgacgattccaaaagagaaaaggtagaggagatcccgaagatcatttcccctctattgatttcaccggagaaggaaaggcgcgagcgaatttggaaggagacggcggcgcggctcggctagggttcgggcggcggcagcgacgcgaggaagacgaagactgacaggtgggccccacctgtcagcgggcggacgcgcgcgcgagcggctgctgccgaactaggccgactgggccgagagagagagagagagggttttgggccgactttcggcccaaagccacaagaagacttttaaaatcctttttcaatttaaattattcatgaaatgcaatcccatttattaaaaatacttccttagctcgaataaatcccaaaaaaatctaggaattatagaattaagcaaagtatttaatgaaattttatctggccccattttatattggaatttattaattaaaattagatcttctcttctaggctttttaaaataaattctaataattccaattaaacaacaatttatatatttaggatttttagggtgtgacagccacctgctacattgctgacttcaaacggccgccaaatctgcatacgacctccgtttttggcccatgagtatttgatggaaacctctcggagtcctctttccatcggatttggcctcaccaccaaattccatccaagtcatccgcagatgaaaaaacaaggtactacgtcacctgtcatgggcctatgggcttgtaactttgtttggaaccccggcccaagtggggcccatgtggggtgcgccccaaccaggtggaggacgacctagggtcctcccacctccttaaatagttaggtaccccttgagggtttctcgggttttgttagattaaagtttagcctttgttacttgcttgcagcgcgcgtgtcggctagaccatccgtctgcttgttcttcggaaccccaacttatcttgtgtattcattcctatttgcaatatcagattgcttttatcttgttcttgcttgtttctttgatttgcttgcaggaatagggttgatttgcaccggcgagatcaacaacccatggagaggtgtatcgatcgctaaggcgcaacacaacaacgtcttgtacggttgtagtcgggtcgtcaacgtttctcccaaatcatagttatctcaactcaccgaaagatcgggccaaacaacagtcttgagtgtcgagtggaactcagggttcatcagatgacctgatatgctatttggtgccttttaagaacaagtgcagcttcttctctaggaagaagaatgatgagtatgtgccacagtgccagttaatttacttccaatcatccttttttttaaaaaaaaaataaacgtggcataatcattagtgctaaggcacgctttatgttggctgacaagcttacaactatatgatatctatgtgcaaatgtgtgatatgtaaatcgacttataaaagccgacagaaattgataagattgccctgcagccactgttaccatgcggattgcataactcgctggcttaagatcaacaaggtaaattatacttctttatatttgatgttgtacctccaaaatgcaaaagaagtttctgtattctgtgtatagatactaaatgcatatatgcgaacaagagtacctgtaacgtctgaatattactcaagaaattcgatacatagaatgtgatacattgtctgaactttgtctgacgggctgaatgttgattgctttgtatacaaacttgtcttgtctggtataggaagattatccttctggatctgattttatgtttcttttctttcaggcatgcccagtctgcaatgaggaggtatttgggtgaatcacaaatccaaaaattctaaataggcctaacatgtccatcgaatggaatatcggagtatttttctcatgaatttcataaggtatgttgtatccctctttggttcaaattcattcaatattatatttcagtgagtagtgacgaagtaacaatgaaacaaagttctaagaacttaggaatctgtttgtgccaagaaaactttttagccttgtagccaaattattttgtcatgcacacataattgcctacattttctcttaaatgccacttttcatgaataaggacatgattttaaaggtagattactctgttggttgtacaatttattctattaattgctaaaagaaaaaaaagactatgctgctatatttcccttgaaaatattgttgtagtgggattctcctacacttctaagcatacatcatgaaaagagagatagtgccaagtgagcaatgagttctttttaggagaaattagcaagttaatctgttctctaactttacaatgcaataatgcagatggcagatgttgaactctttatgttatatttcaggtagagaagaaaaatgttgtcctgaaattagaaagcgatagattgattatgtttgaccattctactcatttagccaagcttctattaccttttgttacagctgtcgaaaggggcttgcttaagaagcaatattaaccatgatggcatttgcaatagagagaaatttggaattcacactttcagagcaaaaattattctcctgtgacctctcacctatcacaagaaccccaaccactggatgaagcgggcatagtacatgtatatgcaatagtagcacccattaagaataggtatgttccagtgtctctcgtgttgctttattgtgtcgttaactccatcttggtaaatgataatctctgctactgttgatgttttgcactaaaattttctctttcatgtcaatttccattacagtaatactcattgtcatctagacacaccaattgatagatatctaggatggggattaaataggcctaacaaaaaaatacagcttgacatttaccactcaaaatttactccaaaccaaataatatagaacaacagtgtgcatgaagtactacattgcatcatgtaaatgacaaaccagcaaatgaaatgtttatcataatgttggtgagtagaaatgtgtcatggtacttgcattgttgaccaaaatgtgtagttgatatgtgcctgcatcatacagataataatatgacctctgaaacagaaggatagaaccctcttgcacataggaattgttatatcaagatggacccttttttggcggggaaagatggaccttattaactgatatgagtaaagtaagctactgaaacacatgaatatagcaaaatcacaactccaacaatctaaaaccgatttggactggaaagaaagaatgaaataacggtacaaaattcaatttccacgagaaagagaatatgaaacattaatttatttacatgatcaagctgaggcagggctatctctattctctatgatcagtcgcccaccactgttgttattggcaataaacagaaatatgtggttgtgcacaactcacagtgctgccctctccctgatgaagctacaaaccattaatttcccataaaatgcatatactacacatgccttcgttgaaaatgtacataacattcatagaaaataagacaacataaataacaccaggccaaaaagatacaattagcaaactaaattcgtgttcacttttatagttacttgttttattgtatagctacataaagaataaatcaattatttacaaattgcaacttgtatgagcgaaccacttatgcatgttaacagaattgcatgtataaagtattaaaaactgcctgataaaatgagaattagtgaataattaatttgccctcgtaagaaccacttatgcatatagcaaaccatattcaattatctcagggtcaaaaacacattttctgaatgcttttaatttttgttcagtgtactatgagctgagtaatgtagtagtagtttaggttttaagattgttgcatttctcaaggatcaattggatttgcttgattggattcccgtaagtacaattgatcagactagatatgcaaaattgataagagggaaattcatctaaaccttttgtaaaccttttggcgtgggaactgggaactaacttattcttttaggtagatactgcttttttagccaggattcaaatctggctaagaaacatggttggtgataggttacaaacatgttgtgtcagaggcatgttgtgcgtgttatgttaatcagtactagcttcttacatgcatttcagtgttcagttgagtgtttagttgcagagaacactctatttggttcaaattaaatagaatgttacagtgtctgtccagtagtaaaaatacattcctgttttttcaaggagaaagtaaaagaacttttaatcatgctcagagaccgagggatagtcatgcacaaaaattagttttagttagaactatgtgattccagacttaccatattcatgcatgacttttaagagattgtagctgtttgcataagatatttgtgatgcttctggatgaatttcataattgctccttatatgaaaacaatgatttacaaccagtggagcaaactactcaggagaaactaactagctaggggatgaaaacaatgatttacaaccagtggagcaaactactcaagagaaactaactaggggatgtccttcgcaggttattcaaaaagctatctgtggaaattgtactaatattttgctgaccataggggatattcttcgcaagctattcaagaagctatctgtggaaaatatactaatattttgctgacaagtagccattttacttagtgtttggtcagagatactagctatcccagcccacatccctaaaggacatcactacaaagtataaatttgttggaaacttggaaatggtaggttcataaccaacagcattctgcttgtaggtttagcgtcagtacttgggattttgcatttatatgcttttcctcaataggtttagcataatttagtgatccttcttgtgtacctcaccttttatattagatgaaatgcacatattttttattagtgtctatcattcaaccgtgtaaacaacagataataaaaattatgtacaggcggcgcgccattggcgcgccccagcatctagtaagattaaaagatggaggaatttttttgaagttgtcgtttgtgtaagctaatggataaagggaggaatatggattagacttttgtaggattagactttgttgacttaggcttggaatgaccaatgggtacaagaaggccccaaagcttgcgctccaatttgtgcctttcagtgcttctcaaagatcaagatctaagcgctgaaaatgccatcatcagcccatcacatttatctctcaacagtttgtgaacgcagctcagcatgtttacagttcaatttgacggtgtgttacggtttgacattttagtaggttttcaactttggactctgcctaagtattgcgtgccaaaagctctgctgtggaaatagattgcagtagaggcttaatctatgtgatggtgatgcatgggccaaaatatcatattgcgagagaggcaatccattttgtcacaagagtctctctcaaaaggtccaggttgtccacaagattacatttgacatgaatttatatcagcgataaattttagtggagaagaaatgcagagcatgtatgaagcctacattctgccgatcgaattctataacaggagaatttattactaaataacaaccttatttagatagatacttcaacagatttattgaagaggaggccaagtcttggatcgatggtccaatatattcgttgacagtcagcttagatgccactcccaagtagagccatcaggaaactcttgtagtcaccagatgtatcgttgccgatggctttctccagggcaaccgaggccctcttctggaacgcgtccttgatgcccttgaggtccttctccgcgtgcagcacgatcacacgggtcaggctgtcctcgttagtccctgacttgtgcatcgcgttccttagcacctgcatgcatgcgtacatacgtgcacaatttgcagacgcgaaattcagttcagcttcagtttatctatctcgatgcttcgctactactccagctagctagctcatcctcaccttcacgaagtacttgttcgcatcagagatgcaccttaacgcggttcgcagcgcgtgcgagtagcctgttggatcagctccatgctgcagtgcctggtgatcaaaacgcggagcatgcagctgcgttaaccatcaggcatattatatatttggacagaggaagctcaagtaaaccttggtgatactagtgccgcgctcatctctgaaccagctgaatgtggcgttgagctgcgctctgcttcttgtaccgactatccgaatgagttcgccgtgatctgtgtcaccattcgttacagtctcatggagaatctttgcctccgatttagccaatgcatcgttcacctcgtccccgtcgtacctgtaggtgctcactagagcaagcagaagctgaagcagacgaggatacgtagtagattaattagctcgaagcaacagggacgatgaaacacataacagagatattctgtactagcgagagtacgcacactgcgaagatttccagtggcgcgagcggccacgtcttcttctagggagcacttgtagaggacatggtaggttcgttttaccgctagaagctccgaggacgagttcgtgcacgcgatctcaacgatgacagcgtagtcctcgtggatgcatttcgtcgcggtgttcaccatcacggcctgcctctcaacagggtcaagtacccagtggtacatcgctctctgcagttaaatatagttagaagggggaaagaagaatcacatacttaactagctttggtttaactaatttgagttcttgtggtgtgtttatgaagatttgcagcactcttacctccaaatcaccagaaagttcagactgaagacgctggatgaggttttcgttgtagttctcttcataggtcagtctgatctgcttcctctgagttgcgtcccggtgagctaatacgcctattactgcctgctcatcagtgccccagcctgcaccataaaaatagttcactggatcaacaaagtttttccgatggaacaatgcaaagagaaaacagtgctagtgttgaataacttttcgtttctggaaggctggaactaataacttgttcagtctttacaatcgagacaaaaagggcatttaattttttgccatttttaagatgtggcagttaagaatttatcactcgttgtctataacatatgggttctcgtgtatctacgacatgtgggcacaatttgaagacccttttatatgcaaataatgaacttttgtcaccaaatatttgaacctagttttccagtaaatttcagtcacatttgtacccgtttgattttataacctatggtggtagataatccatgttttctgcacaaacttattgagcaatttgaacgggtttgggcttctgtttgttaccccccgatttgtggacttctgcgctagctatgtcggccttattttgtagctttctggtatggtcttccatcttaataagtgggcttcattcgacttaagaaattttacgtgtttttggaaggaataccaagcctgaacaaaacaaaataagtaccttcacgaaaacacactaggccatacacatgaggaaaaccaggtgatttctgtgctttgttgtggaaatcgctaagtactattttcgttttaagttagacgttttgactttggtcaaagtcaaactgtttcaagtttgactaaatttataaataaatatagtaatatttatattactaaactagtttcatcaaatcaataattgaatacattttcataaaaaaattgtcttgggttgaaaatgttactatttttttctaaaaacttggtgaaacctaaagcagtttgacttcaaaatgttttataacctgaaatggagggagtaaattttaatatattttttagataatcgagttaggagtaaaaaaaaatgatacccacactttaatgtgaaacatttttttatttatttttaaatatattacaaaaagatagatctatggaaatattatgggtgatgtcatgatgattggatatgcttgcatgttaatttatataattaaatatattgtagatgatattgcatgcatacatgagattaaatatataattatagctagtgggtgataatgtggcatggttttatgttaagctttagacttagcgggttgtaaatttatagaaattatagatgaacaaacaattacaaaagagtattacaactaacagggtacaatagttggtacaaagaaatatgataaatattatttaaaaattttctataccatagagtaaaaagttgcagtatgtataatttacaccgcaaaatataacaaacgtataagcaatttgaattgattatatttctattaagagcgtgatccatgtattaaaagaaaacggctataattcatttatccggacacaaaaatccttttgcctttgttaatttcctcagtataattgtaacgggtgaagatatgaacagcattgtaccactgatgtaaatctgcaatatttagcttctctagcatgtttggtttgttcgaaagtctacaaatgaaaaatttttgcaaaaaaaaaaaggtagcgaagaaatttcaattgtaactgatgataaatatcatgtgcgatttgtgagatagaaaaaattagcatgttctatacttaatagatgagaatacaggcaggataaaagaaatttgattaagatttaacatcgcattgattgggatgtgattacatgcaaaactttagctatattcacgataaaaatgaacaaacaactgaaaaaacagaacaactaacaaagtaatggtagaaacattaagacaacgaaatattactaaaaagttaaaaaaaattcaactgtatgatatacactgaaaaaagaaaacataatctgcgggattatattttttttcacattataatatatataaatatataaaaccacccttttaactatgattttccttgataattacattggtttattttaaaactaggggattgtccccgcagttttgcacggagcttgatatttcatgtatagagttagattaatatgcaactgaaattttatctctatagttatcataatgtaagtatatttggattttatatacatatcttaacttctatttcaatagatataattgtattttgtatacaactatatcaaccaatctgtaccgttgagaatttctagattgtagagcgaacgtggtgcatgcttttaaggttgtctttaatactacctatgttttttaatatatgatgtcgttgactttttaatcaatgtttgaccattcgttttattcaaatttttgtgcaaatattaaaaaaatttaaatcatccttaaaaagcatttgatcataaatcaagtcataataaaataaataatatatgtatatatatatttaataagacgaatagtcaaatgtatctcaaaaggtcaacagcgtcatacattaaacaacatggaggatagatagattttataaacatatgggatgtaacagatcaaaataacaactgcggccgtatgaaaaaagaagaaaataaaaaggaagaacattgtatccaaaagggcacactttggacccaaccgctgttgctgtgtttcctcgattagccggcttctagttcctcaatgtgcacatctagtccgtgtaaatgcactagtcagaccactatctatcatcttcttcctccagccgatagatctaccacaactagcggtgcaaacacaatggtgtgttgtgcaggaacatgacctcggatttctctaaagagacaaaacacatgcaaaaaatataatctagatctacggatttgggggtgaaattttttttaacgcacaaatgaattgcacgttaatatattagttgtttgggggggtgttgaaaaatgagcacctaaaattgcaacaaaaactaaatatcgtcaaaagggccaagggcccctggtgaacaacgggaagacgtcgttggcgagtcgcgagcccatctgcaggaggattaatggagaaacttgagagatccatcgtagaaaactacaaatcgagctcctggtatggagcctctcttttcttctcgaaatcatccacataggagttaggcgttattcgatacagtgaacaacagtagcacagaaacccacgaaagaaactctaaccaaatgcattaccatatttgacttaaaatttgacttaaaatttgctacattttagatgactgaaatctagcaaataccttgaacctaatgcattaccatatagctataaactagctagaacaacgagagatggaatactacagattataaccttggaaagccttcaggagtgcatcagcatcttcagcaggagaaggggtaactggaggaactactatcgttgccatcactcaccttattctttctccaggtatatattatttggtttcgtcgagctttatgtggtatttatagatttgtcgtggcaacgccttattcaaccacatggaatttaatgagaataagaacctcccataaaacctaatggcaatttaacgttactgtacgaactatatattttgcctggtttaaccatgcaagtaacggaagttacactacagcattgtcttcactgttcccagatagtacaggtcttgttgtgtagatattatggtctggccagccggtacaacactgaacaaattaaggcaattaacacgaataagtatcaacgattttgctttagatgtgtggacacatgcatttctctagatatcttagtcaaattcgcaatgttttttccccacaaaaaaaaaacaaccgcaagtgttatatataagcttttgagagatttgtacgatatataggccaactggatttagcgttcggaccccattcaatttatgtaggcctggattaattataggacaattttgctatatatttgtcgataaattttcttccaaaaatttgacggatgtaattacactacaatcgtagtgtaatgacactgcaacttgtatgcaattacactgtaactataatataacttgtatgtaactttcaaaaatctctccgtaacttgttatttgggtaaaatgaaggttgtgggaacaaattctttcacatatgtgtgtgttatgatttgttttcttcctcaccaaaacaaatcttgtaatagatctaacgattcaaaattacataaaacttacatataagttacgctgtagttacatagaagttacagtgtaattatatatgagttacaatgtaattacactacgattgtattataattacatctgtcaaatttttagaagaaaatttgtcgacaaatatataggtggtccgctgaagctagtagtttgttgacgcacgggcctgtatatgcaaatggggtacataaattgcattgttggcctgctgccaatatggtttcaaatgacactagttagttgcctatatatgcgttgtaatgagaaaaaaattatacactcttgttgcaacattattttagcacacacaatacttatgtcccatcttaatggttttcacatgttagtaacataaacggcaaaaaaattaataaaaatgaaatagaacaatacatcattatttcgggttatcaagttcgcttcatctctaagagaaaaaggaaacagcttccactttagagtttcatgtgtcatgacgatggataggcatgaacacactagctcaaagtcccgaagatggaagtatatgttttcaccaatactcctggagaagatttgctctcgaatcaaggcaataaagctaggaccaattttgtaaccatccgaaaggattggttttgaagaacatgatggctcacaaagatcaacccgaggagcagaaaggaataaaagaagaaggaataaaaataaagatacgaggatgacctagactcggataaattagcaaccgttccccggcaacggcgccagaaatgtttattggtatttcttatgaccacagataaatccacaagcgcacggaataccgctgtagcatttcaccttcgggtaaccccaaaagggtattgagctcagggaacgtgtgtaatctatctaaggctaagattatccaaggacaacaactaatggtaggctagctaggctagacaggactttctatgtgttttaattatctaagctaagtgaaggtaattttctgctggtctactagcgtggttccggctatagctctatgatgtacccgaacgtggaggattactaggatgagattcagagctgtcaccacctgccgtctacctctgacaaatctgtaggatacagaacaaacaaaaggtaatctctaacctagacaccacgcctaagttattaattattactctaatacttgcgcaggaacttccttctttatcaagagtcctagtactagagcacttagtatgaatactaaacaatgaacccgcaaagatggaaacctatctcacttagactaagtaattaaatagcacaagaaaggatctcgaatacttaatttatagaagaaatttctccgaaccttgagcagagcataccgatagctccgatactcctccagaattcctcctagaaagctacactcatcaaggcagaagtcagagagagcgccaaacttttgggcactcctctagagcttctcctcactctctacctatttctaatgtacaaaagatacaatagagcctcttgtaattcagctcaaagttgtgtgttggtgaagtgagatgagctcctccttttatagcctccatatgatggttacagctatgtgaaatgtccaatttgccctccaaccatcattgtgaagtcatcaggaacgtacacgtggaaggcaaggatgaggggcgcctatggtggttcgaccgaaccctgggccccacctcctagcctctcctttggcagggacactgactggttggccctgatggcggttatgacagttatgacccattccgtggcagtatcacctgacttgtgggccctccaatccgtgtacttgcgtctgattggccggaggtgtgtttccttgtatgccgggtgtgttttctccttaaaatacttgcatacacatatttcaccaacactagtggaattgattagtaataatccctaccactaagttggataccacattttatttcattgtatgcaagtattgacggtcagatattatgatttaaggaccgtcaacagtaacctcattccttcgttccaacaaaatctaaagaactcacaactccaatgaggatcaaacttatcaccttgacaatattcttcatcctgatcaccttgataatatctatcatctcggtgatgtctaaaattctgaaattcctctgaacttgtttgtcatgtctcttctggtacttgttaatcaatctaatgctatcaatcatggcatacaccatatttacaggaaaaaggatgtccatcaatcttcatcgacctttttccatcatcaaacttgattcttccttgttcgatggcggattggatttgctgcctgaacaccttgcacccattagtatgatgagatcctgtattgtgccacttgcaaaacttcctcttcttcagctcttcagccgatggtagaacatgacctactagcaactggatttgcttttcttgcaacagtaaatcaaagattttgttggctttattgatatcaaagtcatattcctcttccttgtttatatacttaacccattgacacatagttgtcttcttgatcatggaccactctgccaaactgatctctaggtcttcctagttgtcttcttgatcttggaccacttagccaaactgatctctaggtctcctcctcagaatcataaacatatctatagacgtagttaaccttcttgaccttcttggcctcctgaaaacgttgctcatgagccgataccttctgagccagatgtgctaagctctcaaagtcttgtgatgaaaatttctctcttatcgacccaatcaatcactggaaagccaaatcgactagctgtgaatcggtgttgacggtcgttatcgatcagttgcgaccgtcaatatagccaaaatttaggagaactagtgatgcttgcaatgcatatatctgttaaaataataatattccactagtattaggtacagtaaccttttgcagagaatgacaataaagtggaggagaatcgacatcaactcagacgataaaccaatcggacagtgtcgagaaccagacttatgtatgaatgggccaagaactcagaaataacacaacacattgggccaaaattacaagtctacgaaggaggactacgaaggaggccgctagccaaagatgggctgggttgagccaacccatggttcggggggttcggctgaacctcccgtggcgccgatggatgcaaggtttggatggacggctgggattgatccccaatgacggtaggagggtattaccgaccattccaaccgtcgcaaccgtcattacctacctataaaaggagctcctcttctcacttcactcacacacctcaagcaatagctctcccatttctctcaattttagtttagtagtatctagctggtggaataggaatagagtagaaatcaggagtccggaagtcttcggaagagttcgggtatggctctagcagctttcctttcttcttttgtaagctttgtacttttattaaaataatcttctatatacatttacaatattgaaatactttccgagaatattagtacctactttacactatgttcatgttatactgaatatacggctagcttatctgggagatgctttggtgcgggtataatgtttgcttatgcaattactctatgtcatgacgatgatattagagtagtatctggtagtttagacgtggtgtctagattacgggatatcattatttggggttatatattgcggatgagaggtggccgcttatggtgatagctcagtacgggtattcctccgcgccggtatataatcctaagttaatttcctggggagggtattcctccgtatttagccccggttgtatagtcatgacgggctgtcgtaagaaactcagcagtcaggggtggttactcgaagtaacaggagcgcatcggaaagagggtattagctagtatatcagttaacaagaatgtatgtgtactatgtatattagaagtataggaatagattatctgtctcttttctatccacttagcttagatgatttatcatgagaatgagtagttcatgcttgtgtgtcactctacgctttgattatcttaacccctgtttagaatacgattatcacaagtaatatataaattattagtcaagctctctctacatgatcttcccacgggataaaataaatacgatacccttagaatactctcgggtgaaatgctataatggtatatccatgcgcttgcggatgaactctgtaaccataatataccagaagtatttctgcgccattgctgggaattatatttttagtaatgtcgttaagaaataccaacaagcatttctggcaccgttgccggggaagattcataatagagataacttgaactaatactttttatttacctctgtataatcattttcctttgcaagctaaccttggttgttttcactatttgttgtggaaacagggtagtgaatgactggtttcaacctgtcggaaaactttaaagaaaatccagaagctttcttccggagtgtcaggccgcgagtcgttgctccgaagaaaagtttaccgatagaaaaactagcaataccagtgcccccgaccttcaagactatggctagcagaactcttcgtgagttcgctgctccctctgctgacaatgtggccactaggctgcaggtcaacataggagacgtggatttcgacttgaagtccagccttattacgatggcacagggtagcccgttctgtggaaagcctaatgaggatgcctatgcacatctgcaatagttcctggagatctgtagcacgtacaccatcaagggcgtcaatctcgatgccgtcaggctgagactgttcctgttctccctcctcgggagagcgaagcagtggttctacaccaaccgtgttgctgtcaacacctgggacaaatgctctacggcattcctctcaaaattcttcccgatgggcaaaatcaatgccctgcgtggacgaatttcaagtttccagcaaacaagggacgagtccattcctgaagcatgggaacgactgcaagagtatggttggaaagtataaagttctctgctcctgttgagtgcacttctctgattactcggatagcaaaagggctaggggtcattagcgaccaaattgcttttatctcagccgctcgtccgcgtattgataaagcttatctagtgcaagggcatattctgaaacgtggagtagatggatctttggtatactttttccccggttgtacaaatggaatcccgttgccaaatgcggggtatcatttgtacaactgccatgaactaaccattcccgtgcagaccatagaggaatctcgtgcaggtggaacatacagagagacgcgcaacatgacaaggaatgaacgagaaagttcatcatcctcgacacccgtgcagatgtatgaggcaggatgggcaccaactggggatgcacccggttggacccaagctccacgccatagcatcggagtctcaacttgggcaagcgccagtgaggatcggtggcatgcgcctcatgacatccaatggggggacaattaacctcccaggtcaagtggtgtgcctccatctccaagtgaatggcgctcgagttcttcccgttgggacttgagtgaaatcattaggagaatggacacccttgatatacagataggggaaatccagtacaacctcacggaacacgtagctcaaacacaagaatggcaacaatctgctgatgctcaattcgccaacatcaacgacatgatgcagcaatagcacgataaccttcaggtgtactttcgttttcaggggttcaatccttatcaaggacgctgagcgaaagccaagcttgggggggggnagncatcgctcccccccactgaggtaacttgtatcacattgcatatttctcttatcaaattacatatttgctttccaattgcatcttataaaaataaaaacaacataaaaatgtgcaaaatagaaaataccaaaaagataggataggtttgagtcatgctaggtaagacaagctagttctccttgttgaaatgatgaatagttgctctgttttatatctctgatatatgggttcttggtaagtgctctctcaaaggttaaatataagtagccaacaattatctgggaacctgaggtaaatgagctgcacttgctgatctgagt

SEQ ID NO: 5257 - DNA, 4224 bp, Oryza sativa
tccgccgtcgccgccgagctccggtccgccgccgtcgtcgcctcggaccacctcccacctcggcgccgctccttcggcttcgccgcatcctcgccgacctcgtccacctctccgtttcggtcgccgaccgccggagcaccatcgaccccgtccacccgagccgcgccgccgccttcctccgctccggtcgccgtttccgtcgtcgccgtcgacccggggtgagccgtggaccgccgcttcgtttccccctttccctcccctctctcggccgccgctccgccgtgcctatggccgccgccggcgactataggggcgcgggtgcgccgcctcccgccggccgcaccgacgtggccgcctccgggcgcgcctagcggctgctgcgtggggcccggctgtcagccgcccgcgccctcgggtgcggctgacgcgtggggcccacggcgccggccggtgtgagccgggtgcacccggtccaccgtggaccgtggggctgccgcgtgggccccactcccgtggacccagtccgcgcgcccctcccctcggctgacgcaataaaccctttttaaaattaaaatttaaatgaagaaattcgcaaatattcatttaaagagcatataaacttcaaatggccatatcttagccatttgaactcggaattggaccgttcaagtctctaatttttccttaagaagtcaagaacctatttttgtgctttctttcagctggttatacggattttattagagtaaaagccttttcttttccgttggtcgtgtagacgctgcagcttcggaagatccgctcttcgtggaagttgaagccgacgtttgggaaagcgagcaaggcaagtcacatcatccttgaacatattgaatcccagtttataaaattattttgatttaaattattgcactattgctttatttaaattcccgcgttatcactgttttatctagccatgcctatttacctttgttatgaccttattattgttaatgttattatttgcttgttcaccctagcataaacaaaacccctactagtggacactctactcatggtaccactagtaggattttaggtagatgcttcgctggttaattaggcaacattaggtggttttacaactctagactgtgggattttctcatcacctggacactatggaatggttggattattgtggaattggattcacaccgccccctctattcaaaatccccaaaatggttttaggctggactcggggtgcatggttttgatagtagcacctcggccatttaaggaccgttcttcgggcctctgttgcaaagcactaccgtacttccacatgtctagtgggtaaggcttagtttgtggctcagtctggttataaacaaaagtacacggatggagatggacgaagtcgggggtcgatggacatctctaggacaaatgaaggctacacgagctgcggcacggtagtcgagatgtcatggcacagggccggtgtcctgctgctaggggctcagtcctgcctacctgtcccgggggttctggccgtaggtggggttgggtcggtactcttgtctatggctaggatgggttggaaactatgtcacgtcttccgtccgtataccgtggtggtatgtggcacgtggctacacgtgaggaagatgtgtcttgtgggtaaagatgtacacctctgatcaaagtataatctattcgaatagccgcgccctcggttatgggcaagccgagcaatgtacccaagttagtgttttaattcttaaaacctgcttaacaactaaaaggtggaacggatggcctgggttggcttgggacgagctgggacccagggtcgggttgccagttcggtctgaatcatcgtaggccttgggttaaggcaggctcgtgtgggttcacggccttgattaataatattatatagctctggaaacgtgtttacaaaatagctttgagcaactaagtgtcttttaatgctgtttactgcaaaccctaaccctttatatcataacccccttgtactcctttacatttatcctgcacttgtgggtgtgtcttgttgagtacagtggttgtactcagtcttgctcaatttttccaaacccagaagaggagtccctggaagatgaaggctttggtgtctagctcgtgcctgccgtcaagcgcctgtggtcgttgccctagtcttccgctgtttctcgtttgtctttgtgtgtgctgggccttcgctgcccatgtaataaattagctatttatgcttccgcttgataaactctgaaatgtatcaacttttggtgtaccttgcctcctgggacaaggaataatacacgcacgtaaggaacgcccgttgagttaattccggtcgtgacatgacttctcaccggctgaaagatataacctgaaaggtatccccttctgtggaggaattaaaactggaggagaactaagatattctttaatgttgtccaaagctttctgttgctctgccccccaggtgaattcttgatcggctttcaatctcaacaatggtgtgaaaggctctatcctgccagataaattagagatgaacccttctaatgaaatttgtcttgctgatcaacttctgcaacttcttcttatccttcggaggttgaatcttcttgattgcattgatactcctttgagttatctcaatccccctttcatgaacaagaaatcccaaaaactggccagccaatacgctaaaagcacactttgtcagatttatcttcaggccatattttctagttctctcaaaaacctacctcaaatcggctatgtggttttctattccctttgacttaacaaccacatcatcaatataaacttcaactaaccagccgattagatcgtggaaaatgtaattcatagccctctgatatgtagctccagcacttttcaagccgaaagtcatcacaacccactcgaacaagccgattgcaccaggacatctgaaagctatcttatgaatatcttcttctgccataaaaatctgattgtaacctgcattgccatccataaaacttaatatcttatgtcctgaagcagcatcagctaactgatcggcaaccggcattgggtactcatcttttggagtagctttgttaaagtccctaaaatcaatgcacaccctgactttgccatttttcttgattactggaactatattggaaaccagcatatcggcatggaggaataaaaccagcatcatataaacgtgtaacctcagccttgactgcctcgagcatatcggctttgcatctccttggcggctactggtatggtctaacccctggtttaataggaagccgatgttcgacgatcgatcggctgagccctggcatctcataatactcccaagcgaagcaatctctatattcttttaaaagctctatcaacttggttctaaattcaggagataaattcttactgatgaatgtcggccttggtgtatcgcctggacctatatcaatttcttccaaatcattggccgacatgaaaccttgtccttgcttgtcatcgagatcatctaccgtgtcctaggtgtagacgtttgaaccctccagacgccctcaaaataataattcgggctctccatcttcaattggctgtacatcacaatcggacacttttagaaaatctccatcccaaacttttccagataggcaatcaataccatccatctcccaaagagctaaatcggcactggcaacgttaactgacctgtcggctggcacgatcttaatcttgtcgccctgccattgaatcaagcattggtgcatggttgagggaatacaacaattagcatgaatccaatctctcccaagcaacaagctataggaacccttcctatcgatgacaaaaaatgttgtagggacggttttgctgccgactgtcagttccacattcaaaactccttttgtttctgatggattgccaccaaagtctttgagaaccatatttgtcttgatgagatcctccgaattccggcccaactttctgaatgtagcatatggcatcaaattcacaacggccccaccatcgaccattatcttagacaacggcatcccattgacatagccattaatatacaatggtttaagatgccgattctctttcccctctggtttctaaaaaacagcttattctggtgacaaaaccaatttagcagaggcttcctcaacttcatcaacatcgact

SEQ ID NO: 5258 - DNA, 17917 bp, Oryza sativa
tgacacacgggatctgcttctgtcgacccgtggaccgtctctgtgtacccggtccaccgtggtcccttaggttggcatgtggagtccgcatgtcaacagcgcagccttcctgtcttttccaggctagcgcttacacatgttttatagttgtaaaacctaattataataatccgcaaatctccatataacagcattaaacttcggatgaccatgccttggtcatacgaaccccgaatcgacccgttcaagtctcctaatgtttgttataacataaagaaccctgtgctttctttttatgtattgttattacttctttataggcttgtagctttgcttgtgtgcttcgcgtagcttctgtcgttctggaggttctcgaagcgtggttcgcggtcgtcgccgaaggttcggaaggccattctctctgagcaaggcaagtcacatcatccttgagcatattgaatcccagtttataaaattattttgatttaaattaatgcattatcactttatttaaattcccgcgttatcactgttttatttagccatgcctatttacctttgttatgaccttattattattgctatcgttattattaccttgttcacccttggaaaatgaaaccccaactagtgggtactctattcatggttccactagtatgaatttagggagatgcttcgctgattaattagacaacattaggtggttttataactttagactttgggaattctcatatcacttggatactatggaatggttggcttatgttggaattggacacacacctccccctctattcaaaacccccaaaatggttttaggctgggctcgaggtgcgtggttgggttttgttagtcgtacctcgggtactataaggattaagctcgggcctctattgcaaagcactaccgtacttccacatgtccagtgggtaaggcttagtttgtggctcagactggttataaacaaaagtacacggatggaggtggacgaagtcgggggtcgatggacatctctaggacaaatgaaggctacacgagctgtggcccggtagtcgagatgtcatggcacagggctggtgttctgctgctaggggctcaatcctgcctgcctgtcccggtggttccggccgtaggcggggctgggtcggtactcttgtttatggctaggatgggttgggaactatgtcacgtcttccgtccgtatgccgtggtggtatgtagcacgtggttacacgtgaggaagatgtgtcttgtgggtaaagatgtacacctctgatcagagtataatctattcgaatagccgcgccatcggttatgggcaagcctagcaatgtacccaagttagtgttttaattcttaaaacctgcttaacaactaaaatgtggaatggttggcctgggttggcttgggacgagctgagacccagggtcgggttgccagttcggtctgaatcatcgtaggccttgggttaaggcaggttcgtgagggttcacggtcttgattaataatactgtgtagctctgggatcgtctttttaaaatggctttgggcaactaagtgacttttaaatgctgtttactgcaaaacttaacccctatattattaccccttgtacccccttgcattaatcatgcatctgccggtgttgcttgctgagtactgtggttatactcattcttgctctatctctcccccctttagtaagagaagctttggagaagaagtcttaggtggagtcctggcttataccctagttgagcgcctgtgaagatggagccgtaggcccgctagtccgctgctgtttattttttgttgtcaggcctgaagtgcctttgtaataatgtaaatattatcgatataataaagatgtgccttttgtatcatgtttgtttggtgtaccccggcttttcctgggacggggattaatacactagcgttcgggaaaatgcaaattttctcggtcgcgacatttattttccgcacttaacaattgcgaaattacccgagtagtaaattctaattcgtgaaactttgttccattaatgacgaactcatgtcactcatatgcatgtttgggaagtgcctaggccgactcccggtgcttgtgggctatgactagtcgggcagagtgtttaaatgtaaggagtcatctgctcggggaaatcaaaattgacaaaaggagaaatacgtatttataaatattttaaaaatacttgaattttcttcgagtattatatttacatcagatactactcatcctatatttttgttctacaggatccagatccagatatgcataaaagggattcatggctttaagcttatctcttacgcttcaggaattgatcagtcagaacatcaccaccggcttgccgtcatcgccgccgactggtgtcctcgcctttacggttgggtggtcaccccgccgttgctgggcatcgttgtcttcaccgaccggctgcttcatctgccgccgactggtgtctctgcctatacggttggttggtcacaccaccattgttaggcatatacgtcttcaccaccggcttgccttcgccgccgacgactggtgtctccgcctgcacggctggcctattatgccgccgttgttgggcgtctacgtctccaccaccggcttgccttcgtcgctgacgacaagtgtctccgcctgcacggctggcgtattatgccgtcgttgttgggcgtctacgtcttcaccaccggcttgcctttgccgtcgacgactggtgtctccgcctgcacggctggcttattatgccgccgttgatgggcgtcttcatctcaaccaccggcttgccttccccgccgacgactggtgtctccgcctgcacggctagcgtattatgccgtcgttgttgagcgtctacgtcttcaccaccggcttgtctttgccgccgatgactcgtgtcttcacctacacggctggcctattatgccgccgttgttgggcatctacgtcttcacgaccggcttgccttcgctgccgccgactggtgtctccgcctacacggctggcctattctgccgccgttgttgggcgtcttcgtcttcatcgaccggcttgccttcgccgccgccgactggtgtctccgcctacacggctggcctattatgccgccgttgttgggcgtcttcgtcttcaccgaccggcttgccttcgccgccgccgactggtgtcttcgcctacacggctggcctattatgccgtcgttattgggcgtctatgtcgtcaccgccagctgccttcgctgtcgacgactggtatctccgcctgcaccgctggcctattatgacgccgttgttggatgcctacatcttcaccgaccggccacctcgtatgatgccagctggcgctatcgtcttcacggctggccatgtcgccgccaccgctaataggcatcagcatcttcaacgcgtatgacgccagctggcgctatcatcttcacttccatggctgcatgattctgccagtgttgattggccttatcgtcttcaccgctggtcatctcgtctgctcctgactagtgccgtcgcctctacggctggtttatactgctaccactactgatagacgtcatcgtcttcattgctggccgccttgtcagacgccgactggcttattcgcctccacagctacgtgtcttcgtcaacattgactggagtcatcgtcattaccagtttgcctttgccgccgcccatggtgtcccgactctatgttcagttgtttctcaactaaccaaagagtcgggggctacataaatacaagactcaaaattcgacagatattatgtcaacatgaaggaatcaattaaccagccaatgagtcattatcttcatcttcgcttaagagcaagctttttacttcatcaactccaattatttcaccggcaattttggcttctccgtcatcgccacgatctacttcaaatttctcaaatatcaagtttgagatataatttacatgtccgggagttcagagttattaaccaatcagctcagtttcgacgagttggacaacaacatctactttcctccaagtagagcatgtgcaacaactataacaccaagttctactgacatctttataaatcaaggatcgttgcatcagtcttcgttatgcacacgctcgcatcaaggaaattactcgagcttcgatatcttctcaacagtttgatggattattatcattgacatcatcatcagcacctctacttcatcggctttgacatctctgccgttgctaatggatgactacgtcttcgcctccggttgcttccgtcattgccgacttgttatttcgccttcacaattgacctactatgcaaacgctgatgagcgtcttcgtcattatcatcggttgctatgctgctattgactggatcatcgacatcgtcatcttcatcaacatcctgtcaagcctcttcaacatagcctactctgctgctgtttgatgggcaacttcgtcatcatagtcgatcatctatgattgctgcttatcatcattactgtcggttgcatttgtcgtcgccgactattttcttcatcttcatgattggtggatttcgtcatcgcctttgatgcgtgtctacatcttcaccgtcggcttgctttcgtcaccaccgaccggtatcctcgccttcacggatggctaattatgtcaccactaatgggcgccttcatctccattgctggctgacctgactgctgccgactggtttcttcgcctccacggctatgcgacttcatcacctttgattggtgtcactgtttttactaccactgacatcttccatcacctctgatgagcaatatcatcgtcatgttggtcatttcatctccatgccgactgcatcagctacaatcaatggacaattgtgactacgacggaaagataagctacatgcataggggctcatcaactcaagcgcgaggattatatcttcaatttggactttttccagatacattcagcttgaatttatggtcatgagtcgatttcttatgctcaacgactggattattcattattccccgtaagggctatcaaccgaatacttgcgccagtcgggattcaatttttatatctattttggagtatcccataagggataatcactcagatcagaagctattgatatgagctacacttggtctgtatcacccggaagatttattactcgggagcatgttacatgcgtcatcctttaaagggagtcgaagacatatttttttggcctaggtctaatatgtctgcagcccatattttcaggtgtggcctgtcacgttcttttagggacttaggcactttttgcttaggccaaagtgcgtgtgatcaagtgcccaataccttaaaatccttttataccgcagtcactcaactttttacgagttggtacaatgtatcttaaaaggtgtcaaacagtaaagctttatatagctgccccgttgacttttttatataagtcaaagtgttgtttgggtttttaagcaattgattgaatacaatatcgttactttttgccacgtaagtgtgcatttttattgaccaatattatggcttaggctgattatatatcttggtcattttctaggtggttggtaaatcttttatgagtttatttactcggatgttagtacatatgccatatatttccaggtgtgtaccatgtctcttttagggacttaagcacatctgttaaagcagtgtgcgcatggtgtatgcccaatactttgaaatttctttattcacagcattcaagcttttttatagctgttttgctatgtgaattttcaatgatgtagtcaactttaggttgctcgcatctatgtttacaaagcagtcggtatatcacttggttcatgttatttggtggattcactccatatatgctatatattgatatcaagtcacttggttgactataattatcgagaaccactcagttggttcgattatttattccttgactatatgcttggtttgtttaactaaccacatagtcggaggctacacctattaggtgcatctagtcaatgcacctaagtttacatttcattattttcagccctccccagtcttcaaatttgataaaagtactcggaagaccatggcaaagatgattgaagcactcggctttagagtaatctggttcgagagaagattatcttttcgactgtgaaggtctcaggggctactgtggagataatgggtaccccatacccacactgcatggttatctgactagttataggagataactaatatctatgaaatatgtaacggatcatgacttgggtattacgtttccttgtgtattatggaacggcctaaagtcctggtttgataatattgtaaagtagatttaggaaaccgataccgtattggttaaggtttctatcttgtaatcctgccccccatcctatataaggtgggcaggaggccctctagggggcatgagacaactagatcgtcagatctataatacacccggcggattcaaatccccaaacaggagtagggtattacctctcatcgagaggacctgaacctgtctaaatccttgtctctgcatccatccacttttaggtctcgtgcgctacccccttttattattgccgaattcatgtttcgacatacatcatgcctctgcctaattgctattaaatcggacaatttcatctcatgaataccactgtagaaataactgtgaaactacttctccaaatcggcccaactattgacagagttgtacggcaaaaaagaaaaccaagtaaaagccgatccgaataaagacaaaggaaataacctaactctcaaggcatcaacagctgatgcttctccacattgagctaagaatcgggtgacatgttcataagtggaaacattatcttgccctgaaaattttgagaaatctggcaccttgtacctagcaggaaatgcaactctttcgaaccactcaggatacggatgcatatacaagttcccagtgtcctttggcttgagcccgaactgttccctcatcacatctgcaatcatatcggcccaaggtctctgctgaggtaccccttgtgtatgctgctgtatcggctcgaactgattgaattgaggagcatactgaggctgagttgaccccccttggtggacatgaggtgatggaggctggtaattataattcaagtaacccccgtggtaattttgggtattcggttgaatatttgttaacgaccaaatttggtaacctaaagtatcgaagatgaagatcagatcgaagcggaatccaagaccaagattgtttcggcaacagagtaaggatcgactgaagtccaaatcggctacaatcgggatcggcagagtccgagttggacaaggttagccgatcaagccgaatccgacaattgtatctattaattaggatatttcatggaatttccttagagatatgtttgggcaaaagtctgctgcaaagacttatagtatcttagagtttgttagagacaagagtcgtgtccgacatggacatattttgtaatcttgggtataaatagaccccaagccccatgtaatcaaactaacacacgttcaatacaatcttggcacatcgccacccttttactttcactttgtttcgacgagttcttgctttcggattgagctgcattggtttcgatcttcaactagaggtaaaacttagtatggcggcttgtgttctcgggattagtgcttccatctttatgataccctaatcttgtctatgtaattcgtcgagttattatatattctatataatccacgacaatatcgttatttaacctacaatgggctaacatctatcatcggaaggaagccgattaggttaaatagcaacgttggcttcgattgtataggatatccaccaccctatgaaacatccagcggcttgattgtctagatattattcttcttttcatacttagtgctgtatcagttaagtttgatctactaagtcgtgcttagaatattaatctctagcctgctttctagttgcccattagagtagtatcggagtttcagccgatcttacctgatttaactacttttacgttacatgattgattaacatgttaaatccgccctttacattaagatcttgttgtaattagatatgttaggcttctgtttgacgtattttacttgctttaatatcttaatatagagtggtatcggagtattagccgatacatgctagatctatctgatcggctatgttataaacatatataatccggttgttaatatatatttcgatctaagtgatttatactgtctcggcaaggcaaccgatttatcccaatcacttgatttaaatttatatcgatataaggattatatgttgttaacaactgtagccgatcgagtaaatttagttctttattacttattcacgattatcgatcgatccatatatgacatcggttcaaagataaatgatatgtcatcggcaattagccgatcggctatcatttatggatttaaccgcggtttccctgtctttatttcttgttgattgcaggatcaaatcaactggcacgatcacgaacctaaaggcaagcttttggacctgcactggagttaagcagatctcccaggcctcgtgtttttacatcaacacgcttttggcacgcccggtgggacagagtttttagcaacattctctcatggctgagaaaccaccaccatcaccgtcttcggctggtaaaggatttcctcctaagactgataatcaaaagtttggtgcatctaaagttaatgagggaaatattgttcccatcaatttaggtaaactgacaccggaacaaaagacagagctcgaacagatgatgcagcaaacacaacaccagttcttaaactcgttcatggagacccgtaagggaacagttgttcagaagtacaaaatcaaattagtaactgatgttcctgggatagattcttctaaggatggagaagtgcaacaagccccggctggtacagctgaaacgggaaaccaaggcattccagagggctcaggagataaaggtgacggcacctagggggtacaagttgaggatcttggtccagatggcaattcgacacaattacagttcaataatttcaaagattggattgactatgctgtgcaacatgctttgatcaaccaatctggagtgttagtcaatactttatcaaatatggtgaagtcaatggttgatggttcgatagctgagtatcaagccacagtaccagtttatttagcaggaggtgttttcccaaactattggcctttgattacagataatcagccagctacttctaatgtaccaccagttcagccgactgcgccgatattagctcctgcatttgctgcaccagcatcggcaccagggcaattgatcaatcctcggttgttggtgagagagcagccgcaacacgctggtcagaatgttaatcggctgacccaagaataggtcactgctatgtttttaccaactcagcctaccgttgatccagcacagcaccaaccgattcagcagacgccatcgaggcaacaggttatccagccgattcaacagacaccaccaaggcaacaggctattcagccgattcagcagcaaggttcgctgaatgcatcggctgggttgatgacgcctggtaatcagccaaggcagcatgtcatgactcaagttgtccctgagaatttggttcataatgtgcaaccagatcaatcagtgatacctcaagtcgttcctgaacatttggtatgcaacatacagccgaactttcagaattatcaagggggcaatttgaattaccaatatcagccaccatcgccacaagtttagtatcagcaagggggtcagctcagcctcaattcgctccttagatcaatcaattcaagcccatgccgcaacaagtgcaaggagtacctcagccaagaccatgggttgatatgattgcagatgtaatgagagagcagtttgggcttaagccgaaggatgctggaaatttgtatcggcatccataccatgagtggtttgagagagttcaattgcctaatcgatacaaagttccggatttttcaaagttcttgggggcaggacagtgtttcaacctatgaacacgtcagccgattattagctcaatgtggcgaggcatcggctactgacgccctgagggttagattgtttcctttgtctttatctggatcggctttcacatgattttcttctttgccatacaattcgatcaacagttgggccgatttggagaagtaattccatagttacttttatagtggggttcatgagatgaaattgtctgatttgacaacaatcaagcaaaggcacgatgaatgtcacagcctgaatttcgtttcaggatttataaattatttaataaattattaatagaatttatattaaatgtttattaatttacaagtgaagttaaatgtgggaaataaaatttccttaatttaaaacatggatggatttaatttgtattaaattctccatgattaattatactctctgaaattttctcggaattttcggagctcaattcctaatgttaataatacaaagaacagtttagcaattatttaaataataaattaatcattaaatgatctggatattattatattaaatactttgagtgtccaagtatgttcaagatttttcttggaattatttgagcattgaaagtatttttaacaattgaaagatcatctcattggttaatttatttggaaaagtaataaaaatcctcctcctcagcctgggccgaattcagctcattccctcccttcctctcagcccggccgagagtctgttttacctccccctcgctacagtactccatcttcctcctccagccgactgtctcccgtgccgtgcacagtgccgccgattcccttccaaaatccggccacctcattgctcctctcaatctcctcttccttttccccaagaaatccccaaatgtttctatggaaatcctttccaatttcgcggttcaacctttcctttttccagcgaagatctaaactttcccgagtttagatcccggcctcccatggctatataaaggaccccctagtcgtcctctccctatcccctcaagtcccgtccgccgtcgtcgccggaatcgctctccccgcgctctccctctctctccacctccggccgccgctccagccgccattcgccgtcgccccggccgtcgccggtcagcaccgccacctccctcggcttcgcagtgaagatctctaccccggccacccgttcttttgcgccgaaccccgccggaagtcgccgtcaccgtgaaggccgaaccgttgccatgttttgatctccggcgaagctttgccgtcgactccgtggtcgccggacctcgccgtatccactgtcggcatcgcagcagtgaggagaagcccggcagccatctccccgaagccgaaatccatcggagcaccgtcgtcaccgtgaagccgatctgttccatcttcagtcgcgccgttcgtcgtcgtccgtcgtcgccctcggtcgccgtcgactccattgggttcgcaggagcaaggtgaagcccggccatcggtttttcttcgccgaagatcgctgaaacgtcgccgccgtggacagtacctcgccgcccttcgaagctcgtcgtcggccatcttccgtcgctgtccgtcgttgcgtaagtgttggtaagaatcgccgtcgccttctctacctcacggtgccctccgtttgcattattgtgccatggttcgccggcaaccgccactcctatgccgttcacctatgaggttttccctagggccttaatccgatctaacctaatccgctgtctgtctagcgtagtagtcgtctccgtgtgttgccgccgggtagccatcatcatctctccctctccgatcattttggttcggtgagacttctatccatgttccctcggtttagtttttaatctctcgtttttgtcatcgagtagccgtcgccgtgccacgcttagctgctgccctagcgtcgccgctgcgctagccgcctagccgtcgctgtgccgtcatcctaaccctagccgcgtgtctccgccaagtcgccgctgcctagccgagccaagtcgccctagtgccgccgtgtcgcagctatgtgccgctttaacccagccgccgctttagccgttgctcggtagcgaagttgtctagccataggtgcatccctaaattcctatcggcctatcgtttgccgtaccggggctttaccgtgaatcgtgtctagcctaccggtttagtcgcagctgttgttgagtcgttcactcgttcgttcaaatgaggtgttccccgtgcttcgttcgttcgtccgtgtggagctgttcagagccgccagtttcgttcaccggtttcggttgatcatttcggtgatcccgtgtcacgtagaattgacttgttgagtcgatatctcgtgaggctcgcttgccagatcaatctaagccatccgatcttggtcaactctcggtcaagattaatcttagccgtccaaaattgatataaatccgttctctcttttcaatgacatattattcctttttaatatatgtcatctaccaaatatgatctaatctttttccggaggatgttttaatcttctgtctcagctataaatcatttgtaaattgtttaatcaatttggaatagtcttttctttaataggtttaattggaattaaatcttgtaaaattcgtaactaattcatacgaaatcggaatgagaccattcaagtctctaaatttatctaaaatcataatctacatgtttgtttactttatatgaattgtttatttggtttttattagtctttttcctcgttttgcgtgatagcttgtcgtttccgtcgttgcgaaggttcgtgagtgcgtcggaagtgttcaagaagactaattgaagaccgattattgcaaggcaagtcacacagatcccaaacacaattcctttgagtatgttgatcctatatttaaattctttatttatttcaactgtgcatttattttcgaacgtcatcgggtggtgtgaacttattcctttgttatggccaatttgcattgattaccttatttcttgattacctcaggttataatttgactagttggatttatatattggttcagctagatgttagacataattgcttagccatgcttagagacattagctcatataaatgggataacgtatgattcaccattatttaatgatggcttaatgatagctcacgatggtcaatcgtgattggttaattaattacttgccaattaaaacttgataatggtgggttgtgagcacatggttttgatggtcgtgctcatgacaattaaggaccggttcacgagtttcggttgtgaaacattgtcacgtcccaaaacgactctaaaatacatcctctaaattatgcctagaataattaaaatccgtgtgaaagcctccaaaaattaaaatgtgcaaagttaaaagtcaaataaggcttggaggatttttgtatatttcctaaaagcctaaaatgcgtaaataaattttagtggaattttcagagcacaaataataattattaagaaataaacaaagttaaaaaggttttataaaaagaaaaaccctaaaagtcccccttccctcccttgggccggcccggcccatctctcttccccccctctctctctcctctccccacggcccactcggcccctccccgcgcgcgcgtcgctgacgggcgggcccgcccgccaccctcgctgacgggtggggcccacccgtcatccccgtcctcccgccgctcccgccgctccgcccgcgccaagcgccgccgccgccgccaaatccgccgcatcccgccgtccccgcgtgcaataaagtgggggaaatcactccccgtgatcccctctccctttccccccattttcccctctctctcttgcgttcaaacgggcggatttgcccccgcaaatctcgccggcgccatcgatggcggccgaccccccgcgccggtttccttcccttccggccgctctctcccccttccaaccctatttaaaccctccccgcacctcctccgtccgtttccgcctctcgccgcccatcctcctcgccggattcgagctcgcgacgtcgctctctctctctccgccatcgccgccgagctccggtccgccgccgtcgtcgccccggaccgcctccgacctcggcgccgcctccttcgggttcgccgcatcctcgccaacctcgtccacctctccgtttcggtcgccaaccgccagaacgccgtcgaccccgtcgactcgagccacgccaccgcctccctccgctccggccgcctcctccgtcgccaccattgccccggggtgagccatggaccgtcgcctcctttcccccttccctcccctctctcggccgctgctccgccgcgccggtggtcgccggcggcggccatcggggcgcgggcgcgccgtctcccgccgaccgtgccggcacggccaccctcgggcgcgccgagtggctgccgcgtggggcccggccgtcagccgcccgcgcccttgggtgcggctgacgcgtgggacccacggcgccggccggtgtgagcccgggtgcacccggtccaccgtggaccgtgaggctgccgcgtgggccccactctcgtggacccggtccgcgcgccccctcccctcggctgacgcaataaaccctttttaaattaaattttaaatgaagaaattcgcaaatattcatttaaagagcatataaacttcaaatggccgtaacttggccatttgaactcggaattggaccgttcatgtctctaatttttccttaagaagtcaagaacccatttttgtgctttgttcctgctttttatatggagtttattatagtaaaagccttttcttttccattggtcgtgtagacgctgcagcttcggaagatccgctcttcgtggaggttgaagccgacgtttggaaaagcgagcaaggcaagtcacatcatccttgaacatattgaatcccagtttataaaattattttgatttaaattattgcattatcgctttatttaaattcccgcgttatcactgttttatctagccatgcctatttacctttgttatgaccttattattgttattgttattattaccttgttcaccctagaataaacaaaaccccaactagtggacactctactcatggtaccactagtatgattttaggtagatgcttcgctggttaattaggcaacattaggtggttttacaactctagactttgggaatattctcaacacctggacactatgggatggttggattattatggaattggattcacacctccccctctattcaaaaccctcaaaatggttttagggtgggctcggggtgcatggttttgatagtagcacctcggccatataaggaccggtcttcgggcctctgttgcaaagcactaccgtacttccacatgtctagtgggtaaggcttagtttgtggctcagtctggttataaacaaaagtacacggatggagatggacgctgccgggggtcgatggacatctctagggcaaatgaagcctacacgagctgcggccgggtagtcgagatgtcatggcacagggccggtgtcctgctgctaggggctcagtcctgcctacctgtcccgggggttccggccgtaggtggggttgggtcggtactcttgtctatggctaggatgggttggaaactatgtcacgtcttccgtccgtatatcgtggtggtatgtggcacgtggttacacgtgaggaagatgtgtcttgtgggtaaagatgtacacctctaatcaaagaataatctattcgaatagtcgcgccctcggttatgggcaagccgagcaatgtacccaagttagtgttttaattcttaaaacctgcttaacaactaaaatgtggaatggttggcctgggttcgcttgggacgagctgggacccagggtcgggttgccagttcggtctgaatcatcgtaggccttgggttaaggcaggttcgtgtgggttcacggccttgattaataatattgtatagctctagaatcgtgtttacaaaatagctttgagcaactaagtgtcttttaatgctgtttactgcaaaccctaaccctttatattattacccccttgtactcccctgcatttattctgcacttatgggtgtgtcttgttgagtacggtggttgtactcagtcttgctcaatttttcccaaacccagaagaggagcccctagaagatgaaggctttggtgtctagctcgtgcctgccatcaagcgcctgtggtcgtcgccctagtcttccgctgtttttcgtttgtcttcttgtgtgctgggtcttcgccgcccatgtaataaattaattaattatgcttccgcttgttaaactctgaattgtatcaacttttggtgtaccttgcctcctgggacaaggaataatgcacgcacgtaaggaacgcccattgggttatttccggtcgtgacaaacattaaccgtgccaaccacaagccagcgtgggcaacggctttaccttttgtatagtatggttcattgcggagcaccagactgagaagtggccgagataagcccacgggggtcgctggggagtccatgccttgttttctaagggggtgattatgatccaggaacggtgcactgtggtgaattgtgttgtgcgaggggtactgtcacagctcctttccgaggtaccgtgatggtattgaggcgcatggtgacaagtcgtggggctgtgtcttgtgggtacagtggtacacctctggccagagtaaaactattcgaatagccgtgcccgcggttatgggcgggtctaacaatgtctttcgtgattagtctcacacttctcaccataataaatgatgctataactggtaataatttgattagctcctggtttggaatagtacattcctggtttggagataggtctgtgcagccgggtatggttgttcaggatggttgggcctgatcagcatgggtgatgctgttcagtgttgattaatattgatgattaattactctactgttttgcaattcttaaatgtttgctaaatgctgcttttgcaaatgagccctatattatgccatcctttggtatccttgtgcagttgcatatttgctgtgtggcttgctgagtatgtcatatgctcaccttgcaataatcaatcaaactcagttgaagacaagttgcgaaggagaagacgtttggcttatccccatttgagctgcctgtgggagtggagtcggagcttcgctagattttattttccgctgcagttttcttcatggtgaggacaaagtgcctcttaagtaagtatttatcgttttagttaatttgatgaatctgtatattaaattgtcagtttgtgtacctcggttgattcctggacaaggattttatgcacaaataagttcggaaattactagtgaatttctgggcgtgacaatgaacctgtgcaagattatattcagaggttcaagaagatgacgaacaggtgctacagcttgagtttgaccgatgttctgctagccgatttagccttttagggtctgatagcttcgatcagggagaagttctcatctcatgactttgatactttattacatcttgcacaaaaagtgactttacatgaacagaggtttgcggaagccaggaagaacttcaaaaagattaatcatgtctgtccttatatctatgggtccaacgatgatgatgatattgactccgaagtagcagcagccgagtgggttagaagtaagaaggttataccgtgccaatgggtgaaaaa

SEQ ID NO: 5259 - DNA, 12393 bp, Oryza sativa
gcccccgcaaatctgcgccggcgccattgatggcgaccagacctcccgcgcccgtttccttcctccccggccactctctcccccttccaaccctatttaaaccctccccgcacctcctccgttcgtttccgcctctcgccgcccttcctcctcgccggattcgagctcgcgacgtcgctctctctctccgtcatcgccgccgagctccggtccgccgccgtcgtcgccccggaccgcctcccacctcggcgccgcctccttcggcttcgccgcatcctcgccgacctcgtccacctctccgtttcggtcaccgaccgccggagcaccgccgtccccgtcgacccgagctgcgccaccgcctccctccgctccggccacctcctccgtcgccgccgtcgccccggggtgagccgtggaccgtcgcatcctttcccccttccctcccctctctcagccgccgctccgccacgccgatggtcgctggcagcgaccatcggggcgtgggcgcgccgcctcccgccgaccgcgtgtcacgtcctgataaattcatcccgaaataaaaatcattttctaaaaggaataatagaattaattaaaattcgaaaagaaattgacaaacactaaaatacgtgccagaaaaattcgaatgtggtccgaagaattttttgttaaattctacttggtctaaaaggagccctcaaattttacttgaattttcagagcaccgaaaatatttattaaacaacaacaacaattatcagagtttactcaaaagaaaaactaaaaataaatcctccttcctcctttgggctaagcccagcccaaagtctccctctcctcccctctctttccctcctctcccgggccttctcctcctcctcctggcccacctcttccctccccctccggcccaactccctcccctcccctctctctcccgggccttccctccctccactcctcctgggccggccgccggcccaagccgcgcccaagccaggccgagccgagccagccgtgcacatgcgcgccgcgcgtgcgctgaccgcgcgcccgacctcgtggggcccacgcgccgatcgtctccttcctcccgcctggctcctctctctcccgtgaaaccctagctcgctccctcctccaaatccgcctcattcaaaccggggattccaaaattaagtggggggttttaatccccattgattcctcttcaattccccccaatttcccccttgaatgccgcccccaatcgccgggaacgaacacgccaactccggccaccttccatggccgccggccgtgtttcccgtcgccgttccgccctctcccgtgcccggctccctcccccatcctataaaatggaatccccatcctccgttctatcgttttagcctcatcccgagcctccccgtggtcgtatcacctctccccgccgtcgcccttctcttttccccgcaccggccgcctccagccgcctctccctcctcgcccgagcgccatccggccgtgccgtcgcctcctccagcgtcgcagccacctcctctccaccggcctgccctccgtttcacgcggtgaccgccggaggcgcgttcccgccgttgtccagtggcattgccaccactgtaccacctccagccgcccctgccgcgccgctcaggtgcgtgccggccgcgccgtctcctccttcggcgtcgccgcgtcgacctccaccccggcctgctctctgattcgtccggagaccgccgtcgccgcgccggcctctccatcctcttcgtcgccggcgtcctttcggccgccccttcctcctccccggctcgtcggctcgctgcgccaccaccacccccggcattgcagcggcaaggtcgccctcggcctcgcctcccctttgtccaaacccctccgcgatccatcgtcgtcgtctccgttcgttctcgtcgtcgacgtcccgtcgatcgcccggctcgtcgtctggctgcgctgccaccgtcgtgggcatcgctgcagcgtgtcccacgccgtcctcacctccgtgcagctgctgccggctgccctcgtcgcctccctgtcggtcgtcgtcttcctccttcctcctcattgtggcgttcgtccctccgtcaagccgatcgcgttcgccgcccgcgtttcgtcaagtgtgcagcagccccgtcatggtcctcgtcctcggctccgcgtcgtcaagccttgtgccagccgcgtctcgccttcgtccaaggatcgccgctgaagtcgtcccctcgccgttcgtctccgtcgttcccggccgtctccgccgtgcccgttcgtcgttgtcgttccctcgcctcgtcgcgtggtggtaaggatctctccttcgctgccccgtcctcgtcctttcggtgtcgtccgtgcccgttgtgcggttgtcgaccccggtacccgtgtgccggtgtcgatagtcgttcgctggtgcgtgtggtgaccgtgttagtgtgcccgctcggtagccgcgtggtttcgacgtgtgcaggccgtgtggtgtctagtggaatccgtttgtcggccactcgcctcggttgacacacgggatccgcttccgtcgacccgtggaccgtctctgtgtacccggtctgccgtggtcccttaggttgacatgtggggtccgcatgtcaacagcgcagccttcctgtcttttccaggctagcgcttgcacatgttttatagttgcaaagcttaattataataatccgcaaatctccatataacagcattaaacttcggatgatcatatcttggtcatacgaactctgaatcgacccgttcaagtctcctaatgtttgttataacctaaagaaccgtgtgctttctttttatgtattgttattgcttctttataggcttgtagctttgcttgtgtgcttcgcgtagcttctgtccttccggaggttctcgaagcgtggtttgcgatcatcgccgaaggttcggaaggccattctctctgagcaaggcaagtcacatcatccttgagcatattgaatcccagtttataaaattattttgatttaaattaatgcattaccgctttatttaaattcccgcgttatcactgttttatttagccatgcctatttacctttgttaagacattattattgctattgttattattaccttgttcaccctagaataaacaaaaccccaactagtgggtactctattcatggttccactagtatgaatttaggtagatgcttcgctgattaataggacaacattaggtggtttttataactttagactttgggaatattcatatctcttggatactatggaatggttggcttatggtggaattggacatacccctctcttcctctttcaaagcccctaaaacctgtttttcggtggggtttgggtgcatgccagttgtgggaagtagcaccccgaccaatataaggactaagctcgggcctctgttgcaaagcactaccgtacttccacatgtctagtgggtaaggcttagtttgtggctcagtctggttataaacaaaagtacacggatggagatggacgaagtcgggggtcgatggacatctctaggacaaatgaaggctacacgagctgcggcccggtagtcgagatgtcatggcacagggccggtgtcctgctgctgggggctcagtcctgcctacctgtcccgggggttccggccgtaggtggggttgggtcggtactcttgtttatggctaggatgggttgggaactatgtcacgtcttccgtccgtataccgtggtggtatgtggcacgtggttacacgtgaggaagatgtgtcttgtgggtaaagatgtacacctctgatcagagtataatctattcgaatagccgcgccctcggttatgggcaagccgagcaatgtacccaagttagtgttttaattcttaaaatttgcttaacaattaaaatgtggaatggttggcctgggttggcttgggacgagctgggacccagggtcgggttgccaattcggtctgaatcatcgtaggccttgtgttaaggcaggttcgtgtgggttcacggccttgattaataatactgtgtaactctaggatcgtctttataaaatggctttgggcaactaagtgacttttaaatgctgttttctgcaaaacttaacccctatatcattaccccttgtacccccttgcattaatcatgcatccgccggtgtggcttgttgagtactgtggttgtactcattcttgctctatctttctcccccctccagtaagagaagcttttgagaagaggtcttaggtggagtcctggcttataccccagttgagcgcctgtgaagatggagccataggcccgctagtccgctgctgtttatttttgattgtcaggccttaagtgcctttgtaataacgtaaatattatcgaccctatattatggctcccttgtactcccttgcatttattctgcacttatgggtgtgtcttgttgagtacggtggttgtactcagtcttgctcaatttttcccaaacccagaagaggagttcctggaagatgaaggctttggtgtctagctcgtgcctgccgtcaagcgcctttggtcgtcgccctagtcttcgctgtttttcgtttgttttcttgtgtgctgggccttcgccgcccatgtaataaattaactatttacgcttccgcttgataaactctgaaatgtatcaacttttggtgtaccttgcctcctgggacaaggaataatacacgcacgtaaggaacgcccgttgggttatttccggtcgtgacacagccggaggagaggacgacgctgcgacgtcgacggaggagacagcgacgtcggtcggtgctcgggcacggcggaaggggctgccggaggtggtgcagtggcagcaacgccactgtttaccggcgaggacgcgtctccgatggtttccccacgaaacagaggcgacgtcggggaagaggatgcacctgcgaggccgagggtggcgacggcgcaaccggacggtgcacggtcgtggtgggaggtgcggctggaggtcggccggcaccggagagagagaaggagaaggcggggagaggcggggcggccacgggagagcgcgggagggggctaaaacaggagaacggaccgagggggttccattttagagatgaggggagggagccgaccatggcggaggtcggaacggaggtgggaatggcggccggcggccatggaaagcggcagggtttggcgcgtccgttctcggcgattgggggcacgaatcaagggggaaaacaggggaaatcaaagagaaatcaatggggattaaaaccccctaataatttggaaagagccggcttgaatggggtggatttggaggaggaatctgcgctagggtgttatgagttgtgtttgctgtagcttgtcagctgttgccgttccctgtattgagtgtaacagtgtgttggggcctggcttgttgtgggctgtggactgggtgtgtgtgtgtgcttttgacgtgccgtgctgggctggcggtcgcgtcgagtgcgtgtgccttgtacccgttaaaagggaaactccctgccgatgagcaagtatcgatgagaagaaatcaaatacaatcgaactacctctctctctctctctctctctctctcaggtcatccccttcctctctaattcaatccaaatcccctagcgaattctggattagcttggcgtgacgccggtggagtctaggagttcgtcacaatctgattccgctggcgatgaagaaggggccaaatctcacggagaggatggttgctgtgaaggcagagctcgtcgatctgaatcagcgagttggggagctcgcaagcaacctcaacgacctcctggggtcactgaccaagctggagacgtggattccatcggtggacacggggatccaagctctgaacaaggccgtggaaggaattgccgcaagggtgacggttctggagaactcacctgcagcggcatcggggatgacgaccccaacgcccatcgggcacggcgaaaccgagaatcaccagggagacgaatccaaagccctcgcggctcaggatcgattcctggtcaagggtaagtcccgattccctaactctcccatcacttttgatataggagagtcttcagttcagaatcaatccagcaatagattccatggtcctaggcttccaaagtctgatttcccaaagtttgatggtgacaatcctaagctctggaagaagaactctgaaaagtattttgaaatgtatcaagtgtcttatgaaaattgggcaaaattttctaccctccactttgtaggaaatgctgccttgcggctccaaacaaatgaggccctccatagtgttgaaacttggcctgaactctgtatagcagtgcatagcaaatttggccaggacaaatatcaggaacatttagaagagttagaagggcttaggctaattgttggtgttgaggagtattataccaagtttgaggaattaatgcatagggacagtttataatcaggcctatgatgaaacctattttgtcacaaagtttgttgggggtctaaaaactgaaatcaaagcagctatcaagctgcataggcccaggactgttgatacggctttatctcttgccaaaacgcaggaggaacttgtcttggagttgaagaagggtactcaaaagctggggtacaaacagaattacaagtcagcggcaagggaatattggggcatgctcctgatgatgctggaaaaactgaagagaaaccaaaatgggaggacagatttgagtccttgaaggcttccaggagagctaaaggagaatgtttcaaatgtggagaaaagtggggacctggccataaatgctaaaaatctgttcagttgcatgtcttggaggaattacttgaagttcttcaaattcaagagaatcaggaagctgggcaagattgtgaatcagaaggcagtaatgaagagttttcaattttggggatatggtttatttgaaattacaaccatatgttcagatgtcagttgctaacgtagttgtcagaaattgtgtttaaggtactttggtccatacaagattttggagcgcattggagaggtggcatacaaattagacttgcccccacaaaatcaagttcatccagtagtccatgtgtctcttctcaagaaggcaattcgtcctgatgtccaagttcaagccgatcttccagcaaattgcatggcagaagatgcagcagttattcctgaagaaattttgcaccgccaactcatcaagcgaggtaaatcagctgtgcccaatggattagtccgttggactggtttgcctgccgctcttgctaaatgggagaatctacgacagctgcaatttcgtttcccatcttctccggcttggggacaagcctcttcttaagcgggggaaattgttatgagttgtgtttgctgtagcttgtcagttgttgccattccctgtattgagtgtaacagtgtgtttgggcctggcttgttgtgggccttggactggattgtgtgtgtgtgttttcgacgtgccgtgctgggctggcggtcgcgtcgagtgcgtgtgccttgtacccgttaaaagggaaactccctgccgatgagcaggtatcgatgagaagaaatcaaatacaatcgaactacctctctctctctctctcttagttcatccccttcctctctaattcaatccaaatcccctagcgaattccggattagcttggcgtgacgccggcggagtctaggagttcgtcacatagatttcacgggtgagagaggaggccgagcgggaggaaggaaacgatcgggtgggtgggacccaccggtcaggcgcatgacgggcgctagagggaggcggccgctcggcttgggccggggcaggcccaggcgggaggaggagaggagggagtgggccggccgggaaggagggaatgaaggaaaagagagggagggaggagagactttgggtcagccttggcccaaaggaggaaggaggattatttttagtttttctttttaataaactttgtttattgttgttgttgcttaataattatttccagcgttctgaaaattcaagtaaaatttgagagcactttttagaccaaggagaatttaacaaaaattctccgggccacattcgaatttttcttgtacgtattttagtgtttgccaatttctttttgaattttaattaattctattatttcttttagagaatgatttttatttcgggatgaatttatcaggacgtgacaaatccacccccttacaggcatctcgtccccgagattcgagaggcttaggaagaagataggttggtcggtcttctcttcttgcctgacttcttccgttgcgtcttgtataccaaacttgtccagcaaaccttccccattcggaactgtttggcttgatctcctgttgcagattgaatcttctcttcacttgacttatccctggttgcacctctagctgacttcgactgggttgcggcacttgaagatggggcttcagttcgagaacttctcatagttcatatcttgggtgtcaatctcatgcaagttacccacttcacgttatgcgtcgatatcagcttgtcattactagaataccatgcttgtcatttacttctaacttgccaccaactgcctcatattagctttcctggtctccgagtgctagctacttctgctattcgatgcaagggtcgataactttgcctttgaattatgtttctcaatagaaccaacttatcccacttgacatgctttgacgtcttcccaaatggctttactgctagacttgttattgtttgatcgttatcctgccaaatctgaagcttcgttgttagatgtgattttaatctgacctctgtagactatcttcgaacatatcacttggttcataactgagaatagctcccacgaacagacaactcggattcactttctttacattcagtttacttcccactattctcttcatgttttcatcatttagcattcaacgtattcctttacaccttcgaccttgatgagttccttcccattggatcatctcccaagacatggcattacctggtaaccggtgcctgcacttttcactccgtatagcatctgataccgacttgaagatttcactccttgccttcacagaaacacttttacctagttcatcttgcttactcacgatttttttttcttaatgacaaggtgactgttgcagggcgattactgtcaggagtcttccttgtgtaatgcagagcatgtttttggttatcctttatcaatcaccattcagcctacttctgttcctgctagaaaacatctttgccgatctcttttatcgatcaccttttgacctttctcaaccaagtactcttcactctgagagttgtggatgcttctggtggcaatgtggtccttgggcttgctgcctttcagagaaaccttgaagtagttcgtcaaaagctatactgactgtcgttgccttttatcagaaaaagacacatctgaaactcttagtccaacaaatgtctctttggttgatcacttgattttcttttctacaactaggttatttgattcagaatagagtaggagctcacggaaatgagaccctaggtctcctttatcagtaaacaattacgcacataatcacatatccgcatcttccaaaagaatcctcatagatcttgtctgtattacacatttctcccttgttacatgaatactaagcactgcctaacaaaatggaaaggtgcttagcatcgatacattgtttctactatgggttatgattaacacgaggcctcacaggtatggcgtttgctccagtgaccacaaggcgagtgacttgtcttcttcttgcataatgcccggagtgatggcgcaggttacgcttcggttgtggacaatctctagagaaatgacctggttctttgcagttgtaacaaatcaacttcttctttactgagctgtccgtctgggaacgatcattctgacttggagttggaattggtggttggaaatccttgctaacattggcatcagtggtaccatagttgctatcaccattggattctttctcagagtcacaattgctagggttgtcattctgggtgccttcattgatactatcgtcgacatcttggtgaatgttgttgacattgcacgcttgattcgagtggtcactaatggggcaagaaccatggttggtggtggtatcatcatcattagtattgctaatgttgttgtctgcattgtatccatcttcttggggcaggaactcttgatgcgcaacagaagatccggtgatctgaagtggctcagttcgctgtctttggttaccacatggaattactgggatgttgacaatccttctcttgcagttcttcatctgattatgctcactttcgagttgtatggctttgtccagaagtttctcaaaatcttcataatcctctaggagtagttgcactgcaagctcatcttttaacccctggagaaacttctcttgtttatcttcatccgtttccacatcttctggtgcatagtgagccaaacgatggaactcgtgcaggtactctatgacggtcaaatattcttgctttaggtagcggaactctcattttcttagtgtgatcattcctgcgggaacatgtgatctcttgaatacagctaaaaactcgtcccaagtgatggtatgtccttctggccgtgatacttcgtagctatcccaccattctgaatctagcccaaccaactgatgagttgcgaagacaacccgctcctggtctgtgcactgaatcaaccccagattcttctcgactgtgcgcaaccaatcattggcttccataggatcgacggcaatggcaaaggttggaggcccagttttgagaaattctgataacttgcactgttgctggactataggtacttgaacgttggttgcccatgctgggttgttccgattctgtaatagttgaaatgctgttgccaacatgttggtttggttaaccacaatttggattagctatggtaaggtttcgttgatgcttttctcattcccattggcttgggttcttgagtcatcggatccatcattcccatagcctttgttaccagtgttatccatctgtcacaaggtagaggttgagagaggaagcatacaaggaaagaatagaccagaactagggataggaccttataggaactaactctttttgttgatgtgttgtttgtttcacttattctgcaagttgattaagcaaacaacctagcatggttacatcacaacccaccgatgcaaaccacgcgctacacacacaagcaaaggaacacacaactatcgactctaccctagagggtggcttaggttctgcgactggttcccaagatcttcactcctgcttcatagctggctccactgctttctccacttcgctagcggatcctgcagtcttccggagcttccgcaaacaattgacgacatcttcttcgcaaagctggccatctagtactagttgaaattcgaagaaggaagaaaagagaaaacattttgcaaatggcataggggaaaggaggaaaagggaactttcgcaaatagtttcatttataaaatatgtccttaggttttatccacttggcttatcctacagtcgagatggctctgataccagcttgtcgcgccgggaaaaattgccttttcccgagcgctagtgtattaatccccgtcccaggaaaagccagggtacaccacacaaacatgatacaaaagacacatctttattatatcgataatatttacattattaccaaggcacttaacgcctgacaatcaaaaataaacagcagcggactagcgggcctacggctccatcttcacaggcgctcaactggggtataagccaggactccacctaggacttcttctccaaagcttctcttactgaaggggggaaagatagagcaagaatgagtacaaccacagtactcagcaagtcacaccgggagatgcatgcttaatgcaagggggtacaaggagtaataataatagggttaggttttgcagtaaagagcatttaaaagacacttagttgctcaaagctattttgtaaacacgatcctagagctacacaatattattaatcaaggccgtgaaccctcacgaacctgccttaatccaaggcctacgatgattcagaccgaacaggcaacccgacctgggtcccagctcgtccaaggccaacccaggcctaccattccatattttagttgtttagcaaattttaagaattaaaccactaacttgggtacattgataggcttgcccatatccgagggcacggctattcaaatatattatact

SEQ ID NO: 5260 - DNA, 1232 bp, Oryza sativa
agcctagaagaagcagagatcgcaaacagatcgataattacatgcatttctcgctacatgcatttcctcgcttaattactgcaacgctgcaataagtgagcgtatatatgtattttttaagttcaatttagtgatgaaataagtgagcgtacgtgtatataactaacctagcctccaccggcaaaaaaaaaaaaaaaaaccgggtcacatcatatacagacacacatttgaagtaataacaaaacaaattacataatcagcatagaaaccgtgagacgaatttattaagcctaattaatccatcatcaacaaatgtttactgtagcaccacattgtcaaatcatggcacaattaggtctaaaagattcgtctcgcaatttacacgcaaactatgtaattgttttttttcaatatttaatatttcgtacatgtgttcaaacgttcgatgtgatggagaaaaaatttgccggcggaactatttattgctccttccgtcctaaaatataagtatttctagtacagtgacaagttaaacatttttagctttaactattagtagcaaaataaaaaaaatcaatcatgtaaaattgaagtttactagatttattattaaacaaactatcatagtatgcaactctttttatttaaaacatcttacttttataaatattgttggtcaaaatagcatctcgatgaccgtgtcagggttaaaaatatttatattttgggacggtgaagtattaaaaaacataggtagtattagataggcatcacgaactagacagaggaagatatagtcgattgacgtgtgaccactaagtttcgaccggtatggagatttaatatgacagccataatgtcaaagcaatctggagaatgccatgtaagaacaaattgcttaggttgtttcgtcaaatattttttttgaaaaaaatagtaatggatcgaatcagattgcgagctgcatcatcttgaatttatcgtcgtaagcttttcgatgcatggttagacacatctggttgaagtcatcgaaaaagagaagaaaaagaccaacatgatcatctgctcacagctcactgccttatcggccatagccaaaatattaattttaaaaccgttttatcatagtctattattttaaacattgatttttaatctacttataatacatacttcataaatcgttttgattttttctaagataaacttatataagcaagtttatggagaaa

SEQ ID NO: 5261 - DNA, 4310 bp, Oryza sativa
  unsure (1)..(4310): unsure at all n locations
tttcaagtgaggttagacgtggcaggagctgatcccttgcacagcaaggtggctctcctttcaccagcgtgggacgccctattagcttatcacatccctcaatgcccaatgtcttcaaggatactaagcacaggaactcttcctctggccagtagatgagcacaccacagaaccagatttccaaacacacaagttgtctaaggcatttccaaaacatgattattggttgtgatgggctcgtggggaagaaaaagttgcagtgctttaagtccagttctgagagagatgattcgtgaatctgatcaagctgcactcttccttctttgtcatccacgtccagtattagcttggatttttttagataatggaagcttttattaaactcagtcaattacatcaaggtgatacaattatcctgagaacacttccggcctctgcataactaagatgcacaccgccgaacaaacaaaacgacactcgaaaggaaaaaagaatgacatggagtattgaggaccatcaatctaacgactaaattgccactcatgaacaactccttggccatctcctccaaaagcacagagttttaaggaccaccaattctaagactagatcaccacccatatccctgggtaaaaaactccttgaccaccttctccaaatgttgacatgccgcaactaccatatcccgcgaatcaggcttctgtaggatagcccatatacgaagccaatggataagagaatatataacctgcaaatgtgaagatatgacttttttatcaaaaaccacattattcctgtatagccaaagcgaccaacaagtagcagctgctcctaacagaacatggtgnanntttcaangnattattatgnaantntgccatcaagncgcagctncncccccaannannaccantngagtggnngccgnncnnttaanncnaacnannatggagngggttgggntggnaggnnaagtccagatgctgcttggatgatggaccaaacagaaagggcaaaacggcattcgaagaaaagatgtctaattgtctcgtcattgcaacaaaaacaacaattcttattgccttgccatttcctttttatcaaattgtccttcgttaacaccactccacggcttggataatgaggacatgtaactggcttggataatgaggacatgtaactggattgaagtaaaaacaaggacagttcggccttgttttcatttagactgaaaatcttgagctttggtgcttcgggtagactcctcagttttggacagttcctgatgtcagccttttcaagcagaggaaatgttgattcgttttccactagtctctctaagccctctaaatcatataacttgattttctttaatgctggaaatggtgtgaaagccatttcacagcatagtgtttgcagttttggacatttctctatttcaaccttctcaagcagaggaaacactggttcattttcttgtcttcctcctgttgctacccatctctctaaagcttccaaatcgtgcaacttaatcttctttaatgaaggaaatgttacggatgccatgtcagggattagtgttagaaactttggacagctcttgataacaacgttctgaagaagatgaaatgtttgttcttttccttgtctaacttccttgcaacatagggtttgcaatttatcaagtctgatcaaacagagaacttgaagagacttaaattgaatgaattgaggaaattcttcgcacattgtacaaccctctaatttgagctccaccaagttttgcagtatacttagatctgtcatccatgctggaaaaatgagtgcttttataggaaattacgttgagcatcagcagcccatgatgtggtttaagagcatcaagaaccttcccattgcaatttggttcttcaacacagcattcactattccacacaagagataggcgtgcaagtttctctttgtttctaagattggctgcttttgcatcttcttgagatacattttctaagccacgtaactctagttcaccacagaggtttaagctgtgcagttctctaagggtgctgcaaccagagctagcaccaaccacaaaatatgttagtgtccggatggaagttaattgcccaagctctggaggcatgcacttcaatcttaagcatccatttgtatagaggtgacgtagacttgtcatatacttcatatcctttgggagtctaacaagattatagcaatcaggaaggtttgatgtctgtagattgtacattgtgcttatgtctgcaggaagttcatggatattactgttgtctgagagatttagatatcttagatgttgtaggtgtcttggcctgattggtaattcttcccttcttgggagctctaatgctcttagctgtagagaattgtacttaaataaatgtgatgttgagacattaccataataccctcgaaacaataaagttcggagagctggagcttcatttcccataaagtcatctggaagagcaatgctggtgtatggtatgagaacgtgatataaaggatgttctcgcatcagatttttcaaattagacgaaccaattatactgagactatgtctttaccccataactagaattgacgaacatgtgcatgctataagcatcattgtactctctgcacgcttgcttctgctcaccggacgctcgactctcctatacaccatctcctccttccccgctgcacgaaactttgtattgcactatctgtgtaaaagaatgtaccttctcaaactatgtgtcctgtgacaaatgattcctcgggcctacctgtcttgccacgatggctcttgcctgcctgccagtggtactgaagctcatgtgtccataccatacattggcatccaatgttctcccacattcaatgctcatagatctctttggggaatatagcacacgaaagcaaagcactgcttcatgtgtgatggcagatcatcatagctcagccgaagtataggaaaaattttatcctccccttcattgcaaatgttgcttttagttaatacatcattccattcttgcatagtagtcctggtacttaacatagaaccaaaggcttttgcacctaaaggcgagccatgacatctgtgcacaatcttacaaagaattccaaaatgttcatcattgtttggcagagttaatgctctcctcaggattatttccttcatgtaaatttctcctagattttcaagattatgcacttcaacttcacccgtgaccataattctagcaacttctgcatctcgagttgttgttagtactgcactacccataccacccttcttaaggcaggtctttagctttccccacttatcataatcccgttcccatacgtcatccaacacaatgagatacttctttccacctacttctttctgcaggtcctgcaaagccttttcacgatctctctctgtgctcatacatatgttgtttgcaatagtgacaacatcaaacacatccgacacacaacaccacctgcggagcgggaaatgcttctcaatttcagggtcattgtaaatgagttgcgcaaaggtagtcttgcccagcccacccattccaacaataggaaggacagtgaggtccgtgttattagctttatcaagcaatatcctgataatcttcttcttctcctcatctctagatctgataacaatatccttgtcaaaatcaaccatgatggaatcagttttcctccactgcttgggtgtttcctgctggtgtacgagtccgaaggagttcatctccgagacaagttccttgattttctccacgatctttcgcagtttcttgcccatcctatatcggaagacaataggattacgagaagggaagaggcttacagagtccatgccaagcatagtgtggttgcggtgccctttcttcttggcctcacgccagagcgactcgtacttgaactcgtcgaagacgtcaattgcctcgtaggacaccttcttgagtgatttgagccaagcgcaaactagaccggatcgatgatttttcttctcctccgcatcttggatgacatcgaggatggctggaagcaagcgctccagagtctcacgctggtcctccatgccatccatcaccttgtacatgtctacaagaaagctggaagccttctccagcaccttggagagcagtggcccaaccaaatattcagccatcgttgctctctcaactctcaggagcaggagcacacggcaagaacccaaggcaagggcaacggcggctgttgctgatatgtagttctattggagagtgattaatggggta

SEQ ID NO: 5262 - DNA, 9388 bp, Oryza sativa
gtcctcgcctccctccgccgtcgcgcgtgctggtgaagccggcgtgcgcacgaggagatgacgcggactccggccgccctctctccctcggcccgagaccgaggtgatcccgcctgtgccgtcggacacccttcccggcgatctcccgacgtggtagcctccgttctccctccccactcttccttccccctagcttgcgcgattgctagcctagaccttcccaaatgcgcgaggacgctgcctcgagccccgccgccgcccggcatggcctcgccgccaatgccgtccgctcccggaggccgccgctcgtcgccagctgtcctcggtgctcctctgtcccatccggcgccgaaaacggattccttgaaccccggatatgctcccaccccttttaatcgaacccccgttgctccggtgaagtttcccccttttctcgccgccggcgtacgccgccgcgattcgtcatcgccggcctccctccggcgaatccgatccggtggctcacttcctctcgtccgtcccatcgttccggtgtactccctctctctcgaatcgtcgcgacgagctccggtgaactcggccgccgtccgccgtccatcttggccgccccttcttcctcctcccgccggcccgcgtggctgccacgtaggcgccacgtcggcgccacctcggctttgaccgagccgagccggtcagccgcctccttcctccccccctctcgcgcgcggtccacggtgcaccaaccggctgcgcgtgggcccgccgcatccctggtccatccagtgcacgcccgtgaaccgcgctcacccgaaaccctagcgctgccctcatgcgccgctcccacggagagccgcgccactgacaagcgggccccacccgggaccccgcaaggtggatacggtccacccggacccatccccctctctcctcccgcgcgccccgcccgcttgggccgcgccttgcccggccatgggccgcctccccgcgcccgcgcccggcccattggctcggccgcgccgtgcttatcccttgggccgtacccgagccgcccaaagaagtctaaatcccatccctccttccatttcttatccaaaggattaataaatcctttttttttccttcctttgtcccataaatcaattccttattcccaaaattccacaaatcatttcctttggtcccgcgcgtcagtgactgtcaataatattcttgagaatattatttctataaattccataaaccatttctcctattccagaaactccaattaaacttccaaaattcatatcacctaattcgcaactccgattgactccgttccacttccagtaattccgtaaaattgagatctatttattggcactactaattagtctaaataggatctttcttttggtcctttgtttaggttttcgattgtttgcgtatagttgcggttatcggattttcgtcgatcgcgggtttcctcgaagattcgtgaagcttcgtgaagaccttgagcaaggcaagtcaccctttgatcaattgcccctataattgaaaattcattattattttgtttgcaacttgcattattagaatcacacacttaacttgcttggcctcggtttgcgtgccaaaaccgacggacctacccagtagtcgcactaatttccgtaggtcatactaccctgattccttgtcgctccacccttgtggtacctcggtattcgtgttctctgagcacgtataccaaatatcccacatacaccattgtttgtcgaaaacttgggaaatgggtttgtgaagccttcaaaacccgacatgtggtgtcggtgtatttgaaaataaaatgaattgtgaaaactcgcgatgcgggggttgtgcctatgtggcactgtcccgtattcgcatataaggaccgattcctgtgggaaactcatcgaacataatcaaagtgcaaccacaaggtggaatgggacaccctggctaagtaactagtcggttcagggaaacctcgcatgccaatagttgggaacgccggggcggggtcggacaaaccgggttcctggtaaggcaaggacgagaagcttgctcacttaccgatcaaggtggttggagtttgatttgtgaacgcctaaaatggcctatgtttatgtgaggatttgatccttctatgtggcatgaggtaaccctgggtcggcttgggaaaggctttgttgcgaacctctgataccgacgggtgttcggaataagttcgtatcttgtgggtaaagtgtacccctctgcagaggttaactaactgttcgaacagccgtgcccacggtcatgggcggatgtgaggtggttcccgttgcgtagatttgtttgcctgtgctttgtgaaaagttgttgtggtgtgggaatcgtaaccagaatcagcctatgtggcagatggatgacctgagtggtcagaaacgaatctgtgtgattcgggatgtctgcgggcatcatagactaggcttcccgagtggaagcggattgttgtgctgctaggcagctggactctgggagtccgagaaaatgaaaaaggctctgggagccgattaatcaagtggaatggctctgggagccgataagtaatgatctgacccgggaggtcggtacattaccaaatgagctgttgaaaaacatctcttaaagtcgaatcgagacgcaagtctcttttcggcccaaacttagaaagaaataaatcacttagtgatttcaaaatgtcttcaaataaaagatttgcaaaacaaccttacctctcttccaagcttgcattaaacacctaagttctcgtgacttgctgagtacgaaagtactcacccttgctctatataaatatatatatatatagttcctccgccctgaagagaaggcaaagtgaagtgaatattagggtttcgtcctggttcccagccgtcgcctgtggtgttgggtgttagaccgttggttccgctgctgctgctgctggtggtgtttcctcgtccgcgtcgtcggttgtattctcgggctgtctgagctgcaacctaagttaaggtaaataagtcctctatttattttaaggattgctatgattcatatttgtcaccgtgggtaccagcactatgtcctgggactggtaccgagatcgcggtttcgtaggaagcggttcacgccgttttccctacaacacgctcctatcaggtgccgttgtacggcggtatcagattggggtgtgacaacagttatgcaactttttacaaactatggatggagattcacaaatagacttgaataaatgtgtacttcttatctcggtttggtcttttattttgttgggtgtgtttaattttattttgaactatactcttcgtttataataattgactgtagttatgatgagcaaagttcgaaatatttcattccattatcttaaaaaaaatatgaagatggtgttagtagtagcatatgttcgctctcgctcagataaacacaaacaatagtaggagtatcgtcgtggacatggatagcacagtaaaggatcagaatttcagaagatatagacgtgccagccaggggccccttgcatcacatgccgatggacgcaaaataatgtgtgttgagttggtggctaaaggcgccaaattcatcggtgctgcacactgcactacactgtaacgctggcagtttgcatttgcagccgaccaagtcaaaaaggatggcatccgcaccttctaatctctcactttctcatagcaaaagacaccaaggccattgtttctctgattctccaggccctgtttatttttttttccaaggggtaaaggtaggagctctgccgatttcattaaggatattcggctctattaattgttatctgcagctggttagccatgactaaaatttaaatctaatatcttatcagcagcagtagtgcagctgactggagaagtgatgatacaatgtaaattaccctgagattatttccaggcttaccttgattatgcttggggagagacattaccagggagacaaatgatatttggggccagttccctgacggttccaaactctgtcacaccatgtagctgtctttttaccatgtcaacagctagaacatatgcaggagtagtaaacaatattggtaccaaagcatgctgggagtgggttgagaaatccagaggttctccaatttccgctctgcgttggtggacacactcttgttgtactgtgataatctgtgatgacttgttccgcagcagtttcttacgcatctgctcttataagctgatgatatctgcgtgaactggcaaaagaactaatccaactatttgcaaacaaatattcaacatttacacgacacatagctttgcttagtttctttcacccttcccttaggagtccgctcggtttagccaagttattgcattctttgtacccccacccatgtaaccgtctcggagtgtgtacaaattcttgctgttgttattgatgttgttcttattgttgctgctatcctataattcaccaactcgttttactcattatcatcgaacaaatccaacggtaaatcgatcatctactgtagaacccgatccggatcatccaatcgaatagcaatcagctccggttcaggcagccacaaatcctccgctccaatggcgagatgatcgtgagatagatatgggatctcgcggccactgcagtgcagtgagctagtgcgccgctgatgtggcaacaccttgggccgagtttaattagttcggaaatttttcttcaaactttcaacttttttatcacatcaaaactttcctacacatacaaatttttaacttttccgtcacatcgttccaatttcaaccaaacttttaattttgacgtgaactaaacacatcctcaagtggacacagctgctttagctgggaaaaaaagaaaagaaaaaaaaatctcttgcgccttgtggttcacatcgatttcacgcgcaatttgacggatcacgcatcagtgctgctacgtcgtccacatagttaatccttgcacagctgctgctaattaatcagatactcatgagatcacaagctagcaacgtttatagatggcggattttggatatcgattcgccttcaacatgatctagacatgatgaggcaacaaatcagacaatcagtaattgcttctttaagacattgaattttaaaaagggaaaataagaaaaaaaaacaatgggattttaatatgaatataagtatatatcaaaaggaggattataagacatgggaaaaatacaaaaacgaatatttgattacatcgcagaaaaacatatgaatcagatgagagagaataaattttcaaatgatttgagtttttactaacttttgtctaaaatctgtatagtatcgtgcattctatagaaattttaacgaaaatgataggatttaattctttgtatcaaatacatttaaagaaaattcccttataagtttaaaatctctaatttttttatgagatatatatgggcctaaaccgatgagatatatgtgaagattatattcaagtcaaactcgctatccgacttgttacaacaaatcaaagttgtacacctttcgtctaaaaaaattaacttttaaagataaatccaaacatgtagtggaagttttttttatgtgacaggaagagtacgtgggtacgtgtgaaggtttggtaatagcatctacttgctaggattaacagaaacaataacaatactgtcttcgttgacacaggaaaggatcagaattcagaagatggatatagacgtgccagccaggggccccttgcatcacatgccgatgcatgcaaataatgtgtgtttgagttggtggctaaaggcgccaaattcatcggtgctgcactacactgtagcgctggcagttgcatttgcagccaaccaagtcaaaaaaaaaaaaaaagatggcatccgcaccttcgaatttctcactttctcctagcaaaacgcacaagggtccgtttgggatagtttctaactgttgcagtttttttcaatcaaaagatcttccaaataatttattttttttagattttaagaagatatagttatagaatctagaaaataaactagaatccagaagctggaaaacccagcttttttttagtttctgagaaactggctaccaccagttacttttcagaattttaagctccctaaacagtcctgaaagccggtgcttctcagattctccaggcctgtttagcatagattttcggctcaattgtcatctgcaggctagaataagacatgtgttcgctgtatagcaaaaatcatcgaggcaattaatctcgcgtgaaaaacatatatagtaccgatcgatatcggattaattagttcatcatattacttctgcttcacgctttgggtatcactatcagcagttaacaacaccgtgtgttaggtcagttgagtatacgcagaggtgatcaagtacttgatcaaggccacaattaattcgagacactgttgggtgagagtgttgctacagtgctaaatgatacctacccactatacatgctccatcaaacagttgaaaggatcataacaaccagcttaattaaggccctgtttggaacattagctcagggctaattttgagagctaatgtttagtcatgaattggtaggctaaacattagtctagggtggtatgtttggatccatgggctaattcaaggctaaaaggtggaaagggtaaaaagagaggagagagaaggagagacagttgcttttttatggtcccacacaaaattagcccctatagcaccctttggaggggctaatgttttgaggggggctaattcatattagctcaaaattatcccacttgtttggatcctgagggttaatttgaggctaaaaggtgagggctaaacattagtccatagaaatttaaaaaaatttaaaatataagtcacgtataaattactattcatattatcatctgataacaataaagtcctactcataaaaaaatttaaataagacagacgatcaaagttggacacgaaaacttatatttgcgcttaaaatgggatggatagattactacttatatgtaagtagagtcaacaatgaagccaaagatgtctcatggaactaagacgacgaagagcgtatatttggttgttggttaatttgtcgaggtgtgttttatgttcaacagtggtggagccagaattttttcaaacctagggctcaattagttgaatgtataaagttttacctttatcttctagtttttaaaaatttaaaataaaatttcaataaatatttaggatcaggactagtgctacagccctagctgccctactcgtgtctccgcccctaatgttcaatagtagcaacgtctgcgatgaagttcagatgaccacccagtcagcccgggagctagattcactactaagcatagaactaacaacttttctatttcgtatacagctaattataacttaaaacccgttatacttattaatgataaaaataatttatgtgtaatttttttatatatgtgtttttatttactcaaaagttaatactataaataaattacaatgaaaaaaaatcaaaatcaactttgtaattaagttggagtagatcctaatcaaaatcaatgtgagttggaaaactcaactaaagaacttagccttaattgcttttctcgtttgatctgattccgtgttctaaccgcccaagggaaatttaatcatccagccctagtatcattgttctgaatctctctacacctgtaaagtgatcaaggaaattaagaaacacggtgcactgatgcatggttcatcaactaactctcagggaccagcgatgatgcagacgtaatatactccatcatgcatgtgatactagcaattctctcttccattcactctctcgtctagtacatttgagttaatcagtcagtttggaatcactttacaacgaagttaatcacagacaaattcaacatgcttaaggacggacaaagatgattatcaaagacattaaactactactctttgtcatctgaggatactgtagttttatactgcaattgcagcaacattatactattaacgagacctgttttgtcattgcgagatccactccaaaattttcaaatgctcgtggttttgcaaacaaattgtaaccgaagacagacatgggtgtcagagctgtcgccgttggaaggtgacatgatcgcagccgtccactccatcggccgctggctaaccaaccaaccccgtccgccgacatgctgctgtccgcctcctgccgacttgttcttgtcttcctcctatgctcttaactctgaattttgttaagagatagaaggacctgtagtaattatttatcaataaaattttatcaaatttgtcatatcaaacatctcgccacatatttcccacaatcagagccctttgaatcgtaggaatgaaaaaacggagaaacagaacaaatataggattctgacaggaatgtaagtgtaaaacagtggatgcaaaacacaggaatgatcgtttgattggatcacaggaaaagcacaagaatcgaatgaaagagatagactcaaagaattcttaccaagaggttgacctcttgctaagttcccttcaaaacctatatgcaataagccattccataggaattttgtaggatttgaaaaacttcaatcatttgaatcaaagagctacataggaaaatttcctataggatttcaatcctatgaaattcctttgattcaaaggggccctcagtttattggaacgggatcttgtcacaactaatgctccgttcgttaccaggggttcccaacctccctccctcgtttttcgcgtgcacgcttttcaaactgctaaacggtgcgtttttttgcaaaaaaaaaaattctatacgaaagttacttaaaaaatcatattaatctattttttaaaaaaaatagtaaatacttaattaattactccctccatctacttttgatagtcatatttccaaatctgaaaattttatttttgatagacatatttcaatccaacaacttatcatcttaatgactttcttggatttaatgcatgactcttcattcttccacacatgattggctacatgggcattgagaaatgtaaatattaatgaatcgtttgtttacgaggaatgactagtagcatatttaaatggatgataagtagaattacttatccttggtctgtgtgccaagatgaaatatgactatcaaaagtagatggagggagtatataataataggtgctttgttttgcgtgccggggaggaggatcttactcaccttcgctttccgtttctcacatcggcgaatacccctccgctttggtcaaacgcttta

SEQ ID NO: 5263 - DNA, 11589 bp, Oryza sativa
agattattactagatgaactcagctatgatattaccagcattgcatctacatctgctaatgacatcaatagtctgaatacaaaccagaaggaaatcttcaattctatttctaactcagtcataaataatgagggaagaacattctttgtgtatggatatggaggaactggaaaaactttcttatggacaactttattaaactttgtgagaactcaagggaaaattgcattagctgttgcatcatcaagaattgcagccctcctacttccaggaggtagaacacctcattcccgcttcaaaatccctttggacatacgtgagaattctatgtgcagtataaagaagaacacacacttagcagaacttattcaacaaacatctcttattgtttaggatgaagcacctatgaatcacaagtattgttttgaagcattagatcgcacacttagagatatattatcggacattcgacctaatgcacagcataggcaatttggtggaataactgttgcatttggtggagattttcggcaaacacttcctgttattcagaatgcaacaaggcaccaaattctgcgagcttctattgttaattcatgcttatggcatcaatgtgtagttcttcaactgactgaaaatatgagacttagctcacaaaacctttcaccatccgataaagaagaactacgggtatttgcagattggcttttaagagtaggaaatggtacagagcctcatatttcaatagaaaatgaaaccaatggtacttttatagagataccccaatctcttctgttgccctcagattccagaaatctggatagcttgatttcctttgtgtatgacttaggatatgaaccaagcaatattacaacatatttttgtgatcgtgcaattttatcaccaacaaatgaggttgtttcagaaataaacaacaaaatcattgctcaagtaacagctgctgaaatgtcatattatagctcagatactattgatgatagctgtgcaaaccattcaactcgagaggctctatacccaacagaattcctcaacacaatatctttgaatggacttccagaccatgttttgcatctcaaaattggtgttcctataatgcttttgcgtaaccttgatccttctagaggtctctgtaatgggactagacttattgttacacagctcacaacccgcatcattgaaggggaaataatgactgaaaaagccaaaggttcaaaagcatacatactgcgtattataacgacatcagcccaatctaagtggccattcaagctaaaaagacgtcaatttccaatatgtttttcatatgcgatgacaattaacagaagctaaggtcaaacacttcaaaaagttggtacatacttgccatctccagttttttctcatgggcaattatatgttgcgttatcacgagtaacatctacaaaaggcttgcgatacttataaacaacaatagttcataaaatgaacattgcacgcaaaatgtagtatatcatgagatttttcaccgtatcaacaatgatatgaattaattaccaaggtattttgtaaacaaattatctcttatatgcaatgtatgttttctgatattgtctactagctaaccttagacctcttatttcaggaacatttccatagatgggatcagcaacaaaactcaaacagataaatttgggacagcaaaaccttaaagttttcggactacttattagactatgggatgctaaaaacatggcctcagccagtacaccaaccatatttagcattcatggggggattcttgatgaagaggtatactatcctacaccaaaaaatgattaatcctatgcttaacttccaatctaaatattactgacaaaacaatgcagttttagacttataccagttctaatcttgcagggcactatgatgcagtttactattccaaagaaacttgaaaatgaatttcgtccatcactaactctaggctgtgtctacatgtttgtggatgtcaatactgctgacattaaaaacaaaaaatatatttaccaccaccaaaaatacatgttgcagtttaagtccagcacaaaggttcatcacctagaatcaagaggttcatccatcccaaactatggttttgaattctgcccatttgatcagataccatctaaaagcagaatatcaaaaccattgataggtaatacttgcattttctatcttcttttatttaattattatacaactaatctcaaacattttgcctctagatctgataggagttatcagccatgttgggccatatgattatgctggcaaaacatcatccaagaaaaacagaaagctcaaaatccgtaacaaagagtatgtatcacatatgcattatatttttatgttccaaatgtatatgacacagtagtttataccttttgtttcaccaatttgtagtgaacaagaacaaggaatagtcctctggggtgaatatggagagtcatttgatgaagcttttgttctacagaaatctacagaccacaaaatagtagtagctatacttgttggacttacagcagggacttatttaggtcagtccctcaaataactttttaataccccctctcataaacaacactactcacttatgtgctacaattttaaaaggcaaaacagaggctacatcaagtttagcaacacaaatatattttgactccgatataacagagattgttgaatatcaaagcaggtaacttatatagcttattatcatactgattttaatttatattttgcttcaaaaatgcatcaatcttccttcaagctaccaatgggatattccaactctccaacaacaaatgccacgagttgagcatttaactccacttcaagcggctggtaagctatacaaacttgaagaaatatcaagactgcccatttctgctttcgaggtacctcattcacactacatcactaaataagttgctaatctaattaaataatcatttcaatatttcttacacactagggagggaattcatacagttgcattgcaaaggtatcagcgatagtaccatatacaaattggtactacaaaatatgcaaatcatgtactgcatcatacaatagcaactccgacactccaagatgtcaatgtcagcattccatgccaaaaccaatgtatgtgacatatctataatactaatttttcttattaattaattcgtcttacatttctataaacaaatctaatatactcaaacaaactttcaggtacaaacttcctttaacaattaaagatgaattaggaactttggacgcagtagcattctacaatgtggctgaggatttggttgaggtaaatgctactcaagctacccagaacttgaaaattgatgcaaccgaacatgccatagctcttgatacagccattgggaaaacaagactgtttcacattgccatgaatacaaagtactcttcacacttcactatcaattatgtcctcaagaagagttatcccgttgaaaatgaaaatacaagtttgatgctacctactctggaaaatacaaaggtagcaaaggtatacaaatgtttgtccttaccatatcttctaccaaccatctataatctaaaaataacttttttcaggaatcagccaccaaacaacttgcaacagatgaagggctaaccaccatggaacattacaggttaaccaacatatgccttttttacttattatattctgcttaacatttctatatttatgactacaactaatagcagcaaagaagaccaacatcccactacgccaccgtccctacaacctccagaaacaactctagacaacaatacagtaaaccaaattataccttcagcaaagagagctcttcaatttgaaaaggagttacacattgatcaaccaaggtactgcactgatacaagttctttttgcagaatatacaaactattcttcaactaaattcctttcatatatgcatcagcccagcaattgcaaacactattcaggttgcaacaaatcaactttatcattcccaacaagtagatctcagcaaggaaaaacaaccgtcaacagaattttctccaggacaaaattctaagcgccataaaaaagtgtacgtgcacaccttaagtttcagcctataaacatatatatgtgtgtcacgcgcgcgcatatatatatgtatgtatgttttgctactaatttgactgctaaattcagaatggaagcctccaccaatggagaggaaaaccagctgcagcagccaaagatagctgatcaacagccatcgggtcacaaggaacaggtacaactcttcaaatccttcacaattctcctacaacatggccttttatcagcaacatatatagtttttcttaaaaaaattagacctgcaccaaatctgtcaccatcactgctaacaatttccttaagaaatttaaacctgcaccaaatctatcaccatcattgctaacttatctttgcaaccattacttgcaagtttactggcaaaaccaaccaaatctgaaatatggcatttatatctattccatattttatcctcaataataaaagactcaagatatgattcttaatcatatctgattctgcaataaatgagaaaacaaaattagtatccttattatcaccagtgaaatactataagaatcacccacaacaccaccacatgtgcactgctcaatttctcataccacagtccttccttcacaaaatttcttctgcaaacacaacgtccattgccaacacagatggaccaacaaccagaaaaaaataggttagctctcgctatccatgttcagctatagcttcctaattacatagttttcaagcttatattttatatttaacatgcttcatgcatttcagtgctctgtacattgtatatgcctatctatacatcataaaacgcattactcttcttcaggaaccatgaggtgcaactcatccacaccaactacctgcaagcagtttccaagattattgcatccaaatcaacagctatttctatcactctccaagggaaatcatccaccgacgacctctccaagctgcagccaactcaagctcacgttgtgaattacatgaaaaataagcttcctcacatgcatatcattctcgatggagaaaatgtcaaaaacaatgagatttagaacttacagtttcctactgtttccagctcacagtattactacctacctacagtttgctgtaatcgaataaacaaaactttatgggaccacctatacatttgttgacaaattttctcctaaaaatttgacagatgtaattataatacaatcgtagtgtaattacactgtaacttgtatgtaattacactataacttacatgtaactatagtgtaacttgtacgtaagtttcacgtaattttgaaacgttagatctattataagatttgttttggtgaggaagaaaaaaaatcacagcacacacatatgtgaaagaatttgttcccacaacctctattttaccgaaataacatgttatggagagatttttgaaagttatatacaagttacattatagttacagtgtaattattgcaagttacagtgtaattacactacgattgtactgtaattacatctgtcaaatttttgggggaaaatttgtcgacaaatatatagcaaaattgaactttattttatatttgcatgtgtttcactcaacttatatttatcctctggtgaagatcttggtgttcctaacaatattctgcttgcaatgtttctagtaaatctgaatggtgttgtcattgtgactataaatttccaactccttggactcgaaatgagttttttgtgcttggcacttttagcaattgatgatgcaaatatcatctttaattgatcacatagcagaactgcttacttttgaaattgtatactatactatattcctgtttggttaggtagcagaactactcacttatatctcacttattcatgtttattcatacttacatgcatattcatcctttctaatgtgcccgccgcaacacgcggggtttcaactagtatgtataatgcatatgtcacatcaattagatagaaaccactttgcaaaaccaccctacaatgttttatgaatggtattttatagttcaggggttggatgtcctgtttcaaagtttaggagagaacttggacctttttccctttttaaaactgaagatgtagatttgccttatcaaatattttgacatgaactttcacatatattattcaattaaaataagtggtcaggcacaagcttgacatgaattttaacaccattaagtcttcttaacggaaagggggcaaaacataagctttagctaaaaaacgaggacagaatcataaacctggaaattggaaaagtagaagatgcccctatgagaatttaagccacccaaacaagtttcatctatgagaatttaaagaagatttaaagtttcatctaattgatgaacagaaagaacagacgagcttgtttagtttgcaaatttacatttattatttattccgtgcacaagaacataataacatgatcttgatacactactaactatatattataaataagtttctaccaatgatttcatttccctctaattaactgtgactcgaggacagcagctttgcaatgctgctacctacgcgcgcccaatcttctccaccagccgcctctcaatctccatcctcttcctcatgagcaccgtgtacttctccaggagctccttgtcctccacaccctctccggttgagacggcgagctttgcacccaaggaggtcttctccaggttaccctggtacatgcaggagatggggacgaagctcccttcctcattgcacagccagccatgggcagctctcagtgccgcgccaagcgaggcagaatctgatcaagaagcagcgttagttttttgcttgaatttatgggtgacattactagtttcagcaaacaggaagctgcgcaagaacagaaaaaaaaggtggagttaaggtgctgtaccaggtctctgaactgtaaagacaggacagccaaagatctgcgcgattgagtggaggatgcgctcgttggaggatgcgccaccggttgcgatgatccgcttgggagggttaggcatgccgaatctctcggcatggcctcgcattgacagcagctggccttcgattatggcgcgaacctaacacaacaagggatgatggtgataaggttaatgggctcgccacgaagaaacaagtattttgattgtctttgcaaacctcagatggtggatcaaattcttccacctcacgttccaccagattgttggatgtgacatcattgaggttttcaacaatgtatcgatggaagccaactgcatagaataaaccattgtttttcatgatagagaataatgtaagaataccgtgaagagatgtaagaaacactaaaatatgattacctggaagtggcggcagaatttcatggtctttgtagtagaatcctaattttccgcctatatgttaaataaagaagaatgacaagatgtcaaaagcacagttcgattcacacaagaaaattgatgaaggaatattaataagataaatttaaaataacactatgtatgaaaaaacgtagcaagtttgaacaaataatagttgagactgcagtgaacatttaaattgctgatttattttgtatgtactgaaacactataaataacctgatggaaaacaaggttgctggaacagaaacgagcaagaaaatgttagtaagaacttatattaagaaatttcatttcagtaagaacgtaccatttagaggtggagttttctctagataactgttgaaaacatcccaggatttctccgcgcaactgttccgcacatctacaaacacattgaacatattctaatatcagaaaagtcccagtactacaatggattacatgagaaaaaaggatggaaagtattataccttctcgggtcaatgaaccatttttgtagcacagcatcaccatataaccatcaggttcaacagggttagggaaaacatggccttcaagacttggtttagcttcagcagttatcccaaaaacctaacaggcaatttggagatgagtaacccaggagcctgagaaagaaaagccaattctaccaaaagtggcatctttgcaacttacagtatcactagtaccaaggctaattgcaaggtcaccaggagtattcagagttaaacctaaagaagacacatcaaaataagaataatttaatggtccgtagttaacaaatgcattgaaaagaagaaagaattacaaaatctcgagaaagaaagcaagagaagcacctgcaaggctattgggattgtctccagaccattgaataactaagcaattcttatcaaactgaagcctgcattttcataatgcatcactcaaacaaaatttagggcaacaaatatttgtttgttcagtcatcagatgatatcagctaaagttttggcacagctagctttcccattcacatattatttcttttctatatgttgaggacaattcacctaaatccccttgacaagaatatgaacagagggagtgtaatctgaatctgtcagctatgatagagatgttccttattttcattatgaatctgtggtcgaaaatgtagtagattataagaaatgattaaagagagtaattagcccatttgatgccaagttagggaacagccaaatgccgaaacaccttgcgattattcaattccagaatttcaaacaccttgcgattattcaattccagtcttccagaatttcttttcttttacagttgtactgagtgcaagaacaatggagaatggtaaaagaaactcacctttctacaaaataaggagcaattcgaccagctactgcatatgctggtgccaactttccaagcttctcttcaagcccaggagccgttgccttcaggagagagggcacaattttgatattttagtattaaaaagatcttgaaggcaaagttttttagttatgtgagaaatcttgaatgcatgataaaggagctatcaggggcagacctctaaaacagtctttgaccaggttctctggtttatatccatcaagttcatcccagcaccatcagtctcatcaatacttgcatagttccccaccaggattgatgccatgaacgaactcaccaaagatattctctcagtatcatcataaacttgcggaactgttcggtatatcttccggatctgaggcccagtgaacctctcataggcacgagatcctgtcaactttgatagctccaatgcgccgcctactacactttctatttctctgcattgcttagttgtgctactgtccatccatattggtgagtccatggtagaaaaggcatccttcagctgggataacaagctcttagtaggatccaaggaagacaacaccgcatgactacccttcttccaataaacactgccgtgttgttgcccactccctgaaatggccacaaccttgctaaagttgatctttggctttagcttctcaagtagcaattcaaaggcttcaacccacattattgttggtgaaaatatgtggccatcatctgcaggatctctgtaaacaccaccttctgttttgtagtgcggtaagtcagaatcaaagttaacaatatctgaagctactattatcaattcgttgttcagcacggtagcttttagggacctgtaacaagagattagcaatataagattccactctgatggtccctaaaaaggtaaaaggaacagcatggaatacacagaaatatagatgcaaatatcgatagtatgtaaggtgatgtcaaatatcgatagtatgtaaggtgatgtcatgaggcgatggctatcaatatgcaggatactgaaacaaagcgaacacatcaattggaactgatgccaaaatgtggtgtatcttgcttctttctttaaattgagctttatggatttaggcagactaaaaatgaagtttttttttttacgcaagactaaaaaaaatgaagtgactctggcgtgctcggttcaatgaaattaccttcactgtcaacataaaaaatagctagcatggacaaagacttgatcacttaaatacaggaactcagacataaggctgaacttcgaagattcagactataacatgaatacaggaattcagacataaggctgaactgtgaaggattcagactatagcaccaccactagatatggaactccataagcccctgttctccctataattctctggtttccaaattgcatgcaagtcgtcatttttttctaaaaaaaaaaatagacactgaatgcaactattacgaacttaatctaccccaacccctccctgatagaatacctgcgcaattgctcacatatgctgatatgcatctcccggatttgcacaatgcagatgaacaaaataaacattttttttatccttgaataaccgtcgtcattttgccaatcacctcaattccaagcactacccagtttccccccaattcgaaatcagcctccacttacactaactagtacgttctagcagacatcaaattccgcatctagaacaccgaccaattcgcaagaaacaaccacccgcacccacacaaaagccaaaaaaaataaaaagatctaagcccccaactgaaaaaccaagagaaaccatcgggcttactgagtggagctgtcgaatccgaggaagagggaaccctccgggagggagctccgccccaccatggctgccgcctcgcctcgcctcccgcgcgaatcccccctctcagattggaaccggaagaagcagcaaagcaacaaactgatctggggtactactgattagagagagagagagaatcagcacgaacaaacggcgcggcggtttatatacactgatctggatggaggtggagtggactcgtttcaaacgcgcgactgatttgttgttaattcgtttggataaggattagcggcgtgatctggagtggattagcgcataaaatgatgatggattagcatttagcaagcgcccgcgcaacattctgttggggtattcatcgctacgttcgttgaggaagtctgtcagataatctatctatccaatgctcacttacaggtggggccagcgttttagttggtaggagtagattccatctatcttatcttgctctaggcccctcctcatctttgacatcgtagctattgtactgctgctactcgaagcacgccagcatggaacaactgaattttgatgccgtctgccgatctattcttagtacttcacacaatcacgattctgaatccaattcaaaagttctaagtagtattgcaattcacagggcctgtttggtacagctccgactcctaaatttagctgtaggagttgggtctggagtgaagtcgtggaactgcctaaatctagctccacaacactagttcattatgtgaaaaaacttcacatatctccactcccagttttaatggagctggaattgtttggctaagctccagggatagagctgagctgtgccaaacagaccatataatataat

SEQ ID NO: 5264 - DNA, 9404 bp, Oryza sativa
  unsure (1)..(9404): unsure at all n locations
acaatcacgtctacatcttatcgtgccatattcaatgatcaaaagcaacaacaaatagatgtgaagtgcacgtgaggacgcaagcagcaaaagagcgatgaaaagttgaaaacgataaagcaatgaaaacgatggtgaaagtttggaagggaagaggagaaaagaaggcggctcccagcatttggaaagaaatatactactccagtagagatgaaggcagagacaaaactgtagcacttttaataggaccaaccatatccaccaataggggaggagcatacatggaccccatggcattcaaccccacctgaaagtgggatggcctaacgcatctcatgtgacgaaggaaacaccctggagtatacaccatgagaaaacttcctaatactacatccgataaggccccacaatacagccagcaagagtatatagaccaggttcaccaatatgcaaccgagaaaaattgagccaatgacagcacgcggcctgcaccatcccaagctgacaaccgcactccccgagctgacaaccgcactcacgctcgtttgcgcgcaagatcaagcatgcacagttgtgcctcactacataggcacattccatggtaggtccgaaagcaatgctaaccatatggcctacacgccagcgacaccaaagccatagaccaactgcattgacaatgcatcgcccaccgtcaaacacaccgaaaattcacaaacgcaattgaacgacaccgcacaaattatcacggataaaggccgcacgatctagggcctgtttggttggtgccacattttgccacacttgaggtatgttagtttgaccaaatgtggctagtgtttggtttgtttctataactttagcataccacactttctactcttttggtcccactagtcatagaccattttcttagccaaagtttgccacaagtgtggccatcaaattttgagccacacaatttgcatcttgccacacctttggtaaaaaaaactatggtaaattgaggtgggcatccaaacagcccctaaatcaaacggatagggtggcaagcagccacaaaagcccaccaaactcaccaggatcctagtcgtggttgacatgtgaggagtcaacagcatccatggcagcggcaaaccgtggtggggaagagcagaaaacatcaatgctttgggctcctgcatgtaaattctcccatcgccgccaagctgctactgccgccaccaccgagctcaacacacccgacaaccctgaatgtcctaaatcgaactttcccatcagctttggatctggatcagacagagagggaaattgtgaagaaagaaagggtgggtgagcttgccctttccctctggagctcaccactgaggaaaaaccgctggtgtggacgccattgatgagccaccggatccgctggcaaagaaatcgcggctgccgcatccaacacccacagcctccccttcgagtctgcgtcagcggcggcgtagcaaggagagcaccggcagtgagggcgctgcgaggacaccacccatccacaacatcgatccccttcgagcggagaatggcagcaacgtagggaggacacccggcggcggccacggcactgggaggacacccagcggcggccacggccaagccaaatccaggcgccgcgcaggagagagcgagagagatgagaggggcatggcggctgggagttttttccttttttttttacgcgcctgggattctcgcgaaggggagagagagagagaaagaaaaggaaattttgcgaaaatgcccttcagtttctaggattcagggcgcagtccttttttcctctttttgtctcctttgtattgaatttcgtaggatgcaaagggcctaaacgcaatattttaaaccgagaaaagaacagagaggacgtataacaaaatatctataaaagagagggcttttctgtaaaatttgcagaggcgacgcggacgcatgaaaggccgtgaaatccatccgctctccagcgcgcgtccacgcgtcgcgaccccgtgatggccacggcagcgcaaaacgctgagggcgctgcatttcccagttggtttgaagactttagatagtcgaacaaacaggcgacaaatcgaattttcgaaaaaaaaaattgtccgtgcaaattaacaaatgagcaaatcccaaactggcttaagctagctagtaggctagtagccgtggcatctggacatgatgggcgggtcggcgaacgggccgtcgagcacgccgcgcgccatgatccggtacaccgcctccgtcatgtgcaggccgtcccacgagatgcgccgcgacgggtccgcgcactgcgtcgcgccggggtcggagcagtgcacggtgaagttgccgttgtacggcccgccgccggcgcagcacgcggtcagggcgtcgtcgaacccgctcgccgcggggttcgacacgagctccatcacctcgccgtagtagtcggcgtaggcgatggtgacgcccgggtgcgcggcgcggagctcggcgaggcggcggcggaggagcgcgttgtggagggcggcgaggccgtcgttgagcccccggaggcagcccgtggcggggtcgcggtcgccggcgccgccgtcccggaagaggaagaggaggcgcgggacgcagccgagcgggaagaggcccgggacgtagacggtggtggcgccgagcccgacgagctcctcgacggcgccggcgatgtagcggacgacgcgcggcaccagcgggcgcacccactccagcgtcttgttctggaacagcgggtggaggtagtcgttgccgccgaactcgcccaccatgaacaccgacctcgccatcgcctccttccgctctgcaaaccattttaaccattttggttcatcaccaccgtcattgctcaaaatttcatgatttttttaaaaaattaaaaaattcgaaaattttgaatgaaaaaaatgaatttgaacaactttgttggtaggctaaaacaaattcgattttttggcctggagtttcagaaattacaacgcgttccaaagttggtgttcgctttttattaagataaagatgaagttatggcatgaaaaacaagaaaaaacattagtacataattaattatattttaattattacaaagctgaaaaaataaattatataatattttaaaacaatttctatataaaaatttttcacacgaagtatatcgtttagtaattttaaaaaatgttatcagaaataacgagatctgactacagtttatgggctattctccgtacgttcgtgattaacagtgccgacagtaatgcagttcctcgcgtacaaacaaggtacactgacctacagtctcaacgaaatgctgctgattcaatgattcatcggcccaacattccaacaaaatcatcgatataattcgctcatcgtcgtgttacattaacagtgaacaaattgaatcgtacacgcagcatgcgtacgaattaaacagcaacatcaacatcaattccagttaattattaatcatatcgctgagattaataatcttatctagtttcatattataagacgactgactaagtcaaactgtttcaaatttaatcaaatttataaaaaacatagtcatatttttttacctaagataaatttattataaaaatatatttaattattaatttaataaaactaattttgtaacataaatattactatatttatatataaatttaattaaatttaaagcaatttaaaagtcaaagcatcttacgaattgaaatagagggattacttaattagtataaaattggcgatgattaaccttgttctgtggaggcgagcatggcaagaaccttcttgaaccagccgacctggacggcgagggagtagggcgtgatgccggcgacgctgaggtgcttcttcttgaacagcagctggttcagcgccgtcccgctcgccaccgcgaagttggcgccgtaccggaagtcctccctgctcttcccggccaagtacggcgtccagtacgggaaccccagcctctccactgcatcaatccatcacatcgtcgtcatcgtcatcgtctccggcggcggcggcggcgctaggtagagatagctaagctaagctcatgggtggtttgcgttaccgatgaagtcgacgatgaggcggccgtcggaccagcggccggtggggcggcggaagaaggtctcgccgtagggggagcgggcgacggggcccggcgaggtggagtagtggatgaagttgccggtgtcgatcagcgagttgccgaaggtgaacaggtggctgtagcacccgccgctcggcgccgtcgccgtcgtcgtcgtgacgttcgccgccgacgccgtggctgcgcacaaggctaaggcggcgacaagtatagccgccactgcgggagcagacaaccgcgccggcctcgtcgccatggttggagcttggatatgcaaaatggcttctccagtggcgcctctcctttctcgatttgagcctatatatagagagattattatgactcggctcactgcaaaaaaatgcttacgccaaattaattaccaaaatgtttcggttagaatgtggctttcatcgggaagaagacaattttttaaaaaaaatattacaaaatttcgaaattagcttttcgatcgagctggattcattggttatgatattttttaagattgcggttgactttctactgcgtttaaaattttccatttgttttgcaccgtatttcgtcaactcatgcacagtgatcaccctttaaagtaatgctaagaaggatttggcagttggggggtcagcataaacaagaatctcagacggattaaaaatataaaatttgtactataagttgtaattgatgtggcgatttggtgatcgaagaactgaagagaaacaggaattatcatctgctgccttgcgagtatagtatgagtgatagagacgcgatcacgcggtcaattaatttcgtacagaaggtgtggttcacgtggcgtatatattaatcatttgtgcagtagactgcttgttttattctaattaagaaatgacgttcaagtgcaatccttctgaaaataaaatataataatcatatcgagtgttattagccttactccctccgccccataaaaaacaaacatagaaatgaatgaaacactttagatatacatatattcagatttgttgtaataatgtcccgttcatttttttatgggactgggagtatggttgaagagacatcacctgcaaaacattatgaatagtacgaacgattgattttgcctgtatctacgcggctacgcccatgccttcggccccaacaataatgggcctcacgtggccagcattacccttttggcccaataagtacggccccacacgtaggccgcaatacattcgggcccagataatatgggccgcatgtgagcccgcgattacgtttcggcccaactagcggtctacgaggcccataggcgggtgagccatcgcacctatagacttgccgttctcgcgacgtggcctctcccccgatctctctctctctctctcctccgcatcaccaccaccgccgccgacgagctccggtcgccgccggcgagaggcgccgcgcgatccgggagatgccgccgctcacggggcccaagtccggggacgctctcttcggcagcgtcgagcgcgtcgtaagttcccgcccctcctccccccctgtttgcttcacagggagtcagaaacccccactggatctgggccctgatctgcttcgttttgctcgcagaacgcggagctgttcacgctcacgtatggggccatcgtgaggcagctgctcacggatctggaggaggtcgaggaggtcaacaagcagcttgatcagatgtatgtgtggttcttctcttcctcggtgtctaattttctggttcaattttagggagtttcgtgggtactttggaccgatcgtgttataggagtaggaattcggaaatattcactttttgccacccctcaaattacagtgaagcagctgcaatggcctcagtaagaggatctatgtagactttgctatggaattttgagcaaactaagtaacgttcaggtagtctgaatgattgaagtatttgtaaaggtaacttttagtaaacttcttcatgaaggtgtattacagcgatttgggatttagaggttcaaccttatacctggataatctgactttccaatttagtgcagattttacactgcgacaaaatggtaattgatcattttgatatgacatttcacgggctcacggcaccttatattcacaacactttcatgtgtcatggtccaatgtggggaaataatatgtacaaatttattatattccagttttggaacttctttacttagttaagcactaatggggttagtgtgccacgacaattaatatctccatatgtaaggatgatattaactgaatcttgactttgaagtagtagataataaatcaagtggttatctggcgaatattgggattcttatttagtaatcaatatctatggcttgctggctgcattttttcataatttactactaccatctgcctttgccttttatctgtttcctaaataagtcacagctatatttattttcacttcgcaggggctacaacattggaactcggttggttgatgagttcctggccaaatcaaatgtatcaaggtgtgttgacttcaaggagactgccgatgtcattgcaaaggtatttcgttaaacttgttattatatggttcagattgaataggaacattatcagtcggtaacattattacatgtttccagagcttattgcccttattcagatatcccagacttggtggtgcattaagatatgggtgtatggtctaaagtttttttgtctctccttaaaacagcttggattcaaaatgttcttgggtgtgactgcaactgtcaccaattgggatgctgagggtacaagctgcagctttgtattggaggacaatcctcttgtagattttgttgaacttcctgatacttgccaaggtcttcagtactgcaatgtgctaagtggagttattaggggtgcactggaaatggttagtttttcagctacctctaccttctccttccctcttcatgttgaacgatctatagatgcatgacaggatgttgtcgttttcgtatcagaattctcatggtcttgttatacatatttaagttagttcataatgactagatgactgttaaggtgccatcagcaaccaacctgctctattatgtggggttatgccctcgtgtttctcaccataatagcataccaaaatttcctttatcagcacatgatatttttgtacttgtttatcagtcgagagaaatcttttacaagtgctactctgattgaattgcaattgtcatataggtttctatgaagacagaggttacatgggtccgtgatatgcttcgtggggatgatgcctacgagatgcgagtgaagcttaccaagcaagtcccagaggaatacccctacaaggatgatgactgacttgacgatttcgtggatagtttctcagttctcacatgatgcttgtttgctcgtctggatttcccttcttttctttcctctgtgactgtgattctggttcgacttggctggatgctacatgagatagctgtgcattatattttacacttgcactttgcacggcagcatgtattgtagaaatctatcataacttctgaatttgtttgctaagtttgacaaagcgtttacgatccatatgagatttcttctagctgtgctgcccggaaatctatataaagaggctttttagcctgatttcatggcacaccttgttcagcggttgtgcttctccctgataacagattgttagggaatggtctcatgtcagtgataaaggcaccgtgtttttaactacagatgatctcaatcctgacgataatggggttaccccttctctgtggtgagctgcggttaccgagtaaaagcaagaaaaactagataatttttttatcaaaaagtagaaaaaatgcttaaattatttttaaacttggtcaatatacatgtgtttcttttttcagttacatggagacgcgcaaacattactacacatacaacaacacaccagagaatgtcccccctaatacacacttaaagagatggaagtttgcgtcatatctctggtctcactaaatagaaaattctgttgaaagctcacttatgtacataatctttgtgggcaacaggatttgaacctaataggagtatataggtggctccccttaagtacaagcaacgataaaagaagctcgcttcgcggtttccaaatagaatcagctctactcctcatcgttgttctatatgaaatcaatcaattcgaatattcaaattctaaaatttaattttaaagttaattttaaaatgttttaatagtaccttttttggtgcaaacttttaagtctctaagaatatactcataaatattttttggtggctaataatcggacccttctgttcaaaggaacggttaaatggttaatgaataccccgtgttgctgtggaaaattaagttacataattgtacaaaactaaaaataatttgatataattttgagcctaaaagtaattgagattgcatgtttttaaaagagaagaaagaagagacaatttagattatagatctatctttcaaatgttagaaataattaggatgatataacttatcgatagaagagaaaaatggtactacatccatattttaatgtatgacgccgttgactttttatacgtttgaccattcgttttatttaaaaaatttacataattatcatttattatattttaacttaatttatcatcaaatattctttaaacatgatatacatatttttatattttgtataaaagatttgaataaaatgaatggtcaaacgtataaaaagtattaactaaggccgagagtgcgagtctgcgagacagtaaaactgtaaaaattccccaatctttcacccacccaaccagagaagtcgagaggaactcatctccttccgcttgacttgcccccattcgattcaaaccgacccctttttctttttgctttctgcgttcctgtcaccccttctcgcccctattattcctcctgtcctttcctttcttcgcctttcctttctttattttcttgtcttttttttttttaaataatattctcttttctctttttacttatttactttttnnnccctcccgcccccccccctttttatnnattnttttttcttttaatttgttccctctccctcttccttaacaactacgccttttccttttttactttgctttctttattttctatttatcctgctctcttcttttcctctctcccctttttttaatatcg

SEQ ID NO: 5265 - DNA, 8324 bp, Oryza sativa
ttaacgtgccatttgagtcccaatttttctatggttggtttttgtgtgtccctaagcgtgaaaaaaatatcaaacaaataaaacaaaaataaaaaatttcggggggggggggcgccagccactctggcgcactccctagccacctcagcatcgccccgccacatcggcaaggggacggcgccagagaggctggcgccatcctgttggacgacggcgccagccactctggcgtcccaaaaaggaccatttttgggataagtttttctaggggtctatttgcgaaataagtttttcaaaaggaccaaaatgtgaaaaatccacagtgtagtaccaagatggttttcagttttcacctgaggggtgatccatgtgacagacgtacagtagttgtagtacctttgcaggtgttctgaaccagtattctccattatagtgccataattgacaatcggtacatgataatcggtaatgccgtgcagagtgttttttttttctgaaccagtattctctatgtcctaccatgtgtactcctaatttgtccaatacaactatactgcatttttactgctacatatctgcaatctgttagcaatccaaagtcccagagcttcagagagaggggggagttggaaggaaacctgatgcaggatagcagtagcaccaatggtcagaataagagcagacaagctttatatcatcctaacccaaggaccactattgatctaaccgtaaagacaaaacaatgacaaaatgacaagagaaaaattagagctttgtggtagagaccatgtgcttgagttccccagatgagcaggtttcaacactggctgggttcttgcgtcgtttgtgtagtactccctccatttcacaatgtaaatcattctagcatttcctatatttatattgatgttaatgaatctagacatatatatttatctagattcattgacatcaatatgaatgtgagaaatgctagagtgacttatattgtgaaacggaggaagtactataatagtggaaaatgctagaataacttacattgtaaaacggaggaagcactataatactggtaactttgtaaaccttgatttcagagggaacccactctattacaagtgcgtaccactactagtctacacatcgaaaattccaagttgcaaaaaggaaaaaaaagaaaagaacttgcgtccagactcacactcctaatttttaagttaaatctacagtacgaaagggcccagcccattgctctgtcgggctctcggcccatgatactcctaatttctctctgggtccccgcttcgataaggcccatataaagccttgaatagaagaatcgagcccatggacacacggctccggctcgtccacgcccaatcgcattcgcatcgtgattattctctctcttcctggtcacactcacgccaccgccacgggctaagattccaccggcatctttgcccttgataacaccgaaagttttcccggtttccgcagagccgagccgagccgcgccgtgggcgtttccgccgccgaagctttggtcatgcagcgcgaggagattggcggcaaaaccgcatccaaccgtccatgtccccggggacggagctcctctaacgtaaagtgaaagagccccacttttctctaagggtctgtttggtacagttccaactcctaaatataattttaagagttaaatttagagtggagttgtggagctgcctaaacccagctccacaactctagtacattttgtgagagagcttcacccagctccactcccagttttagtggagctgaaactatttggctgagctctagctctaggagaggtgaagctggagctgtgctaaacaggccctaactttatgtcagagaagcctcttccatccccggggcggggcgtcgtttcagggaatgggggacattgctatatttataacgacacaaaatcagcttacaatattattgtttaatgtttttttaatattactgtttaatgttagaggatatgatttccgttttataatgtaagcaaaatttagtcaaagattgacaaattcagtgtcgctcaagagctcaactaactacaactgcaaaccctataaaagaaaaactgaaaactgcagaccagtagtagcagtacacggaacgcagcagctcagcaactgtggttcattgtgttttgtttatactccgtagtaaagcgtaacgaaccgttgggcgtaaacggcggcggatcacacgctcagtggtacgtaggagtagcggattccacgaatacactagtgtagccgtactcgtgcggagcaaataatgaatagtagtgttagagtagataatagcaggctataagccagctataaacatattttaaagaagtaaagaaagagagagaaaagtagcgggctatagatctatagctagttgcagtacggactttaagacgtaatgtgtgtatgacaggtaggaccaggtattaatagtatagtaagcaactattgtacgaattggctattacattggctatagatgatttgaagctagtagttggatatactattaaacttgcacttagaagaactagtactactgtactaggctttcttctccaccgaaagagatggtcccatcgaaaccacgtgggcgacacgcacgcatgtccttcggttggtccattttgttaacgtgttccatgcatgttttgttttccttggcaagataagcaatgccccgtcccctgcaggaataacttactctctaagtgcaagcacaataaattgcatattagtagtactaagagcacccgcaatggtaaagtaaggtattatctataaaaacatgtacatctcagcaatatactagattaatagtaaaccacttcaatagtatgtctacatgggtatctatagctctctaatccattgcctcgtttttctctatagactatctccaggttagtagatagctttgctctctctcttcatttaatctcttccaagtaggaaaatatgctgacatatatctctcgtagagagcctatatataaccattgtaggtgtcctaagtactactgtcagcgagtcacctgagcagtttagcatcgtaatgtggcctttcagtatagtatatatttggcactctccattattcttctctggtcacaactctttctccattattccaaccttcgatgtggcctttcagactttgagtacaaactctttctctagccacaactctttcctgggcaggtagtagtagcctacagtatttgcctcgtggtgctccgttgtgcaacgcaacgcgactccgagattcgtggggcttgatgaaactggtagatacatatttcctccgtctcaaaaaaaaaaagacaaaccctgaattttcgtgtccaactttaactattcgtcttatatgagattttttataattcgtatttttattgttgttagatgataaaacatgattaatactttgtgcgtgacttgtctttttaatttttttcattgatttttcaaataagacggacggtcaaacgttggacacggaaaccagggtttgtcttttttttttgggacggagggagtacacactccacccacccgacacatcgggttctcttgccccatacccacacccacgatgtctaaatactcccacttaaatacccacacccgtcgcgggtacaaaactgtcctcatacccatacccatgcgggtaacgggtatccaacgggtacccatacccatataattgacttgtaatatttatagttttgtactataattagccatattagagctgtaaactatcaatattttctctagcaacaatgctattaatattagtgttcaaaggcgagtaaaaaaattatacaaccatattacataatcaagaaatcaaataataatttcatataactagactaagcaatgctttaagatgtgaaaggagttttatgctatgatttagtagtcgttgagagttataatactaatagttttagattcaatcaacgggttttttctaccaacgggttggtgggtacgggtgggtaaaaaacagacccatacccacccgttagtagacccatgggtataagagttagaacatgattggctcctaatagagtaaaaacccgtcgggtctcgggttatgggtacattgccatctataggcgggaagacacggaacacctggcagcctagcctgcctggccgagactctcccgtacacgcgtcccctgtgttgacctgaccccatccatcgcaccgttacaagaatcacacgcacgcgcacgcgcattcgtcgacctcgacccagtctgcacagcacaccacagcacagcagcagcgcgtagccgatggagccctacgcgtacgcgtgcgcgtgcgcgagcccaaggcggcgagcgagacggacatgtgggttgctgcggtttgctccccccgcgaaaaaaaacccaccgccaccgccactccgtgccgtcgcgcggcgcgcgggggtttgtttgggcttgggccggcggccgtccaaccaaaaggctgcagcgagtggcccactgctctgacgtggggatggaggtggcagtggcggtggcacggggggtgacgtcaggttggttgggttcacggcgtgagctgaccagtagtagggagtaggagtagctgctagcggtcagtcaacctagaaaaggcccaaatttgacaaccggcagcagtaataactcctcgccataagagcaagttcaatagtatagcccactaccagctccaattcatctatagccaatctaatagctcatttatacaatagttacatactacactattaatatatggtcccacctatcatacacacactgcgtcttggagttcgtgctacagctggctacaaatctgtagcccactacccttctctctcctcagttatctccttaaaatatatttgcagctggcttatagcctgttattgtacctgctctaatcggcctcctcccactttttcatgcagtggttcgtttccctgtaaaaagatcaatttatacagcactgtactaccactcctaattactcctatctaacaccatatttagacactaaactattactgcaacgaatataaattcattacactcgatattgtttaattgtattagtatattttaaaatggatgaagtataataatatagtactgaaatatactgtactggtattccagcatttttgcatctggttttgccttgatcaatggtcactatttcgttttcttttttcttttggtcaaagcagagtactagcattgctttgcttctcggatagttggatgtcatgtttgacagactgcttctacagatcttttttaaccttaggcgtccattactgtgtgttgagcagaagatgcacgaagtcaaaccgcatgaaaaaaaaaactaaccaagtccatgtatatatgcaaagatattcacggtggtattaatcctaattatcgtactactaatagtacattttgcatccccgcaaaaaaaaataatagtacattttgcagttggaatatactacaagtataattgaacttgtttgctgttcggcaaacggtggtccctcgtacaaactggaccaactaaaattggatgatattaacgtcctctgatcctaaccaactcgatcatgatttattcctctccaaatatacgaaattaaatgccgcatttatgcgagaatggacattgaaattgttatgaaatgaattagctccactaaaataatacatgtgctctctcacctgttattttctttttcagtagattccttttcacaaattagagacaaataatctagtattgaaatgttggcgggaaccaatagcatatgtaacttattgtgtagaaaaggatttgtcttgaatgtttagacgccatttgatcacacaccacaagttcttttttctctttaaaaagacttactagattttatctgaaaggtgatgagaaatcatcgtagtatacgatcactactccataaaaacggtaagtaagataaatcaatcaaacacacctgacatctcatacttaattatcatcaatattgatcggtaactctccgagagcaataattcctagctaatttggtgtacgaacaacaactaattagctgatatatagcaaatttcaacaagtggtaaaaggcacatcaatttttttatatctcaaaaaggtgttatcacactacaatcactactccataaaaaaggcaagataaatcaatcgagcgcttcatacttatcatcaatgactatctctgataaataactcactgagtacgtgaatttctaatttgctacggagacaacaactagccaagtaatagccgatatgtagcaaattccgataagtggtaaagttgtgcactaagaagaaagtagcaaatatattctatttatgtaactacatcgtttcttctcgattttatctcaaacaggtaatgagaaattaccatagtacaatcactaatcacgaaaaagacaagtatgagaaaccaatcaaacacatccagcgtcttatacttatcatcaatgactatcttcgaccgttaactctctttcaacaaaaattcctaatttgcaacacagacagcaactagccaaaacaatacccgatatgtagcggattccgacaagtggtaaagttacgcactaacgagaaagtaaagcaaatatattccatttacatagctacattgttccttctcaatctctccctctctcccctacagttcccctcacttccaccagtggtttccccacaacacaagcagttcaaactccaataatccgtgtgtgcccatagcaatttcgtttgtaggctaagctcaagttagagcaatgggccttggcggcgcgagaagtctcagcgattggcttaatttcaagttagtctaaaccaaaagatctatcttgtgcgtgtgtagcttatttcttttgtacagttattctttctatattcaatgaaattagcggctcaccgattcgcttaaaaaaaatagctagagcaagtaagaaaaacacattcccataccggcacggtaaattgctacggccacacgggaggtgatacagctgatcggctggagcaaagcaggatgagattgcggctcgtaatctgcgagcaatcgcaagttcgcaaccaccaccaccacaatctctctctctcggttggcaatttggcgtgtcccctctttctctttctctctcctctacctctcggcgtggtggtggtgagcgagagggattgggatagataggcacgcacagggtaggggggacgacgagacgagggatcaatcagaatttagtcacgcacccaggaacaccaagaaaaagaaaaggaaaaaccttttctttctttcttcactttggttgcgttgcgtctccaatccagcgtgcgttgagtagatagatggtaatgccgcccacgaatccgtggcgagttcttgcgtcgcagagtggcaatctgtaggagtttctctgggggtttgttttttttttttttaacggaagaacagaatcaaatcgaatcgaatcgaaagagaacgtaaattaatctgtggtttcttggcggcggatcgatcggcggcgatcggccggcgatggcgccgccgtcgatggattactggctcggcttcttccgcggcgccggggacagcatcttcgacgccatcgacgcggccatcgccgtcgcggcgtccgaccaccccgccgcgctccggtcgaggcgggacgccatcgccgagcgcctctacacggcgcacctggtccccggcgcgccgccggcggggccccccgcgggcggaggcgccgccgccgccgacgcgccgacggcccagctcctcctccaccccgagggcgccgccagcgtccctagcctctgtagctccgaccgcgccgaggtcatcaccgacgacggcgccgtccctcgccgcgacgacgaccccgtcgccgccgagaccgagcgcatcaaggccatcctcctcaacgaccaagaaaaggtcctcctcctcctcctctctctctcaccatcctccacttctcgtactgaatctgttctgccatgttgatgcagtcggaggcgacgttgctcgagctgctccggcgactgcagcagctggagctcacggtggacaccttgacggtgagaccgccgccgccgccgccgcagccatgccaaaccaagctcatgtgttgactagtgtgttcatgcggattcgtctttgcaggttaccgagattgggaaggcggtgagcagctaccggaagcacaa

SEQ ID NO: 5266 - DNA, 20331 bp, Oryza sativa
ggtggtggagcgggagggtccccagtgatacgactgggaggcctacgacgagctcgttcgcatggtggagcgcgccggcctccgcctccagatgccggcgttctcatggtggtgggacaacgcagccgtcgcctccctcaccttctcccgcatcgccggccggccgtcggagctcctcgccccgacgacctcctcccaaccgcctgccggcccgcctagccccagacaggcagagagagagtggagggggaagggagaggagagggaaagagagacactcacgacgtggcagcctgacatgtggggcccacgtgggtctcacgctgattcagcagccacgtagaccaaaaccggggtcaaaaccatcgaagtaaaccggttttaattagttaagggacactggatatctggttttgcggttgggggacgattttgtaactcgatgacaagttgagggaccttaggtgtaccttttcctttcagatatttctaggcttatgagttctttcttgggcaacaggcccaaatgtattgggcttgctgatgggtttatggcccattcctctaggctggagttttttttttatttttacatttttattaaaagaattaaaaagtaatttttggtttcaaaaatttacaaatctatacattccacatcctcctttttttttaaaaaaaaaaccctccaaaagatgttgaggggcctaaatataaaatttccaatatagcttgttaactctatgattttgtaatttaaaatatacaccatataaagtcggatgaaatcaaactttatatcaaaatcgtagagctcaaggagatatacaactttgtagttaacaatatcgtttagatgtccaaatattcgttacaaaattcaaaacaaattttaacaaaatctcaaatctacatttcaaacgacatcggatggagatcaacttggcaatctgtatcattatcatcgtattactgagagcaagaacagtagtgtcaaagaactctgttccggtaagctaagaactaaacatgacttgcacagttgcacttggcaaaaatgtggtttaggatatgtcaaacatttttttttggtaatatacatggactaattaaaatgaacttccactcaatagtttgtttgcaagcaacaagactgtctggtagggagttttctgcacgacaacacaacccaatggaaacgttggttagagttgtggatggtatgcagtttcttggcctcttgggcattggaaagtaaattttattgtaccaaatctctgtataaataatgagaaactctgaatattaaacatttcattcatgtggttactgaatcgacaccgccacaccggcttcatcaagcggttgagattattagctgttgccaaggggatgatcagtttcagtttcagttaagtcggtgcggtacaaacagctaagcacgtataatgattgaaatgtatcttagcccaattcatctggagtagatactttagaggatgcatgttcttgacttcttggtgaggaaacctcatttcggctgaagaaaacctagttggcacttggcattgtcagagctgacttttgttcttctcttctgcattttgcctggagttcatggctaatcagcaatgacacggtttgtaatcacaagttaatgtcttccccggtcgctgttgttcacaaggtgagagacctttcctgaaaccagcagagggagctttgccgctgtctgaagcaaaaatgttaagcaagaaatttaatactgttcaatttgattaaactcaccgctctgcataaatcacggagtacatgcattatattaggcaatcaccattttgtaaacaaatcatgcatcctgccggtggccatgttgaatgacgcgttgctctccctactctacggatgtgattattgccagcgaatctccaactctgaaactctcaagttcagtttatcagagggttcgcccactgaaactctgaatttccggagacacacatgcagacttatccaagcaacattcgctacaaacacctcaaattgaactcccatatataatttcatcagtccaataatatgttaacgcgttgttaattaaaccccggacagattgcataatcactggaaaagcaaaagtcgcaagtcaacctctgaattattggctcccatgttaccgttcatgctggcttagcttaagctaatcctacattaccacgcatccaaccaacgaactaaccatacaaaatcttctaaccaccgtacgttctcctcgcactataaatacacaagcttcccaagcaactgaagcaaaaaagcacacacaacttcagttcagtactcgtagctgcttctgcatttttgctcgatcgattcatcagccatggcgactaagctgcttgctgctgtgatcactgtgctagctttgctgggccatgtcatgggccaaggagggtacggcccaagcccaagcccaagcccgagcccgagttcgagcggcggcgggctcgccgtcggctactacgacagcgtctgccccaacgccgaggagatcgtgaggggcgtcgtcaagaacgcggtggcgcaggacgccggcgtcggagcggggctcatccgcttgctcttccacgactgcttcgtccaggggtgtgatggctccgtcctcctcgacgcgacggcggcgaacacgcagcccgagaagctggcgccgccgaacctgacgctgcggggattcgaggtgatcgacgaggccaaggcggcgctggaggcggcgtgcccgggcgacgtctcctgcgccgacgtcgtcgccttcgccgcgcgcgacgccaccgtgctcctcagcggcagcggggtcgacttcgccatgcccgcggggcggctcgacgggcgcgtgtcgctcgccagcgaggcgctcggcatcctcccgccgccgacctccaacctcagcgccctcaccgccagcttcgccgccaaggggctcggcgtcggcgacctcgtcgtgctctccggcgcgcactccgtcggcaggtcacactgctcctccttctccgaccgcctcaactcgtcgtcgtcgtcgggctccgacatcaacccggccctcgccgcctccctgacgcagcagtgcagcgcgaacgcgagcagcggcggcggcggcgaccccacggtgatgcaggacgccgtgacgcccgacgtgctcgacaggcagtactacaccaacgtgctcaacggcagcgcgctgttcacgtcggacgcggcgctgctgacgtcgctggagacgaaggtggcggtgctggcgaacgcgatcatcccggggctgtgggaggggaagttcagggcggcgatggtgaggatggccgccgtcgaggtcaagtccggcgccggcggcgagatcaggaagaactgcagggtcgtcagctaattaatacaattgcatatatcaagccatatgtttaatacatgactgaaaaaaaaaccattcaattacgaacttaaattgagctgaatttatacattggtacatgatttaatttattgatttataccagaagactgtattgttactcatatttgttgttactgctaaaatgttacagtaatccgacatattgtagtataacattgtaatctattctgttgttatactctttttttttataaaaaaattagtacataacaatttggatatgacatgcaagagatgagtacatgtgcaccggagttgtaaattgactttcccaaatgttgcatgcaaatagaataccaaagaggatttggtacattttcatccgagatgacagtaaacgccagcaaatgaaaccaaatttgacaaaattaatcaacaaataaacacttctcccctgcaagaacagaaccaaagcaagccaccaacccaacagtagatcactcgcttcactctcaaattgttcttcagatcgtggcacaaattgttcttcagatcgtcgcaatcgaaataaaaaatgaaagatggattggaacgagaccaaacgtcagatcatccatggcggccactagcttagctcaatcagtagctcgctagttgacgaccctgcagttcttcctgatctcgccgcggtgggcggccttgagctcgatgctcgccatcctcaccatcgccctcgcgaacttcttctcccacgacgccgggagccgcgcgttggcgcgcaccatcctcgccgtcgccggggacgacagcagcgcggcgtccgacgcgaacagaacgcggcgcgcgagcacgttcttgtagatcgaactggttgtcgagcgcgcgcggggtgaccacgtcctgcgccaccgtcgggtcgtcgccggcggcggggctcgccgtcgccgggcaccgcctccgcaggaggttcgccagcgccacggccatgtcggacggcggcgaggccgaggcgaggcggcccggcgcgaaggaggagcagtgggagcggccgatgaagtgtgcgcgccggagagcacgaccacgtcggcggcggcgaggcccttggcggcgggccgagcttctccggccgcgggttcgccggcgtcgggtcgagcagcacggacgcgtcgcacccctgcacgccacggggcgcacgctaatcaattagccggcgagcacgcacctcgccgtgcgtcgccattggtggatcgatgtgcttaattacctcgacgaagcagtcgtggaagagcatgcggatgaggccggcgccggcgccggcgttcttgacgacggccttcttcacctcggccctgacgagggcctccgccttggggcacgaacgccggtagtggcgccgacctcgaggccatggcacgccgccgcggtggctaggaggagcaaggcgcatgcggccactgtagcggcaagcttagctccggccatggcgatctatccctagctagctactgaagtgctgcttatctggcaccttgcgaacatccaacaacggcatgaattctttcatcgctgctagcagcctagcaggtttaccagccatgtaatcaggccccaggaacatctgggactgcgactgaaactggcccatatggcccaaatcacaaggccaccgacggcctacctagattctgattgcaatcaccattcacttcagatttgcagcactgcagttttcggcatgcagcttgccaagttgcaggcagggagcgtcgaacgctgtaaaatgttctggagattctgaatttctgttatctgatgaactgtgaacttcgactcaaggaggcacagggcatcgcttctttctctgaccaaaggcaagtgatttgatttcttttagaaattcagttaacatcacacgactcaaacaaaacgggtgaaagctggagcgaaaatgcaaaatggagttcctgtttctatcaaagcaagagggaagaaaggatgacagatatatctgaactctgacgaggacgggtgttgttttgtttactggcaaatcaccaacgcactggcatcagaaatgcaaaagcaacatcaacaaccgtactggatgcaatgcatccatttcgacgatctgtcgatttttattgaaaaccaagtttgttttcaggcatgtttagaacaagtgatgtagtggaatacaagtggcatctgaccaagaacacactctaagcagccaatttcctcataaatacaccctttggagcaagaccaatatcatcgatgacaatacagttttattcagcctgcttccaatattgaattgttatttctttttccctagttcaagacagcaagagcttcaagaagggaagcaacaaaatgcatctggacctcctcatcgatcgtcaagaacaggggcacatgtacaaacagagatttgatgccgtgttgctctgcgaaccgaagagaatgataatacacatagttgcatacaaaccgaccagcatcgtctgatggcattacatcgtagcctgtcttccggagtgacttggtcaactcatttaccggaagcgtagtctggttgttcatgaaaagttcagataaatgtgattagtctcaagatcaacagtactctcaatccaaaacttgaaatatctgatgattgacattttattcattcaataatgcgcatatgaactatctttgtttgttatcatacaggcaacatattcaaaccacataagtccattatggtaggttttaaacattccattatgataagttttaaacacaaaatatgggtattctgaacatgtggggaaaataatagggggcatttgtgatattattttgtagagaagatcgtgctgtaatcaggcaatcacagattaccattgtccttttgaatatattcctaactgatttgttcgtattgaaagaaataggaagaaaagagatgttcaatagaacttctgaaaatcaagctcgcgtaggtaacgtaacagtgaagaaagtgatcgcagcagacctatggtgttctatttggcagtttggacttctttttttcattcaatgggaaggtgtcttgtggggtcatggccattagaattatgtggggggaaaggactagtgaactatgaaaagataatatgtaactctgctgttcgtagctgtactttcaacaaacatccattaatttccagacaaactttttttaacttgtacctctcttgtccgtgagatggctccatccgatggtacaataggaaccctctgcacggaacaatcaaaccggtaaacacaatgtcaagatatatagacaaagataagtaattggacaaaatcacaacctgaggtttccaccctagctcatctggacaacggaaggtggcttcgttaacagcctgattctcaagagcaaaccttgttgcaccactattaactccaaaatggatctgaacaagtttcaaatgataattagtttgactattcgagtggcattgaaggcaaatagaaacttccttattctttttctgataggacagcattgcaatacgcaaggtgctgactgcattacatcattatgtaatatggaatcaaggaaggtggataccaacccaaattacttgcccctgagccgatgacccattctctctttctgcaatggcagattccaaaaccttatataatgtgccaagtgccccctgccctgcagtttcaagcactgtgcagcttccaagtacaaggtttttcggcaatcctttcttttctacgaatgatttaagattgcccacaattttctcagttgggttctcagcaaccccatggaacttcttaaatccggtaacatggacagtaacaactgaaggtccttctgaacccatttacccttatgagttatgagagagaacagaaaacactatcccaaaaatctgaacagaacaaagatcaataaatggataagtattagcaaggcataaactacaccagacaaaaagcaggatgtcacgaccatcactgcatcattatgaacttgctaaaatcctaagcatcaggcaagaagaaattatagcgggcagtttcatatgcctcaatgaggctcctgagcatacaacatgcaggttgcagggaggttaacagcagggcacacaaaaggctgtaacactgtaaaagtaaaaaatgtatgacccctaagtaaatgtgaacaagaaccagatgattttttttatctgcacaaggacgacattaagaaccacaatctccagaactgatgaagcaatcattgttcttcctttcaaccaaaaaaaagaaagcaatcattgtcctaaagattttattaagaagtgaacaactcaagaaataatatagtctcacagaaggcgagaacaagtaggacaggtaacctaatgctttggttcaaccgaagacaaccttatccaaattcaacactaaacagtacaaggttgaaggctacatcacatatgtgatttttgtctctgcaaaaccaagcctgaccagtgaccacaagaacaagagcacaaaaattgttctaaacagcgaagctcctacccagaagaaactaacaagcaggtacttgtagacttgtggtgggtacttgccatctaactttgccacaaccaactcaaactcaaactcacaaagaacataaattcactaaataaccatcacctatcctatacgaatcgactgaaacttcctgaaatcgatctgcacctatagaaaatgcacgcaaagaatcctttcttgaaggatgttatgctcttaatagtcaactccacgtctctaccgaaaacttaacagcgcagaggaccgcacaaatcctcaaaccccaattctccaatcaaacaccaggcaaggcatgaacacacaccaactgcagcaaaatcaaagaggaaattcactcaacccaagaaccaatccagccaaagcgaccacctttgaggccgatcacctcagaatcgcacccccaaaccccaccaaaaatccactgtaagtcagcaagcaaagaaaccacagcctacacgagcatccaacaacaaaaaaaaaaagaagaagaagggaacgaattgtgcacgggcaaacaccaccacccaggtccccaaccatcagcgcccccaccaaaccacaccatccaaaggctcaaagcacaaaaagctctcaccttggggataacgcagcagcagcggcggcgacgaagaaggaatctcgtagcaatttttctcctctttcttttttttttcttcttctcagtcaccgcaagaagagaagaagaagattcggggggatggaaacgggggagtggacgatgagattgcagcgaggggaaggcggagggaggcaaaggcgacgccttttaaagcgcatcgcgcaccaccacccagtcgatgaggagtagaacagtcgaactgcagaaaagcaatcgagagaggaggagagcgagacggaggagaggtctctcgtctcgtcggggctgtggctgacaggtgggccccaccgcgatgccaacgccgcttcgtggactcggtgcagccgcaagatagctgcgcacaacatactactgcattgattgaccgtgatacatggttgcatgcaaaaaaaaaaacacgaaattacggatactttagttaaattataaaaaaaatataaatttaagatgatgttttataaaactatagatttagcactagatttatcatagaacatatttaaggtgaagtatcgtaaaactacattttcagtaataaaaattattataaactactacaggttttggagtttaaatccttagcactagtgttatgtttgtgggtcataaacatctaagtttgtgattagattgacactaatacaatagttacctgctcagttttctttcagatggaaaacgagcactgttagttttttttttctttcaaataactgatggggcagtttgtttttggatattattcatcgtacagaaaaaaaaatgtaattattggcttttttctacttggtttattattaaatgcacttaaacatttttatatatttgcaaaaaaaaaataaaaaagatgaatggtggaacatgtatcaaaattcaacgacgctgccgtgtattaaaaactggacgaagtaattttatagggatttagactgtataatggatatactactcatgtacatgtacatgtacaatggatatactcatgtacagtagcaggctaaattatttccagaaaaatctgcatgtatattgtatcatatcatattccgttttgcaggttgcagatataataatttagcaaaatgctgacgccaaagtttggcaagtaggagcagagataaggccaccagattcaggctgcagcatttggaattcatccaaaaggtttggttcagaaaacagaacagaacagaattgcttcagaaaagaaaaaggaagaagaaatcatgacaaaaccagcgtacgagcttgacagactgagcccacggctctctgttcttgcaatctccaatgatttgcagcagctgcgcgtgtactctgcttatgatcttatggttgatgcagaggccacagatcgatctcatatgtttcttattagttctcatgagcaaggtcgttaaaatcacgattctaaatcgaaagttctaagtaggatgacaattatataattatatacataaaaaccgtaaattcttcgtacaaagaattgtagaatcacacacttaaaaaacgcgaatattaggaagaacctaatatcgaataattagaaggggtgatgcttcaaatccagatcgtctagcctaccattttgtagagctaaccggaagacctctgtgttagattaatgggctaggcccaattaaatactaataaattccattggcccacattaagtgctatgggtaataataccacattggaaatctaagtgaagaggtctcaacttaaatacggagctagtggagagtctctgttgactggttgagatggtgcgcggataaccaggcgggcgcgaggcgaggcagacagctgttgcgccctcttgttttgtaacggacggtaataaacacggagaattgatttcgtatcaatgaacgattgttttgtaacggacggttacggaattaaacgtcgtgaattgatttcgtcggttacggaattaaacgccgtgaattgattccgtattaacgagcgctctcttgttttgtaacggacggtaataaacacggagaattgatttcgtatcaatgaacgattgttttgtaacagacggttacggaattaaacgtcgtgaattgattccgtcggttacggaattaaacgccgtgaattgattccatattaacgagcgcgtcagttacgaaattaaacaccgcggttgatgactccgaacgttactctcgcgctcgcatatatatactccgcagcgaccagaaaggactgaagaagttctttaacgactcttgcacttcgagttcctcctcctctgatcctaagctgcagaatccttccccggttctgttcacctgcgcgcgcaggtgtaagggacgagcaggtgcctccggaactctgtccacttgagaacttgcacggataggcgggcaatcaagtttttggatagcgcttcaagcgcgactgctcttgttcttcgtggctactgttgttgcatcggcgccttcaccaagatgtcaatggagattggaaacaagaagatgaacgacatcaacggaggcaatactgcctcaaaatccagcagtgggacgtgttctcggggtatactttcattctcccgattctattagatgtttctttgttaatactcttcgcaatggcagcattgcattactatgtaaatgttgaagcttatttcatattaagcatactcaagttgtatacatctaacactgtcactagatctactcatattacaaatgtcatgtttattgtcttaatattttggattaaaatatgccgaattatgaccaaatttccaacaaacgtttctcataatcacacacttcaattaagatcgtacaattgtaccataattttgaaattttgacagatccattgccaatttctgatgataactactcggaggcaagcttgatctgaatcttgtgttcttcaatcaggcattgccaaccaccaccaaacatgtcctgcttcttttactcttttgaaccagaagtagtgagctactacgaagaaccaaccaacctacaatagaaaagtggattaaaatagtgtcagtataaaagaaagatcattaacaaataacaaccataaaatggtacacgcatctttgctgttgctcagttggattttcctgaatgattcaatcgtctgtgcagataagaatagccttgtagccatccaagttggtctcttctgacgtagatgtgagcccaaaaaaaaactgtggaaaaaaaggcaaagcccccgggatcaagaagttctcaatggattcgcccactgtaaagtgtaaaggcattaaaaggagagatatacagcacagatagaaatgctcgtttgcatcatgcgaaatcacttggttgtaacttaaagttcaaactagggaattcgctaaaaatataactgacttcaaaatgagaaacataactctaggtgctaaaaacaattattagcacctgaagaactgggaagagaagcagagaaacgttcgtacactgagagcaaagacgaacaaattacaaatgcatcaagaaacaatatgatacacaacttgttctcctgcttataatctccctttaccctttattctctctttttttttgggtactcctaactttcttgtgctcttatacaaacaagtacctgctaataatactgtattatatataaggaccataatgttttctaagcagcttaacatagtaatgattatttcttacagttatgccgtagttgcttttgcaaagattgtgatggcatagtactaacttccagtgaaataatgcatatgtcttgtactcttgttagagattgatggaagaagaaagctcaagaaaggttgtgaatatgtgcgtgtttttgcaatctatcactgtggacctttagtagtcttagccctactaaagcgagaactgacgatttatttgtagcacaacaatcacttctgtaagattctgtattttgattaaaaataaagctgctccatgaaatgtagtactagtgatcacaaaatggtagattctttttgtgcttagttagttcaatccatgtgacacgtttttactactaatttcaacactaatcaaagatgattttgctgaagcttctttattttgtaagaacattagtatgcactgtaataaaaggctaaggtgccatattcttccattagatcaccagctttactcccttctggaattgtttatcaggctagattcaccgtcacttgcttgaaccatttatctaaactctatgagcagaaatggaaataattacagttcattaaacactagtaattcttggaatacagactcaggtatactgaatgcttatggtttttgactggtcaatgtttaatccctactagtgggtgtcatcagtaatgaattgattgaacactccaagaaattcactgcagtagtgcacaaaatcattttagttgtcccttataataccaaccattcatcttgcttcatatgttcaaccactggtggtttatgtccttccaatactatgaatgggttggcaataaatcacataccaggcaaagtatcggcagctaaaagcctagaataattcaccagatggaataaattaataagtaaacaccatgcaacccgctaaataatccataaacgtccttttaaggtcagagaaatgctcaggggtttttcggctagcttcacaaggtggtgggctagccgacctaagttcgaaccctcatcctttctatttatttgatagtagttccttccttaatattcactttttttaggtcacaccactgacattagtgactaatcacatatattatatgtgcaaaaggctggaaaagaggtaggtaaaagtgccaaatcgtataccggattgcaattgataattgatagggacgcaagcatctgttttattctttgcacatgaagcaagcaaaaagaatctaatatattgacatgcaattcttttacacgttcgtgaaaaaagaagcaggcaagaaaaatcatgcataaattggatttccgtcttctagaatctggaatgaaaactatgcacactagtaatatttaaaagagctatcatataattaatgggttcatcatcgctttcacctggaatatagctgcgttggagccacatccttcttggaaacccagcaggaatttaaacaggaggcagagaacaattgcagcctttattattattattttttttgcctatcagatgcctttgttttggtgttcttatcttatcctggcaatggcatacggcatgatgcacatttcatccatccaaccgtgatagcgaaatctggcaacaatgtctgtctttttttttactctgcaaataaacaggcttgtcatcaagattgaatccgaaaggactaattcagctcatgcttctcagttctgatcagttgatctttccaacagagatagcttctcgtgtttgtcgaaagttcagtttcaggttcagagatccatcctcaattactgaaaaccacacatatatttttcccaagaaagtgtgcaaaattcagaagataagtttgatgaatgattccgtagactactagcaacttgcaagattaaccgagacagacaagttagagagtcaatccatttttaagataatgaaaatggattacatcttcagcttaagacacacaaccataagtttgctaaaaaaaaaaagagtgtcagtccataatatgattatgacaccacaaaattggaattaacattatcagggaccaactagtgatcaagctactgaatgaataataatcggaatgcaaaaccacacagaaatttccgataaactaatccactagaatcacaactcctttttgctcagattaattttagacgaacctaatctagctggtccctttcatatccgaaaagaaaaagaaggaaatctgggcaccttgtgatgatgcccaaccgcccatttctccctacacactcattccgtcctccatctgtttcaccaaatcatggcattaaaaatactcctaatctcgaatcctccgttaggttggaaagacccacgaacagatcgatcggtgttttctttctccttcgagcttaaattctcacggaatcaagcactgagaagacgctgcaagcgagaaaatctctacagatgtagcgggtgatttcgttctagaaggttctagaactagtttatttaagtaaatttcataatcccacgtattatgggtccaaaattgcataaaaccacgaaaaatttgacacgtgacacgtaacatcggatattatagtcctaaagtttcacaaaaccgtaccgttaaccattttgacatatgccatagtagatagtacatgattatgtgccacattgccaaaatccttataattttgtgtaacttggatcataacagatgtggttttataaaatttacttttttttttcctcgttgatgtggttttataaaatttactttttttttccctcgtcgatgcatcgcgtggtggcaaaatgggccgcacggcatggcctggccatccatccgcagtggatctgggcctccaaagtgcgatctaatggtcacgagaggcccacgataggtcacaatccaattcggcccattcactgtatcttttcaagtgggcccacgagcccacccgcggccgcgtccgtctccgcccaagcggtggcggctcatataccgccgcgagagagagaccattcccccccgtctcggcctcggaagtcgcgcgcacccccaaaccctagccgcgcctccacctcccgattcgccgccttttcgttccaggtaattggcagcggcgtggaaccgaatagtggatgcgtctatgctacccgattactccgtaatctctctcctttttttttggtggggggtaaatcatcttcggtgtttgatctgcaggtgtgtgttgattagtagaagagaagcggcggctgcgacgaggcggaatcgaccatggcgacccgtaagtttcagcatgtttgaggttttgcggctcgtggtttttgtgattaggtagctctatattcatttctgttagttacttcgatgagatattttgtagcgttggggattggcaacgacggattgggcgattagtactgttgggtgattagtcttgtggccagatgcctagatgagtagttttgtgactgaagcagcatcacagaatggatttcggggctagtcaagtgggtttaatgtttgttgagatttttctgaatgatcagtgtttagaatgtaatgtttttgaggacaaaagtggtagcttgttacggtagcttttagtaaaagatctttttcttagcatctcatttgttgttctatgctgaaatttctacacttaatcatgtgatgtagcgcacctctaatttggttggttaggtttcattgctcatactgggttctgaactggtgggtgatgtttgattcaaatgccttttacacatcttccgtatctaatctgctttttcttgaatacacgatctgtaggtattcagtttgagaacaattgtgaagttggtgttttctccaagttgacaaatgcctattgtcttgttgcaattggaggatcagagaacttctacaggtgcatattttgtcagtttaagatgttgggaaattatttgtggaagcgtgggaatgcctaactcataactgctgcattatttgttattttgcagtgcctttgaatctgagctcgcagatgttattcctgttgtcaagacctccataggtggtactagaataattggtcgtctctgtgtcggttagtacttgagcttggatatactaagtggattaatgcacttgccttcttgtttttcgtttaccaatttgaatctttgatgtccaggaaacaagaatggacttctcttgcctcacactaccaccgatcaaggtactctatttttgtatcttttctcctataaatctttgctgccatggctacatcgtttctgctagctctgtgctattgatgtcatccacatgttggctatatgtgtcaataaattagtaacttttcacatggatatagtttttcagtgtatgttctttagccacactccgtttttatggacttataggaaaacagaaaatcttttctaagctaaataatgtgtacatgtactgaaagaaaattttatctacctgatgattataggtactataattatcattgaaattactctataattattatcagagttacagttacttgggtattgcacagagggcaaagttgttaaggcaattatggacttacactgtctgccgcattattatttttcttttgtacgagcacaggcacatggcttgatagtgttgtagtatatttggaacttgttttcatgtaatatccaaggccttctggatattgtgactatctgctagacagatacaatcaatcatgccagttggatatacattccatgcttgtgttgtcgaattgattttccttagcagcttgattggtttatgatgctgtgttatgatattttgtcatggacaaaagtttcaccatgaatttgtagtaattctatgttccctgtgtgtttgaattgttctagagcttcagcatctgaggaactgcttgcctgatcaagtggttgttcagcgtattgatgaaaggctatctgcgcttggcaattgtgtagcttgcaatgaccatgtcgcgcttacacaccctgacctcgacaaggtaagcctatcttcgtatatctctctagtgatgtttcttgacttaatgcttttccctattgtctcgaactaaatatgcctgctgctcaattctccaggccactgaggaacttattgcagatgtgcttggggttgaggtgttccggcagacaattgcaggaaacatccttgtgggaagctactgtgcgattacaaacaggggtggcctagtatgttttttctacttcatttctgttccattcgatctgtgtttgttacaaatgttctttttcttattgtacaacaattgcgaaacaggtccatcctcatacatccattgaagatcttgatgagctgtccacgctcctgcaagtccctcttgttgctggaaccgtgaaccgaggcagcgaggtcattgctgcgggcatgacagtgaatgactggactgctttctgtggctcagacactacggctactgagctatcggtcattgagagcgtcttcaagctgagagaagggcagcctgccgcgattgttgatgacatgaggaagtctttgatcgacagttatgtgtaaaagaccaaagttagtgaatgtgtggttgtgggagtattaactgtgctaaaatcgacacaaactgtactcgtgtaatcagtagcagaaacataccgtcctggtggtgaatttctgtcttctgaattacagacttatcttttacctttgtctccttgaagcctacaatatattttgcagcttaagatttattgattgagcaacacagcaaaaattttggctaatatgcgacatttacgttcctgcaaggtgttcttcaggttcaaaacgacttttctcattagttactgcaaaaccattttatgaactcaaatttggcaaacagagtatatgagaagcttacaagaacagcagaacctcacataattcacattacgaaaaggctatcagaacatcagcgaacaagttctcgcaaaacatcactctatagaagtgcacatagaatacagaaatcagcaagctctccttaaagcataactctagcaggccatcgataatgatgtggcattggcaccaagggatggtgctatcgatacactaccaggccagactggcaagttgcttgctttggcattccagaatgcaactcatggctagttccttcagctgttcttccacaacttccatgggaagggagccatcaacaacctacgtgacacaaccaatgcaacaagttaatcagatttatttattactaattggttgactatagaactaattattatgaccatactttaacgaaacaaccaaattcttgagatactattgcattctactggtttctacacaatcttacaagtcatggtatagatcatgaatacagaaaaatgaaaatgaatgacaggcagatcactgcacttgcacatccaacttaaattaagtactatgctggttgattaccttccatgttgaatcacgaagtgaatggtaatgctcaccaactttcttttggaattcaattttttcatatctctcacccccatagcctcctctttcagctgctttctgaaatggcaaatacatatttatgtcatgcaacatcacatcataagggcttgtttgattaatccccatgagaaagggagtggaggggattaattccacacctcaatagctgtggaattattacctccaaatcctgttcaatccctttgggtgagcgataacaaggcaagtggggttagcaaagaatctgcggaacagttttcatgttttccacaaccgacaacatgatgaagaattgaggttgacttgattttttagagtttcaatgcatactagacagacacgaaccttaggggtaaaagtaaaactcgatggccaatgggttctctatttatatgcttatgtgattagattagggacctaatggggctatcatcactacaatatgcaaatgagtcaaaggcatgaaactgaggaaatcctgcctttcaatactaacaaaaggaatctatattctagaacatagccataggaagaatgagaacaaatagcatacctctggttgtacatccaaatatactacaagatctggggctataagtccattttcaggagcctacaaaaggaaaaaggagggattactgctataaacaatttatggctagaaaagaaaaattcataatatggccacatggtaccctactcaccttgcaccactcaatgtcaagtcccttggcagctgaaaatgccactccagaataagaataacgatcaacaatgagagtagttccaccaagtagctttctttccatcaaagctctgaaaatggcagaccaaagcaacacctccacagttacaacttagaaccacaaagaccttgcatcactgcacatagtgtatcactgaagaaaattttccacctataacataagctgttcgacatatcgtttatcttacaagttgaaaagaacaaaccttttctcccagcgattcgcactgaagagcaaatggattgtcctatcgtcaagttccgactcgttcgcaaggtacgcggatatcatctgcccaacactagtacctctatcaggaaaccgccacccttcggcctggcaacctttaccttgcagaaaggacagcagccgagcacactgcgaagatttcccactcctatccagcccttccaggactatgagggcaccacggccaccctgagagctcccactctccattctcacgctccggaacacgccgcgccactgcggaagcaagccgagaccacacccagccgctgctttgacaccactgcaaagcagaagattacacgcacagtaagcccaaacagagaccaaccacacttgcatcatctagcctaccaaaaacttcgggggaatcgtctcacctgctccaagaaattgctttcccggcgaggcaagctaatgcagtcatgcacaacctggttatcctacttactctcctcccccccaaacctaataccctggaaaagcacgagatagctgc

SEQ ID NO: 5267 - DNA, 23540 bp, Oryza sativa
tttcagaactgtagtgcttctgagctgaagacgaagttagaggaccaaggctcagaccccagttgagttttgcctgtggagtggagctgaagccccgctaggatcgcctttttccgctgctgctgttttcgtttcggtgcgaggactaagtgcctcttttgtaagtattttacgctttatttacgtttggaactgtatattacttgtcgttttgtgtaccctggctggtcctggacagggatttaatacacaaaatagtctggaaatttgggctaaatttctgggcgtgacacaacgactccgccgttttgcataggacaggaaggatgcgatcaaggaggaattaaccaagttgttagcagcgggcttcattaaagaagtccttcatcccgactggctggctaacccagtcctgattcggaaaaagacggggcaatggcgcatgtgtgtcaattacaccgacctcaacaagtcttgtcccaaagatcctttcgggttacctcgcattgaccaggtagttgactcaacggccggctgcgagctactcagttttttggattgctactcgggatatcatcagatccgactaaaagaatccgactgcttgaagacatcattcattacgccttttggggcttactgctacatcaccatgccctttggattgaagaacgcatgagcaacctatcaacgcatgattcaaagatgtttttcaactcagatcggccgcaacgttgaagcttatgttgatgatgtagtcgtcaagaccaagcagaagggtgacctgatcacggatttagaagaaacttttgcaagcattcgtgctttcaagatgaaactaaacctggaaaagtgtatcttcggagtaccgtcagggaagttgctcggattcatggtatctcaaagaggcatacaggccaacccggagaaaatcaatgccatcctcaacatgaaaccgccaagctcccaaaaagacgtccaaaagctgactggttgcatggcggcgctcagccggttcgtctcacgactcggcgagagggggatgcccttcttcaagttgctgaagaagactgacaatttccagtggggacccgaagcacagaaagcctttgaagacttcaagaaacttctcaccactccaccagttttggcctcgccacatccacaagagccgctactgttatatgtgtcggcgacctcccaggttgtgagcacggtcctggttgttgagcgtgaagaggaatgccatattcaaaaagtccaacgaccaatttattttgtcagcgaggttttagccgactccaagacaaggtatcctcaggttcaaaagttattatatggtgtcttaattaccgtcaggaaattatctcactattttcaaagtcactcggtcacggtagtcacatcgtttccactcggagatatacttcacaatcgcgaagcaaacggacggactgcgaagtgggttttagagttgatgtctttggacatatcattcaagccacgaacttcgatcaagtcacaagctttagctgatttccttgccgagtggaccgagtgccaagaagacatgccagaggaaaagatggaatattggactatgcattttgatgggtcgaagaggcttacaggcactggagctagggtcgtcttgatttctccgactggagaaagattgagctacgcattgtggatacatttttctgcgtcccataacatggcggaatatgaggcgctgctccatggattaaggattgccatctctctaggtattcgcagattaatcgtccgtggagactctcagttggttgttaatcaagtcatgaaagagtggtcatgtctagatgataatatgaccgcttatcgacaagaggtacgcaagttggaaaataaattcaatggactcgagctcacccatgtcctccgacataacaatgaggcagccgatagactggccaattttggttcaaaacaggaagcagctccttcagatgtgttcgtcgaacatctttacgaaccgatcgtgcccagaaaagagacagtcgaagccatggatattcaaggcgtaagcatgatcgaagctgactgaagagaactgtttataaaatttttgagcaaacaagaactccctcaagacaaaaatgaagccgagcggatttccaggcgcagcagactttacattattcatgagactgagctgtacaagaaaagtccatcaggaatactgcagcgctgtgtgtctttggaagaagggagacagttgttgaaggatatacattctggtatttgtggtaatcatgctgctgcacggaccattgtcggcaaagcttaccggcaaggttttttctggcctacagctgtgtccgatgcggacaagattgtgcggacatgcgaaggttgtcaattttttgccagacaaactcatttgccagcccaagagttgcaaaccatcccgttgtcctagccgtttgcggtctgggggcttgacatggtcggcccgtttaaaagggcagtcggcggttacacgcatctctttgtggctatcgataaattctccaagtggattgaggctaaaccggtcatcacgatcacagcagataaagctagagattttttcatcaacattgtgcatcggtttggagtacctaatcggatcatcactgataatggcactcaattcactggcggagaatttaaagacttttgtgaagactttggcattaaaatttgttacgcctccgtggcacaccctatgagtaacggacaagtcgagcgtgctaacggcatgatactgcaagggatcaaagcacaagtttttgaccgactacgtccatatgctggcaagtgggtagatcagctgcagtccgtactttggtctttacgcactactcctagtcgggctaccgtccagtcgccgttctttttggtttatggcgcagaagcaatgttgccgagtgaagtggaatttgaatcattacgatttcggaacttcaacgaggagggctatgaagagggccgagtagacgacatcaatcgactagaagaagcccgagaagcagttttaattcggtcgactcgatatttgcaagggttgcgccgttatcataatcggaatgttcgatcgcgagcctttttagtcggcgacctggttctgaggaaaattcaaacaacacaggatcggcataaattatctcccttatgggaaggaccgttcataattgctgaagtcactcggccaggttcttatcgactcaagcgcgaagacggtactctcatcaacaattcttggaatattgaacaccttcgtcgattttatgcttaggtatttcgcttgtatctttcctatttgactgctaacttcaagtttttccttgaagttttcagtcagggggctattatgataataatggagtgtgatttttatcaattcaatttgcttacttgatttatcattgccctgtttggtctttcgacttagccaatgagaactaaaggtttttaatagcttttgcgggttttaggctcaataaggcttgacaaaggcttttaagaaatcagaagccaagtatggaacaccaagcatagcataaattcatcagtattgtacaaattgagcctccaccgtcattgatcatcaaaatcattgttatatcaatcagtatcagttttttcatcatcagacttatcagacccagtcggccgaaggtcgacatcttggaatctctcaactacatcagcagcaatcttgtcagccgctttctgcacatcactgatgaggtcaagagcagcttcttcgctcgtcccgtctgcaaagccatcaatggcatcaatatcaactcttggataaagggatttggtcatcgccaacgccagacttgctcccatactttcagcttctttgatgttcttgaagtaagtatatggagcgactctcagcttgtcgaagatttcggcagcatcaagtgtactcgacccggcgttattgaagaacatggcctagataagtggagtagcggcattagcgactttatccctggctccttcaagcttgttgatcttgccaactaagacatcaaattgtgcttgagacttgatcttgcgatctgcgtcaacagattcacattaatgaatcagcatgtagaagataatggcttttgaggcattgattattggtaccttcaacctcctttaaagccgaatccctctgtcttgctagctctgccttgtcattttccagagtttggatctgcttctctagttgagatatcttggcagcttgcactacattaacttcggttaatctggattacagatataacagcacaaatcagtaaggcagagtttgcgcgaaccttttgacgagccactcagttcgaaattggactcctggagctcagcaatccgatccctcagatcgtgttcattcttcttggcaagttctctggcctcgtacagttgactcctagtggcttcgagggttccaagatgaggaactagtctctctagggttgcggttttcacctcgtccctaagatgaatcctctgcggagcagtttaatcagcgctcgagccagacggtaaacaagatggctgaggtcaggcgtcaaagagcttacatttacaatgcgagtcgcttggttgagtgcctttttcagtaggcatacctcttcgtcttctttttgccggtttattacaattccttgaggttgcaagttgtcatcccaccacttgaccagaataggagggcatgaatcttcggctgcttgtatacggggaatttcttcttcatcaccgatcatgatcctaatgcatccattgacaaaggttagacaatcgatcggagttatttgggtcaacatggtttcggacaaagtgtttacctgtaatgatttctggacgaggacgagtggatttggatgcttttaaaggggatccagatctccggtcattgctggcgtcttgtccgcgagggttgtctgcttgggtttcgacttctggaatatcttggcttggccctgcgtccgactggtttccagtcgggggctcctgattaactccggcttcggcttcggccgactggattctagtcgggggttgatcaccagattctgcattattggttgccggttgattgtcacttggatgatcctcagcagttgactcggtttctttggaagaacctgtgtccacattagtcgggtcagagtctttcccaaacggatctatattagatggtttcttgcaaatttgattatcagtattaattgccgcaatgggtgcgcatcaatgcaagagagatcgttatatgagttgcacctagaagacttcctgatctttggcacagggcgactggatgttttcttccttggagtagcctgttttggtagtttcttggttgtctctcggtctccaggcctcctggcggcatcatcggcttcgtcgtcacttagaaccagcttcctctttcgagaatctggctggccgattggatcagaagcacttggttgagtttcagaccgaattcttggtcctctgctcccttgcccagtttggtggcggggcgatcggcgttgagcaattgggggatccgacttcatcaaagcaaattcctgggtgtaatatccttcattgttaactgattcaacaagaaagcaagaccatattttgagaaaggttgaagtgtatgaatacgtaccggtggaggaggattgaatgcattgaatggcacaacgggtagcaggtgtgaatagctgacaacaatagcgtttgagaagatcttgtacattctttctttcatgaccttaaagtcaagagaatctggatcttcccgatttggctcatgcttgccgtcaaactcaaaagccgtgcgggatctctctttgattggagctaatcgacttttgataaagtgccgagtgatttgttctccctgcaaaccttgttccttcagttttagcatgcgttccatcaattccactgcctgagcagcttcatctcccataggcaatgagttccatgtgtcctggtaaaccggaggaagacaggaatattcgggaagtgcgggttcaggattttggacgtaaaaccagtttgcgtgccagcctttgtttgaggtcttgaagggcatagagaaatacttttggcttagtgttcctctgagttggaaaccagcgcccccaaccacgcatggtttgctcttattatgttggggcttgaggaagaagattcggcggaataaggcgaaatgaggcctaatgcccagaaaagcttcgcaagcatgaacaaaattggcgatatgcactatggagtttggattcagatgatgcaagctaatcccgtagaagttcagaatcccccggaagaatcttgaggttggaagagaaaatccgccgtagaagaaatgagcaaataccacgatttcgtgtgtatcgagggtcgggaatgcctcaccaaatgccggtcgccacccgatgatctcttttgctggaagaacgtcgtgtgccaccatctccttcagattgtcttccgtcacatcggagggcgcccattgactcttcaagctttttttttcttccgccatgaatgtgaactggatggtgtgatttaattcgagatacggctggaaagggagggaaattgcagcggtggatgcggggagaaatttcgtgaagtttttgagggtggattggagcggattgatgaaccctagtttgcccggcgcagttttcattgtagcaggaaatggggaaaatggcgagagtctcggcggggaagacgaagagacgttttttacttcggtattattagggtatcgggggtgctaatgggcctgggcctgtacagtacttcagcccaattttgttttcagctttggcaatatgtgctcacaatgatgtggctcgatgctgttaaaatccttttaacgtgattcaataattctttggaattattatgatgcacataaaaaggtgcccgacagaaaggtgttataccatttttgtaagcttttttaggctacaaaagctgttgggttaatttgagatgactggtttattagtagtcattctcctagcatgttatatgcttattttgattatggtaagggttatagcctaggctattaaacttcctaattgccatgatctttatcatatttggtggatcattttacgagttttctactcggattcctgtcaaatatgtctacttatgaacctttttgagtgtttgtcactcgggtcttttcatattttttgtccttgatatgttcaagttgaaaagcagtcggctgggtatcttattgagtaccatgcatgctttgttataaaaccactcggttcttgactacatgtttagtttttcaactaatcatatagttgggggctacacctaattaggtgcatctactcgatgcaccatgttttattttcgcccttcacagtcttttagcactcagcaagctggagcaagttgaattgaagcactcggattattgtttttgtttcgagaaggctattttgtcaactgtgaaggtctcgggggctactgtggagattatggttaccccatatctacatggcggttatattccagctggatatacggtaccaaatatagatagaatatctttatgaggactcgggttagattctaaacttgtatgtcaagaaaatacccgggatcctagtcggttacgattgtattttatctgtaatcccatattccgttaggatatggactgtattctgtaatacggatcccttcccctatataaggaggggtccgggttcctctcgggacgattcttttttccagtttatacaatcaataacacactcggcggaatcatccccggacaggagtacggtattacttcttgaataagaaggcctgaacctgtataaaattccttgtctccaaacccatccactttcctagcttgatagccacccccttttattattgccgaaatcttgtttcgacaaacattgtagagcttgatgagatctacaactttattattgactattttattatttgaggtcatttaagggtctaaatattcattataatataccatattaatttttacaaaatctcagatctacaattcaaacatctgatggagatgtgttccatatcaaagttgtagagctcaacgggatctaccactttgtagtttataacatttgtatttgaaagcatttaaagtataaaacaaacattacaagtttcgaagatgtgaagtaaaataaataacatctccaatttatacaatggtaaataagttatacatctagtaaaaggtcttgggagtagaaaacgataatcatatttgcatatggatctcttagaggaacagccatgaaaattgattttcacatacggttgtaggaccgtctacaaaattgacgatataaatgttggagacgttgaactaaaataataagcgatatctctttcttgatcaagaaactcaatttgaggggtttttttatataccggtaaatattcgctaccgtattcgttccgtctcgtattcgctccgtatctgtattcgataatattcgatttcatttccgtatccgagttttcgatttcgattccgattccgaaaaaaatatgaaaacgaatatgataaagctagtttccgtccgtttccgatccattttcatccctatgtacggccggaagcgcggcgaggtcgaggctggcgtggcagtcgtccaagcccccttacggcgagcagcgagagcgcgctgagcaccacgagtagagtgttcaaaaattagtggagtgaataaagtctatggaattatatatttaaatatgaagggggtaattttctcggtccaccaaatatgttataactcatgcggattcacggaagaaaatatgttatcaccatcatgttgtgttcaacattgttatcgagcgatgatacgtaacgtgcatgaggttgcttggttcagttaatcttttttcccttaaagaagcgtgtttaaattctgccgcacacacaacagcatcaacgcaagatgtcaggccttcatgcttaaccaggtgcgtgacaaactaacaatcaataataatctcattaaaaagggaaatatttatcgataatagtctcataaaaaacttgctgaaattccaatattggtacaagcagaattacaacaaagggtgcaacaaaagaatggcaaaattaaactaactaattaaacctttaatcggtggaaaatgtatgacaaacaaaaatcacgagcttattctgaccaacaacatccccgtcgtcggagatgtggattaactgtgatcattagccggtgatcaatggcggctagttgacgaggcggcagttcttcctgatctcgccattggcgctggtcttgattccaatgccgcccatcttcaccatcgccgccgcgaacttgctctcccaccggccgggaatgaccacgttgaggaacacgctgaaccccgtctccgacgaccggagcgccgcgtccgacgtgaagagcacgtcgcggctgagcacgttccggtagtactggttgtccagcttgtcgggggttttgaggtcctgcaccaccgtggggtcgccggtgcggttgcacgcccgcgtcaggttggccttgagcgcggcgtccatgtcggaggtggtggaggcgaggcggtcggagaaggaggagcagtgggagacgccgatggagtgcgcgccggagagggtgaccatgtcgtcggcgtcgagccccttgtcggcgaagttcttcttgagctggtcgagcccggcgaacggcgacggcaggttggtgagggtctcgtcggcgagggagacgcgcccgtcgtagcggccggccggcatggcgaagtcgatgttggcgttgctgaggaagtaggcggcgtcgcggccggcgaaggcgacgacgtcggcgcaggagacgacgccggggcacgcgctctcgagcgccgccttcgccgcgtcgatcacctcgaagccgcggaggctggggaagttgggcacgccgagcttctccggccgcgagttcgccgtcgtcgggtcgagcagaacggaggcgtcgcagccctgatcaatcgaaaggagacaatacacagccacattaatcacgtggattactaactaattattaatcacgtgttttaattgtcgaaactagatttcggcaataataaaagggggtggctatcaagctcggaaagtgtatgggtttggagacaaaggatttatacaggttcaggccttcttataaaagaagtaataccctactcctgtccggggatgaatccgccgagtgtattattgattgtatgattcgggaaaaatcagcatatatccctagaggcgcccggaccccctttatatactggaaggagtccggattacaaaagataatctatattcctaacggaatatgaagatagaggtaaaatacagtcgtaaccgactaagtctcagggtgtttccttgatacacaagttaagaaacaaacccgagatacagataagatattctatctacattaagtatccggtacccagttcgaataccatcgccgtgtagatatgggatacccataatctccacagtagcccccgagtcctttgcagtcgaccatcatagtcttctcaaagataataatccgagtacttcaaactcttcaagccaaaatctgccgagtggactgtaaagggcgaaaaaaataaagaatatggtgcatcgaatagatgcacctaattaggtgtagcccccaactatgtgattagttaataaactaaacatatagttgaaagacaaaataataacacaattgtgcattatatgacaaaagcatacgcggcgcctaaataggcatactagccgactgctttttagccaccataaaagaaatccgagtggtttacactctaaaaggttcacgaatgaacacacttgacaggcatccgaataaaaaaattctaaagattacccatcaagtattataaagattatggtaataaataagtcaaatagcctaggccatgactatttaccatgaaaataggcatataacacgccaaggaaatgactataataaaaacaagtcattcctagttaacccaaacagcttttgtagcctaaaaaagcttgcaaaaacagcatgacgcctttctgtcgggcacctttttaatttgcattgcaataattccaaagaattatatgaccgcataaaaaggatttgatcagcattgggcaacactgttgtgcgcataatattgccaaagcaaaatatgcctaagtccctaaggaacacaatgggccacgctgttaaaagtattgggctgaagtactgtgcaggcctaggcccattagcacctccgatacccttaactgaaaaatcctatatccaagcgacgcttcgtcttccccgccggaactctcgccattttccccactccttgctacagtgaaaagctgcgccggcgaactagggttcacaactccggccaaatccacctccgaaaaacgcatcaaaatccttcccgtgatccaccgcctcaattcctcacctctcccaagccatccctcgaatcaaaccagcacatttgagaaaaatcgatggcggaagagagagaaagctttgaaggccaatgggcggcgtccgatgtgacagaggagaatctgaaggagatggtggcgcacggtgttctcccagccaaagagatcatcgggtggcggccagcgtacggtgaggcatttccatctccagatacgcatgaaattgtagtcttctcgcatttcttctacggtggttttgctcttccgacctcaagatttttccgtgggatcttgaacttctatggaatcagcttacatcacctaaacccgaattccatcgtacatattgccaatttcgtccatgcttgtgaagcctttttggggatcaagcctcactttgccctattccgccggatctttttcctcaagccccaaccaaacaagaacaaaccgtgtgtagtcgggggggcaggattccaactgaggggaactctgagccaaaaatatttctccatgcccttcaagacttcgaacaaaggctggcacgcaaactggttctatgtccaaaatcctgagcctgctcttcccgggtactcttgtcttcctccagtataccaagatacctggaactctcttccaattggagatgaagcagtccaagccttggaattgttggatcgcatgttaaagcttaaagagcaaggcttgcaaggagagcagattactcggcacttcatcaaatgccgactagcgccaatcaaggaaagatctcgcacggcattcgagtttgacggcaagtatgatcctaaccgtgaagaatcagactctctggatttcagaatcatgaaggagaggatgtataaaatcttctcaaatgcaatcgtcgtcagctactcacaccagctgccagtcgtgccatacaatgcattcaatccgcctccgcaggtatgtattggaaatcctcaaaccatgatcagaacataattttgtcttcatgctgagttgactaactatggaagcatcttgttcaggaatatacactgatgaagtcagatccaccagtcactcagcgccggtctcctcgtcaacataccgctcagggaggtggagggccaacgatcagaccggatccgcaacctcagacctccaaatcaactggtcagacgggtcctcgcaagaggaaactggtgcttgatgacgatgaaggcgacgatgataaatctggggataagggctcgcctaataaacccccaaaacgcaccatgcccaggaaaaaactggccggccgcgcaatgccaaaaattagaacatcttccaggtataagacctctcggtatgatttcactttggtaagctctctcatgagaatgatgctaaattctgaaagaatactttgcaggaaaccatctgatatagatccatctggaaaagaccccgatccagccatggcagagcaaaatatatccaaagaccccgagccaactgccgaaagccagccgactgccaaaagccagccgaccggcgcccatgcttcgggtgaccaggccaatccgagtgaccagccgccgactggaaaccagtcggcaacaactgaagcagcaacaactcaagagcccccgactggaaaccagtcggacgcaggccctgatcaagaaatccctgaagtagaagcgcagacgacagcttcccaagggccagaagctggtaatgactcaatagctggatctccaggcaaagaacaaagatcacctcacgctcagctaggtacatctccaggttaattgtcttctcatacaacggtgatttaaataacctcagcgtatccgtctaatgtcttggaaacacatcaggaccatcaggtgatgacggagaagaaatccctcgcataaaggcgaccgacgactctcgtcctcctatcttgatcaaatggtgggacgagaactcacaagccgccggtatagtcataaaccgtcaaaaagaagatgaagaagtgtgccagctgaagaaagcgcttggagaggccactcgtattgtaaatgtaagtcttccgagcgacagccttcagtaactttgttttctttttagcagaactgaaccatgatccatcgtgcagagaatccatcttcgcaatgaggccaagaccacaactttggaaaagctggttcctcatttgggaactctagaagcagttagggaccagctgcatgagaccaaggagcttgccaagaagacggagaaagaattaagggaccgaatcgctcagctccaagagtcaaattatgagctgagtggttcatccaaaggtaatctctagatcagtttcatcagttcaaactggcataactatatcctcaaccatctgaatttcaaaacagcgcaagccgccaggatggaacagatggcaaagcaaattgaagccctggagagagataagacagaactggctgcgcaaagggactcagccttgaaggaagtcgaaggtaacgccagccaacaatctgagcttctctccttataatgcaacagatgctcatcataaatgtgttttgtagatcgcaagatcaaatctcaagctcagtttgacgtcctggttggtaagatcaagaggcttgaaggagcaagggatgatgtcgccaatgccgctgcaccaattatccaagccatgttcctcaataacggtggtccgagtgcactcgacgcaaccgaaatatttgacaagctgagtgttgctccggaagtatatttcaaaaatatcaagaaagctggaagtatgggagctggcatggccttggcgatgacaaaatctttgtacccgagaattgaagtcgacaccattgatggatttgcagacgggacaagtgaagaagctgcccttgatcttatcggtagtgcgcaaactgcggctgacaaaatagcgagtgatgttgtggagcaatttcgcaacaacgacctccagccgagtaatgatgactctgatgatgaaaggactgactctgactgagtttggatgtaatacatggaggctcaatttgtacaatactggtgtatttatgctgtgcttgatgattcttgcaaagtttttgatttcttaaaagtttttgctaagctttgttgagcctaaaacccaaagaagctattaaaaactttcagtcctctcaaactaagtagaaaaaccaaacaaggcaatgataaaccaagtaagcaaactgaattgataaaaaatcacactccattattatgataatagcccccgactgacaacggcaagaagaaaacttgatgttgacagtcaaaatagggaaatacaatgataaagttaagcgtagaaacgacgaagatgttcaatgttccaagagttgtcgacgagagtgccgtcttcgcgcttgagtcggtatgaacctggtcgggtaacttcagagataataaatggcccttcccatagaggagataacttgtgccgatctcgtgtggtttgaattttccgtagaaccaggtcgccgactagaaaggcacgagatcgaacattgcgattatgataacgtcgcaacccttgtaagtaccgagctgactgaatcaaagctgcttcgcggacttcttccagtcggtgcaagtcgtccactcggtcttcttcatagcgttcttcacggaaattacggaagcgcaaagattcgaactcgacttcactcggcaacattgcttctgccccgtagacaaggaaaaaaggtgactggcctgtggcccgactgggcgtagtacgcaaagaccaaagtactgatggtaactgtgacacccatttgccggcatagggtttaagccggtcaaaaactcgagctttaatcccttgaagtatcatgccgttggccctctccacctgtccattgctcattgggtgcgctacggaggcataacaaatctttattccaaaatcttcacaaaagtctttgaaaactccgccggtgaattgtgtgccattatcagtgattatccgattgggcaccccaaatctatgcacaatgttgatgaagaagtctcgagcattatctgctgtaatcgtgacaacaggcttagcttcgatccacttggaaaatttgtcgatggccacgaagaggtgcgtgtaaccgccgactgcctttttaaacgggccaaccatgtcgagcccccaaaccgcaaacggccaagacagcgggatagtttgcaactcttgagctggtaagtgaatttgtctggcgaaaaattggcaaccttcacatgtgcgcacaattttgtcggcgtcggacactgcagtaggccagaaaaaaccctgccggtaagctttgccgacaatggtgcgcgcagcagcgtggtttccgcatatcccagaatgtatgtctttcagcaattgtctcccttcctctaaagatacgcagcgttgcagaattcctgaagggcttttcttgtataactcagattcatgcataacataaagtttgctccgccttgaaatccgctcggcttcatctttatcttgagggagctcttgagaagttaaaaatcgtatgaagggctctcgccagtcggcttcaaccatagcgacatcatgggtgcccgtaatttgagtggcatctttgtgaggtaccgtcggcgtataaatgtgttcgacaaaaacatcagagggcgccgcctcgcgcttggatccaaagttcgcaagtctatcggcagcttcattgttgtgtcgaagaacatggctgagctcaagtccatcgaacttatcctccagtttgcgtacctcttgtcgatatgccatcatgttgtcgtcaatgcaagaccactctttcataacttggttgacaaccagttgtgaatcacctcgaacgattagacgctttatccctagggaaattgcaatccgtagcccatgaaggagcgcctcatactcggcgacgttgtgggacgccgaaaaatgtatccaaagcacataacttagtctttctccagtcggggaaattaaaaccactccagctccagtgcctgaaagtctttttgacccgtcaaaatgcatggtccagtgctctattttctccacgggggtatcctcttggcactcggtccactcggcgacaaaatcggctaacgcttgagacttgattgaagtgcggggcttgaatgatatgtccaaagacatcaactccaaagcccacttagcaatccgcccatttgcttcgcggttgtgtagtacgtcgccgagtgggaatgatgtgaccaccgttaccgagtgaccttgaaagtaatgagacagcttcctggtagtaattaaaataccatataacagcttctgaacctgagggtacctcgttttggagtcggccaggacctcgctgacgaagtagattggtcgctgaactttctggacatggccttcttcctcacgctcgacaaccaagactgtgctcacgacctgggaggtggctgatacatacagcaacaacggctcctgcggatgtggtgaggctaagaccggtggcttggtgaggagttgtttgaaatcttcgaaggccttctgtgcttcaggtccccattggaaattatctgttttcttcagtagcttgaagaagggcatcccccgctcgccaagtcttgaaacgaatcggctgagcgccgccatgcatccagtcagcttctgaacatctttctgggtgcttggcggtttcatgttgaggatagcagtaactttctccgggttggcttggatgcccctatgagacaccataaagccaagcagcttccctgacggtactccgaaggtgcacttttcagggttcaatttcattctgaaggcgcggatgctcgcgaaggtttcttctagatccaagatcagatcatccttttgcttggtcttgacgactacgtcatccacataggcttcaacgttgcggccgatctgtgttgaaaagcatctctggatcatgcgttgataggttgctcctgcgttttttaatccaaacggcatggtgacgtagcagtatgccccaaaaggcgtgatgaatgaagtcttcaagcagtcggattccttcagtcggatctgatgataccccgagtagcaatccagaaaactgaggagctcgcagccggcggttgagtcaactacctggtcaatgcgaggcaacccgaagggatctttagggcaagacttgttgaggtcagtgtaatcaacacacatgcgccattgccctgttttcttccgaactagaaccgggtttgccagccagtcgggatgaaggacttctttgatgaagcctgctgctaacagcttggtcaattcctccttgatcgcgtccttcctgtcttgtgcaaatcggcgaagtcgttgtttaataggcttggcgtcttctttgacatgtaaggagtgctcaatcacctctctgggaataccgggcatatccgaaggtttccacgcaaagatatctttattattttgaagaaaggtgatgagcgcgctttcctatttacaatctaactcggcgcctattacagcagttttggtaggatcagaaggatctaagggaatctttttagtcgcggcttcggtttccccactttttgaagtcttggcagcgggcacttctccttcgctcaccgtggttgcagccagtcggatttcctctcgggctagcgccatctcgcgagtttgggccatgtcgcaactctccttgtcgcatgtgacggcttgcttgatgtcgctccgtagggataggactcctcggggactaggcatcttcatcatcatgtaagtgtagtgcgggacggccatgaacttggctaacgccgggcgtccgagtatggcgtggtatgctgtctcgaaatcggcaacttcaaagctgatattctctgtgcggaagttttcccgagtgccaaaagtgaccggaagagtaatctggccgagtggagttgcggataatcctggaattactccatgaaaaggcgcattgcttggttttaactcggagcgagggatctgcatatcatccaaagtcttggcgaagaggatattgagtgcactgccgccatcaatgagggttctgcgaagcttgacattacggaccactgggtctagtaccagggggtaccgccccgggtggaccactcggtcaggatgatccgagcggtcaaacttgattgcgatttctgaccatcgaagatactggggcgtgtcaggttgaacagcattgatctcccgttcagtcaacttctgcttccgtttagattcgtaagccagggggccgccgaagatatggttaagctccttgcggtggtcttgaaatccagccggggtgtcgccgtcatcctgcttccttgacgtgctttgttcttcgtcggagttcttccgagtagacttggtgtactgctccgcgaactgtttgtagatgaagcactctttggccacgtggttggagtttggatgatgcgggcattgggagttcatgatcttgtcgaaggtgttgacgcgcgaacgctgtcgagaagagtgagcggcggttgcaacaagttcctcaggcttacgcttgcggtccttatgattgttacttccacctcctcccgtagccggcgtatttttcggcttccaactgggacccgactgcttcgatgcggtgacggcgtcttcggctttggcgtactcgttggctttttcaaacatgagcttgactgttctgggaggtttgcgcccgaatttgccgaccaattcttcgtggcgaatccctttggtgaatgcggcgatgatgacgtcgtcggtgatgtcggagatcttgttacgttgttcagaaaatcgctgaatgtaatctcgaagagattctccggacttctgaatgacgttgtaaagatcatattgtgtgccgggacgctcgaaggtgccttggaagttggcgatgaagtggtcgcgtagttcggcccaagatccaattgtaccacggggcaatccatggagccaagatcgggcggaatctgctaaagccaccggtaaatagttcgccatggccttgttatctcctcctgctgcgcggattgcgagaccgtagacggtaagccacgattctggattagtggtaccgtcgtacttctctattccagtcggtttgaagccggctggccaatccactcgacgcaggtcgtcggtgaaggctgcaactccgtcaaggtcgtcgtcgcggcgatccggcgagtgatggtagcctcgagctgctcggcgctgtgtgattgtgtcgcgaagatcgatggggcggcgacgaggtggtgagcgaggccgttccactcggcgctccctatgaagttcgggaggcgagtgaacagaccgctcgtcgtggcccctgctcctgcgattggatcctgctccggtgatgctgaggcttggatgacggtagtcatgagatcggaagtgggggacccggctgccagtcggcgtgtggacgctttcggagttaactgggaccgtcgccgcaatcatggtctttgtctggttcaggatgttgacgacgtggtcggatcgattgagctcgttttggttgaggagggtgtcgagaagggtgatcgcggcaaccgcattctgttgaggggtgcggaaaaccggtgtcccttcgacatcttgctggccgatgagatcacgcgctcggcgccctgcttccaaagctcgctgacgtcgatcttcagcctccttcgcgatccgttcacggtcctgctgctcgcgccgtagccgttcttgttcttgtgcttggtgctcctcctccagtcggcgacgctcttcggtctcccgggcttggcgttgctcctccgtctcgttattggccatgaaaacgccaaagtagagaggggtgtagttgtcatctaggcttccgtcgaagtcgtcgagatccgggtcgtggtagcgagagctaaactcatcgtactccacgatgtcagtaggacgtgagtcgacggtgggagagctgttgtagtcatccagctgatctgtcgaaaccgtgccgagtggttggaggatgacgccgacttccctgaagctaggcgaaatcggtgttgaagccgacttccgcctaggcctacgggatgaaggcgctgtcgtggtgaagacggccgctaaatcgtcggggagcttcatcaggaccggtgggtaagccccatcatcttgatctggtatcgttggaaaagatgcgatctcagccgagtggtttgaagccgactcggttgagatggtctggaagtagctttcagccgcgttcgggaatccaaacgggaccgaaagccggttctctcccgactggtccgattccgagtcaaggagagaaatcttgccgaagttgttggtgatgaagtcgaggctgccgaaccgaaacgtctgcccgggagggaagacgaggtcgtcgatgccggagatgggacccattgcactgatcggcgaaaagcttgacgctacccctacctggcgcgccaactgtcgaaactagatttcggcaataataaaagggggtggctatcaagctcggaaagtgtatgggtttggagacaaaggatttatacaggttcaggccttcttataaaagaagtaataccctactcctgtccggggatgaatccgccgagtgtattattgattgtatgattcgggaaaaatcagcatatatccctagaggcgcccggaccccctttatatactggaaggagtccggattacaaaagataatctatattcctaacggaatatgaagatagaggtaaaatacagtcgtaaccgactaagtctcagggtgtttccttgatacacaagttaagaaacaaacccggagatacagataggatattctatctacattaagtatccggtacccagttcgaataccatcgccgtgtagatatgggatacccataatctccacattaattaaataagaaaacattttttttacctcgacgaagcagtcatgaaagaagaggcggacgagccctgcgccgatgccgcggttggcgtacacagcgttcttgacggtgtccttcacaatttgctcagcttttgggcaagaggaactgtaataaccaactctaagccccggggccggcgggcttgggctggttggagccgggttcggaggagttgtgcttggtggaggataggttgttggcgggctcgggctcaccggtgctggactcggaggagtcgagctaggtggaggataagtaggcggcatgctcgggctcaggcttggcgggcttgggtatgtaatgggtgtgggtgggctagcattgccggtatagccttggcatgtcacggaaccgaccagagccagcaatgtgagcagcacagcaagcttagccatctctgattctctgcactgaactctgaagcaggttacagtgttctgaaactctcaagactctgaactttgtggtgaaatgcagctgcttctgcatctccatttatagtcagtccccagccgaagcagagaacaaacaatttggtgagcacgtcgcggtgacaaatgcaccctaagtcaagcaggggaacatgggaatcgagcagctagctagaccagttgacatggaggtttctttgattaatttttgccggtaaagctgcagctgcactgaacaagtcgacggtctggttggtttaatttcagaggtttttcgtcttgcagcgtatgttccatggatgggttgtttattgtttctgaatcaaatttatcacccagatttatgttcttgcggccgttgaattggcagtttggcattggttttgatgggactcgtccacgccagcgcctacttcccggggtggtggaacgccaagttcgcataggcgatggtgaagatgggcagcgtcaccgtcaagaccgccgccggcgagataaggaagcagtgtcggttcaccaaccaggggcctgtttggggagcttaaaattctgagaagcagctagttggtagccagcttctaagaatcaaagctgggttttccagcttctgtcttgtagttcattagctggattctacaactacagcttcttagaatctaaaccaaaagctagactgtttcgggagcttctaattctgagagaagctgcagcagttagaagctcctctaaacatgtcctagtactaatcacgacgctttacatgcatgcctcaagccgagccagtgaacttaatttagaacaataattatctagattatgtgtcacctgcgataatatttaggatcttatgcaacttcgattataaaacgtgagatttcctaaaattcactctttttatatggtctccattgatcccacaacaaatttaatcggttataaaattacacggccaacctccgctagttttactaatacgactaactaaactttacttagacatgttcttatgtcatatataagggcatgttcacggctggagcctggtatatactagtaggcaatacacgtcacttaagattataaactatactcaatttctcaaatattataagagtatagtttatagtttttctattttctcatgttccctaccctatagtaaaaatttcttctataaatactaagagtctatgtttagcctgtgttaagcttaaatgtttgagaaaattctctctgtacccctaaaaattcatccaatcccttctatacccctaagatttgctcattcccttccataccccaaaatttcaatttagatcccttctataccccttccgttagttgaccattagttgaccgttaaattcatatcataaagtccattttaccctttggtatcaagaaaatataaatttatgaagtatattaatagagtgtataaatttattgtatacgattattatatttatgagtttattttgtgagatattatttaacaaaaataatttttatctcgcataaaaagatttatcttataaaaaatttcgtactactctaacaaaatatgaagtttttaatggcaaaaacaatattatttttttgttttatct

SEQ ID NO: 5268 - DNA, 21149 bp, Oryza sativa
gaatttgggccgagcccgaaagaaggaaggggaaaattattttcttttctttttattttaattgattaatgaactttgtattattaaaattatttattgagctccgaaaattcacgggaaattttcggagagtatattagggcacaaagaatattacaaaatattcccggccaatgatttttaagggaaaattttaattctcccattatttcacttgattaaattgctttaacttttatttaatttctagaaaatgcattatttaatgatttttaatcccgaacgaaaatcggggcgttacaaatctaccccccttacaggaatctcgtcccgagattctgggatggctagaaagaaagctggtgctggcgggcggtctgactgatctgcttacacatgctgcctctttctgattcatctgaccgattgctcgatgaaccaaacctgcataagcttgctgttctgttgcttcccataaactgacggaccgactctgattagtctgaccttgaccagaactgctggtgctcatagaacttctattttttttgtttggattgaattgctaatgctggcaattagataaactgaggattcactttgctgaccggggatcggtgtagttttcccaaaaccttgaaactgacttccgtaacccacagacaatgactttgctcgacctgctcttgattcaaaccacaagtattttcaggaaactggcttggtctgtccttgtctggattgcggctgttcctgatgctacttctttaagccaaacggttgacctggcctcaccggcgtaccttcgaatttaattagacaacttgggatcagtgttactctgctgacgccttgcagctggccctttcaagtactaaccaacttgctgcactgggttgaatctttaagggaaacggcaacgaggtgaaccaaaactcatctctgcgacctaccccccttacagagagtagtcatactttcgcgtgaccgagaacctttgaactgttgtccttgaaaaaaatgaccaacatttctcggatttacagatgccctgactttgaagactgaaacttcatcggtccatcaaattgaagcaatggcgatgcactttcatcccgacaagatttggaacttaagccttagttgatgataggaaattccacataaaagtgactctcatttagctcatggacacactgactcttgactgcaacacactactgctggagttctttccgctactcttgaccttgcatcgagctttgcatctcccgcatcaatacatccatcatctaatcttggacaccaaatgttgatcacgagcagggttcttctggcactgggataccttgtagctttcaactgaaccattgattggtgactttaattgagcttatctctgacactgaccatccgctgccaggacggaagagaggtggaagagaggggttgctaaagataaggtcttaaaccgattgcctactgatctgttgtgagtagacttttattgttcaagttgcttaagcaaacaacctagtatggtcgcatccccaccaatgatgcaaaccatacccctacacacaagcaaacaacacacgacctagcagctaacgaaactactcttccaggaaggattgggtttaggtaaactccgggaaaactccacttgatcttcgcagaacgacgactctgaactgatcttctcgctccttgcacgaagcttgaggcttgacttgacttccgaacagacacgaagctgacggtttatcctccacggtttaacaactataagaattggagggacagggaggagaattttgaaaaaccgtttcgcaaagaaaagccgaagggcgaggggagacatttttcaaatagggttttcagaaagcttgtccttagggtttgaccatttggctcaacctacagtcaagttggctctgataccactttgtcacgcccagaaatttagcccaaatttccagactattttgtgtattaaatccctgtccaggaccagccagggtacacaaaacgacaagtaatatacagttccaaacgtaaataaagcgtaaaatacttacaaaagaggcacttagtcctcgcaccgaaacgaaaacagcagcagcggaaaaaggcgatcctagcggggcttcagctccactccacaggcaaaactcaactggggtctgagccttggtcctctaacttcgtcttcagctcagaagcactacacttctgaaaagggggaataatagcaagactgagtacaaccaccgtactcagcaagccacaccaacgatgcgaacgtgcaaggggatacaaggaggggtttgtggctatttgcataaaggcggttgtaaaacattttattgagcaaaacagtaaaacagttgagtaattaaagtaatattgaatctccactgatcaacgctacaccacgttgaacaggcccaaccaacccacctgaactacagtgcattgggtcgatttattaaggtgggactaatcacggtgaatctggtcgaccgcccataaccgcgggcacggctattcgaatagttttactctgatcagaggtgtacaactgtacccacaagacacagccccacgacacgtttccgtgcgccgacatgccaccacgacataccggaaagaggccgtgacaggacccttcgcataaccccctctaaccaagcacaccacacctcaggtttcacccccactcctcgcaaggcagcgggcagtcccctctcgtgcctaggtgaatccggaagccgcatagaccgtcgcagggcccatccaaactccatcacgcccacccttgcctggatgcgtcggctagaggaaagctacactacaagcccagccgttgcccacgctggcttgtggtaagtacgataagttcttccagggcatcccgcgaaccggtccttaactgccatgggtgcgactagcaaaaccatgcacccacagcccaccattcagttgcattttagttggataattacgaccatgaagcatggccaggtgtctcgagcacgcagctcactctgatactaaaaaggtctaatactgcaattatcccatcaactgagctagtggtaattaagcatggctaagcatatagttctagctaggtcacataagtaacatgagctagtcgattcattacccaaggttgacaaagaacagatatcaagtaaacatggcacaagcgagcagataggtaaaaccctgaccccatgtaattagcaaaacatgcatatttgtttgcaaacagtaaaacatttgtaaattgggatcaacatgctcaaggggaatgtgtgacttgccttgcttcttcactttgatcttccgaactcttttcctcgcgaccgcggacttccgaaacgacggaaactacacgctggcacgcaaaacgaggaaaaactctaataaaaaccaaggaaacagtacataaaaagtaaacaaacatgtagagctcaattttagatgaattttgcaagttgaacggctcaattcggagttcgaatgaattagatatggattttagaagttttgagccattttaatgaatttctagaattaaactcgatttattgcgcaattattatttatttttacaaaggaaaaggccgtgctgacgtcatcaaaggggaggccggcgccgacacgcgggccccgcacgtcagcggtacaaaggggcggcgcatggtggaccaagtccacacgtggcctcgggtgcgcgtccaccacgtggacggcccagatcggcccgagccgatcggacggccacgaggcggcgcggctggggcacgggcgcggccgagactgacccggccggccatggcacggcggctacgcgcacgcggccagacgaccaccggcgacggcagcgcgtcgcggtggcgggcatggggagcggcggatggggaaaaaggagagggggcggtggggattctcaccgaggacggcgacggcgagacgaccacggggagatggccggcggcggaaaagatggcggcgaccggcacgggaggcgacgggaacggcgttccgacgacgcccgaccacggtggagccgcggccgagggccggcaagacctaaggaaaatattggagcggttagggagagaaataggcgaccggagcggtgaggagcggtggtttgagacgacaacggcggtagcggagctcgggtcgacggcggaaaggtggttgcggcgatgaaatggggaaacggagcagaggccgaggtagagcttggcacagcgttgccgccgacgcaaacgacgaggtgcggcgacgactaacgcggcagcagcggccggctgaagacggcggcggtgggggagagaggtggtgcacgaggcggcggtgttccagaggcggagaggggaaatggggtagaggccgggctgcggcacggcgccgcgaagccgacagtggtggcggattggcgcggcggtgggtggagcggcggaatcggccggccggagctcgccggaaagcggtggtgcacgggagcacggtggggaggtgtctagggagcgcggggtgctcggggagaggggaaaacggatgaagggaggcacgtgagtcgtttatataggtcccggagggggagaacgtggccgggagaggcggatttgaagggggaagaggcgccggcgacgtgggcgagtggggtggttcggcgccggttatggagggggaaagtgggggaggagagcggggtcgtgggcggcgaggtcccacggacgagcgcgcgcgcgtggggtggaggaggtgggcggaaactgcggcgtcgtggggcggctcgggcggccatggtggttgcagccggccagccagaggaaggaggaggagctgacaggtggggccgcgggtcccacctgtcggccaaagaggagagggaggccggctggggaggcaaagtagacttcggagaggagagggccgagcggcgagctgggccgagggagagagagcccgagagggggagggggaggaatttgggccgagcccgaaagcaaggaaggggaaaattattttcttttctttttattttaattgattaatgaactttgtattattaaaattatttattgagctccgaaaattcacgggaaattttcggagagtatattagggcacaaagaatattacaaaatattcccggccaatgatttttaagggaaaattttaattctcccattatttcacttgattaaattgctttaacttttatttaatttctagaaaatgcattatttaatgatttttaatcccgaacgaaaatcggggcgttacacgttgcttgatgggtttggcgtcttccttaacatgtaaagagtgctcaatcacctctctaggaataccaggcatatccgatggtttccatgcaaagatatctttattattttgaagaaaggtgatgagcgcgctttcctatttacaatctaactcagcgcctattacagcagtcttattaggatcagagggatctaagggaatcttttttgtcttagcatcactttcttcggtcttcgtcagcttggttgcaggcacttctccttcgcttgccgtggtcacagccagtcggatctcttctcgagcgagtgtgatctcgcgggtttgggccatctcgcaactttctttgtcacatgtgacggcctgcttgacgtcgctccatagtgatatgactcctcgaggaccaggcatcttcatcatcatgtaggtgtagtgtgggacagccatgaatttggctagagccggtcgtccgagtatagcatggtacgctgtctcgaaatcagcgacttcgaaacaaacgttttctgtgcgaaaattctcccgagtgccgaaggtaactggaagagtgatctggccgagtggtgtagctgataatcctgggatgacaccgtggaagggtgcattactcggctttaattccgtgcgaggaatctgcatatcgtccaaggtcttagcgaaaaggatgttgagtgcgctaccaccatcgatgagagttcttcggagcttgacattgcgaaccactgggtctagtaccagggggtaccgccccgggtggaccactcggtcgggatgatctgagcggtcgaacttgattgctacctctgaccaccgaagatattggggcgtgttaggttgaaccgcattgatctcccgttctgttagcttctgctttctcttagattcataagccagaggtctgccgaagatgtgattgagttctttgcgatggtcttgaaaaccagtcggggcatcgtcctcatcgtctttcttctttgatgtgccttgatctccgtctgaaggcttacgtgcggtcttggcatattgctccgcaaattgcttgtagacgaagcagtctttggccacgtggttggagttgggatgatgcggacattgcgagttcattatcttgtcgaaggtgttgacgcgggaacgttgtcgggaagatggagaggttgttgccacaagttcttcgggcttacgcttgcgatccttgtggttgttacttccactccctcctgtagtcggcgtgtccttctttggcttccaagtggtgcccgactgcttggatgcggtaatagcatcttcggctttggcatactcgttggctttttcgaacatttgcttaaccgtcctgggaggtttacgtccgaacttgccgactaggtcatcgtggcgaatgcctttggtaaaggcagcgatgatgacatcgtcggtgatgtcggagatcttattgcgttgctcggagaagcgtcggatgtagtctcgaagggattctccaggtttttgaacgatgttgtagagatcaaactgtgtgccggggcgttcaaaggtgccctggaagttggcgatgaagtgatcacgaagttccgcccatgatccaatcgtgccacggggtagaccgtggagccaggatcgggcggaatctactagggccacaggcagatagtttgccatggccttgctgcctcctcctactgcgcggattgcgagtccgtagacggtgagccaagactccggattggtggtgccgtcatacttttcaattccagtcggcttgaaactgactggccaatccactcgacgcaggtcattggtgaaggcagccactccatccacgtcgtcgtcgtagcgatcaggtgaatagcggtgacctcgtgctgcacggcgctggttgatcatgtcgcgaagatcgacgggatgctggtgaggcggagagtgaggccgttcgactcggcgttccctgtgacgttcgggaggcgagtgaacagatcgttcgccgtggtccctgctcctacgactggatcctgtgccgatgatgctgaggcttggttgatgataatcttgagatcgaagatgagggactcggcttccagtcggggtgcgggtacttgcagagttggccggaactgaggcagcgatcatagtcttcgtctggttcaagatgttgacaacatgatcagcttgattgagtgcgtcttccttgaggagggtgtcgaggagagtgattgctgcaaccgcgttctgctggggggtgcgaaaaaccgttgttccatcgatgtcctgttgcccaatgaggtctctcgctcgtcgcccggattccaaggcgcgctgtcgtcgatcttcagcctcctttgcaactcgctcgcgatcttgttgctcacgctgtagtcgttctcgctcttgtcgttgtcgttcttcctccagtcggcgacgttcagtctcttggcatgtgcgctcttggtccgcttctcgggcttggcgctgttcctccgtttcgttgtcagccatgaatacgccgaagaagaggggcatgtagttatcctcatagctatcgtcgaagttgtcgaggtcgccgtggtcatagtggtagccaaaatcgtcgtagtggaggatctcggttggtcgagaactgacgccgggggagctgaggtagccatccaactcttccgtcgagactgtcccgagaggttggagtataacgccaacctccctggatctagatcggatcggggccgaagccggagctcgcctagatcttcgagtgggagatgtcttgactgtgaagacagcggccaaatcatcaggaagtttcatcagtattgagggataggacccgtcgtcttgatctggtcgcggaagagtagattggatctcatccgagtggtttgaagccgactcgggagagatgatcttagagtaggtcttggccgagttcggaataccgaatggcacttggacctggtctctccccgactggtttgaatccgagtcaaggagagagatcttgccgaagtcattggtgatgaagttgaggctgccgaaccggaacgcctgcccgggaggaaaggcgaagtcgtcgatgccagaaacgaaacccatcgcacttagtcggcgagaacttgacgctacccctacctggcgcgccaactgtcgaaacaagatttcggcaataataaaagggggtggctatcaagctaggaaagtggatgggtttggagacaaggaattttatacaggttcaggccttcttattcaagaagtaataccgtactcctgtccggggatgattccgccgagtgtgttattgattgtataaactggaaaaaagaatcatcccgagaggaacccggacccctccttatataggggaagggatccgtattacagaatacagtccatatcctaacggaatatggaattacagataaaatacaattgtaaccgactaggatcccgggtattttcttgacatacaagtttagaatctaacccgagtcctcataaagatattctatctatatttggtaccgtatatccagctggaatataaccgccatgtagatatggggtaatcataatctccacaatgttgatataaagtttgtctccatctgatttcgtatgaaaaagttatgtgtatatacgtgttttttctaaaatttgctcaatgtctgcggatatctgaaaaaaattccggatagtttctgaccgttttccgattttgacggatagtacccttactgtattcattttcgtttccgagaaaaaatatccgaattcgtttccgaatccgagaatttccggatagttccgaccgaaactatccgaattcgtaaaatggtccggacggacggaaactatgcgaactagtttcaaccctacccgtacatagccatccccggcgagtcttccgagcggatggaggagcgagagaaggcctagagaagtagaggagaagtgtggcggacagtgggccctaccatttttcattttaatgcttaacactaatatgtgggttctacgagctgactcagccagtcaacggggttaaagatgccacgtggaataaaaccacctccgaaacaaaccagggagttgatttgcaacggttttaggagttaggggactggttatacccgatttgtggttgagggatgcagttcaaccagggacatgagttgagggagacaaaataaacttattccactaaaataatcgaccagtttttgggcctagcattctacctgggcttggctcccccttttcttctccaagattccatccgaaatctaatcttgacggcatcaggcctacatacacacgtaggcccgtggtccgaaacgtgatacctcccgatcgagtgatccagatcctacgtactccttgcgcccatttcgatccgtatgatcaatcgtccggccacctcactggaagagtgtgcgcttgcaagtggcaactcacatgcatcagtcatcatctatcacggaccattactccccatacacaccttgcaaattttctttgattttggagtttgattggagtagtttacagtggtcgtgaactgtgtcagtttggctgataccatctgccaattaacggttgttaattaattgcaaacatgcatgcatgtatgcaatttaaattttctggtctactgatgccgtagcgagcgataaactactactataagtctataacaaattcgaggataatggaggctagcttctgcactctaaacatgcatgttgtagtttgatctgtagaatttggtatagggtgcatcttgtaatcttggactgatctgatcactttttattgggacaaaatatactatatagaaaagttttacctagctgcgtatgaatcagctgtagcgcccgtaggtgtagcataattttacaccatactctctccgttacataaaaagcaaacagaatgtgatattctagtacaacaaatctgaacaagatatatcatattctattctatgttttctataggacagagcgagaactctgtgtacccttttttctgttgtaggcaggtccagcaatgtatcagtacggcatgtctcaacaagaaaagtgaagtcagggatgacataaacaggggaactgtttagctatagtcactagtgacatgaaatactctgaaatcttatagcgccattgtttcgcttattcatatgtttactggaatcacttactggcaaataaaaaatcatctgtgggaaaagcttttatacacatatacttagtgactcaaaagcaattgctataaaataaagtacgatgaaaaaaacaaattcaaaattaagttctaaaattcaaattctggcttataagcatcagcataattaagccaaacaatgagtaaaacttttgtttgcaataacgtgatgttaataagaatttatagaagtattcaaattctctgaaatcttagcaccttttcaaacaaacacaacagctccttcctagccttgaagtgcggataccacagtagtggtataaacatatccttgatgtgcggacatccttggtacacggccgagatatacttttttttctccaaaaaaacaaaatctttacttaacacgggcggtcgatcggtctgtgctcgatcaactacagaaataccaacatgtaattgttatctggaattaagcttcagatttaacaacttggagttcttgacgtgcaaaacagtttgctcttttcatctccatctccccatcttttaaaaaaaaaattgagaactccatctccccatgttacctacgtttttgggccgggcagaatttatgagaagttgcatcagtgctgagatagacttcagagagctcccccaaaattaatctgctgatacactgagacccatttgactctcatggcgacagctagttatcctaattaatcaatcccggaattattgtccggaatgtgcttaacatccaccccagcagagtaaacaaatcaatggcggctaaaacaaaagcttatccttccaatctgctcgcagggtgttcgagcttgaaatcaagcccatactccctcatgcagagtcatgcagtgagacaatataatacacatgctcacatgcgacgccggattaataatttttcgatcgttaattattttctccttaattcctagctccaaagtcagcgagcctcgcatgctagctgagctgttcttgcatgtgttcttcccgcgctgtccgcgcagacaaaaaccctgcaaatttcttccggattccgaccactagtctgtcactagctagctctctgtccatctgatcgattcggatttgtgctataaatggacgtgcaatggagagcttagccattcagacaacggtagtggagtgtgtgagtagctgaggaggtcgaccatggcggcggctagggttgcgatgtgggtggcgtgcgtgttggcaatggcggcggcgtgccaggggcggcttagggttgggtactacaagcggaagtgcgcgccggcggagtacgtcgtcagggccgtcgtcggcaacgccgtccgccagaaccccggcgtcggcgccggcatcgtccgcatgttcttccacgactgcttcgtccaggtacacagatcgatccgtacgtccatggcgatccatggatacgcaacattggttgccgcaattgatgacactgagtgacaagtcgttcgtggttgcaggggtgtgacgcgtcggtgctgctcgacccgacggcggcgaacccgcagccggagaagctcggcccaccgaacttccccagcctgcgggggttcgaggtgatcgacgcggcgaaggcggcggtggagaaggcctgcccgggcgtcgtctcctgcgccgacatcatcgcgttcgcggcgcgcgacgcctccttcttccttagcggcggcggcatcagctaccgcatccccgcggggaggctcgacggacgcgtctccctcgccaacgagacgctcgcgttcctcccgccgccggtgttcaacctcacccagctcgtcgccagcttccaggcgaagggcctcgacgccgacgacatggtcaccctctccggcgcgcacaccatcggccgctcccactgctcctccttcgccgaccgcctctcgccgccgtcggacatggaccccggcctcgccgccgcgctccggagcaagtgcccggcgagccccaacttcaccgacgacccgacggtggcgcaggacgcggtgacgccggacaggatggacaggcagtactaccggaacgtgctcgacaggaaggtgctgttcgactccgacgccgcgctgctggcgtcgcggccgacggcggcgatggtggcgcggaacgcggcggcgcgcgggaggtgggagaggaggttcgcgagggcgatggtgaagatgggcgggatcgaggtcaagaccgccgccaatggcgagatcaggaggatgtgcagggttgtcaacgagtaactgttaatttcagaggaggatgcatctagctacgtacgtgccattttgatttgttttcttcagaattcagaagcatgaattgtcacatttcaatattatttcgttgcttgattcgagatgatctggggcaaatgttgtatttgcacctgacggaattaattgtacgctccattagagatatgatcgaataaagtttttcagtttttagccagcctctccattctttctccagttgtgacaacaagtgtacttgtctggtcactagctagtgtataatctggcgaattagcaagggaaaaaaaaaatctgacaagcacaagctgtaaatttgactagtcgagcaacgagggcttgaacccgaaatgggcccaggacagtggagaagaccagcccataacttggcccattgcgctacggttgatgcggcccatttcgctccgggagggcctaggaatgaatctgcttccttctcggaatttcggcccagtcgcacgctctccccgtaaagcccgtacttcttctctctttttggcactctcgtctaatttttacatgaaaatggtcacacgaattaacagaactgctgcagagtctgccgataagtagatgttgtttattcatatacattattccttttgcacacgagtagtacaatacagatgagtatataaattagcaaaacgtcagcactttgctacggctaaaggaaaatatatcacaatatttccagaataaataaaacacctccttcctgaaatatatttctcacattttcttaatagagaatactcactttagtttaattttatatgtagctaatcatttagatttagctgttatacaatgtaataggtaaaaactataatgagaatagtggggtgacagatctagagatttttaaaggagtatagatatgagtatgactgcacgtccagataaagataattgaacctttggaaattcatggtgtttattcgtgtgatcatgggttacatcctgcttcgatgcaggatagacccctgtagcaagtttttcagctggcgcctgaggattttgcctgaaggagaccttggaatggagtcaacgaacaccactttcctgatcttcttgtatggcgccacctatatacatcatgaattcatccatgctcgatttatcagaactattcaaacggttaatgcagcgcagcaaggcaatctaatctgcattttagctctgtcactaattgaataatgatctccctatacgtatatatgtaccttgttctgtacaaaggaaatgacttcatcttcctgaagatggccgctgccttgtttcttgaccacatatgccatcgggatctcgccggcctccttgtcgggatacctgcaatgctacacttaattagccatacatatatatgcagagttggagagtgtgagctgtaaattatttgtttcacgttttaactctttatacacattttgtcgaaaactttcttctcctgtattagtactagaccacatgttttaagctatatttaataagactattttcttaaagtatttaatttatctctaaatccgctcaatagtctaaatcaaacagaacagtgtactgacggcgcgacggctgcgtcgtggatgtcagggtgggtggccaagacgtcctccagctcggccggagccacctggtaggcgttgcacttgatcagctccttcaccctgtctaccacgtacaccagcccacgcgagtccacgtagcacaggtcaccggtccgcagccaccgctcgccgccgccggagacggagacagagccggcggcggcgaccagggccagggcggtcgcctcctcgttgttcaggtagcctcgcatggtggaggggcctcggacccagagctcgccggtgcggcggggcgggaggagctcgccggagtccgggtccacgatcttggcctccacatccggcatgagccgcccaatcgagacgccaccgccgccgccgccgccgccggtgcttctctccttcacctccgtcgtcgtcgctgcaacagcgacgaacgtcatatccgtcgatgacggtggcatttccaccttgtcgatgccgttgtcgttgtgctgcagatcgcacatggtgacaatgcccgtcgtctccgttagcccgtagcactgcacatatgcatgtacaatatatgaaaatatttatgtcatgcttaaataacatttgatgatgaatcaagtcacaataaaataaatgataattatataatttttttaaataagacgaattgtcaaacgttgaataaaaagtcaacggtgtcatacattaaaatatagaattagtatattattatgtaatatctttggataaaaaattatacaataaccaaactctatataatttctatgtttttaaaagtaagtatcttagaattattattagccaaacttttaaatagtgtacaaacgttatgggcatgtttggtagtgccaaatcttgggcaagatttggtactaccaaaattttggtagggtagagttgaaaatgtttatttggattgaagccaaaattttctcataagagataagtttataggcaaagccaaatttatggcattggtagagttttagtagaggtgtttggtttgctacctaccaaaattttggtagggcaaattttagtagggtagcaaattttggtagggtagcaatctaaattggccctataaaacattataggagggagtatttataaccggatggaatgcatgtgtcgtcattgttgatttaacgtacaccagagatatatcaaggacatgaaaaactgtgaagacaatgcgctaattactctattttcccctgaagagcacatgggatgtgtacaccagtgccgcccaattaataatctattaattttgagtggtatttagttaacatgatgtcacgttcgtcatctgaaaatacgtctaacattgggtaaggaatgaacagtacggtgacatcaagcagtaatggtaaggactgaacagtacggtgacattgggtgaatatcagccatccatttcgagatggacggctctagacctaggtactacagcgataacctatagtacaaaaaatgattttaatcacactttcgctacagtgctacacagtacgcctgccacagtgctctgcccttttctctcactgtacatgcggcgctgtacttagagggtgtgaattaatccgtgcaagttcttgctgctacctctgttccaaaataagtgcagccataaatattcgtgttcatcgttttgatcatctgttttatttgaaaattttataaaatatatataaaaaaattagtcacacataaaatgctattcatgttttatcatctaataacaataaaagtagtaatcataaaaaattttcaaataagacgaacgatcaaacgttagacatgaatagtgctaaaactgcacttattttgagacgggggagtacaattttcagcttgtacgagtattttgctgaattgtaccgacctgttttttctagagtactagctagctactccagtacatatgtacatgggtacatttattgattcaaagtgcattagatcaagtaatgtaggactctaatattttgtcttaagatatagtagaatcacgtgatgatgagatggaggagagaagccacccctcacatatatgtaacctttacacaaactcttagagagatcgatgagagtaagattagagagataagagtaaaagaccaatgaattgaaaacaaataaaataagattattatggtatatcggggttaaatatttcacagataatttgttgtatgtactactttcaaattaattaatgagtaaataatgtagataaaattaaagttaatcttagaacttgctcttagtgtacatattaattgtgtcacgcgagcgtacatgtcacggttgatttagaacaggtattaattgcacatacaagtgattttgcctctcataattatattttaggactgaggtagtacgtagtaccgtaatagtaatgtactgcatctcactaattagtgcatcgctgaaattagataaccggacgaagtgacattgtgtcaccaaaaggaaagggtaattagacagccatcacagccctgagatgacggggaaattaattagctagctttaatgcaatcatataatcctttcatcctttggtcataaatatttatcttttagataaaaaatcgatctaataaaaattccggccatcattttttttcagaataaatttacaaaatatcataattgagcttataacagtatgctataagatttacttatatttgctagtagtaaatctcataccaataagtagttgcagaattagaccaagtcaatgttgcagtacgtatgaccgagaattaatgcaaattaaaactagttctttcatatatcttctcacaaccgagagagaataattaattaagggcggttcctttcaaactcaaaaagtaactaacataatgtcaggtatcagaagatcgaatccatcgattaccgagtgtttcacaagctagtggcgatttatcgtttccatcaattaatgtgtaaatattatgtcaatgatatagatcaaataatttatagccaaagatcttttatttcactataggtggcatagtttcattagaattgctagctaataaatctatatggtttaacgctagtcaataataaatgagagtttggatttatcgtatcaccttaatttctcattttgatttatttttatcttcaccttcatctttttattaacaaatttatgaccgtgtgtgtcttataacataagctagagatgtaatcaatttctattattaaaaatagatcaaataatatatataatgcgatgagcatacagaagagaatcacacttttctctctcaaaaaataagataatacgtaaacatggcaaatacaaccatacatcgtacaagacgcatcagagatgagaagctaattagttatttatttattttcaaagaacgagacagtattgatattaattagttcccacgcatcaaagtggaatctctgttgagtcttccatgcatttgtcacaaaagggatcaatgaaggttttgattcgatcgacacaaaaaaaaatgttttaaaaaaagttcaggaatgactagattttatgcaatttgcatattataaaacatcaaaggtcaactgtatagatgaatttatgcagtgacgaacataaactataataattataattaagacatgttttagatttcaattttttttttcaaacttatacttttccgtcacactgaactttcctacatataaactttcaacttttccgtcacatcatttaaatttcttcaaactttcaattttagcgtgtactaaacacagcctaagtaaaataaatcacacaaattaagtttactttatttttgcagagaattaagtgtagtcattagccgttgattaattagggaagcaactgtagcaaatagccaggtaggatacgaacctggccgaggttgaccgccgggaagcagctgcggaagcgcgccatgtgctcgcgctgcaacggcgcgccggacgacaccacctgccgcagccggagacgacgccgcgacggctcgccgtcgccggccgccgccgcgaccatcttcacgaccatcggcggcacgaccagaagcctcgtcaccccgtactcctccaccgccgccatcgtcttctccaccgagaacctgccggggaccaccaccgccgtggcgcccagcgccgccgtccccatcacgaacgacgagaagccgaacatgtggaacatgggcagcacgcagccgtacgcctcgtcgtggtcgtcgtactgctgcggcttctcgccgccgccgccgccgccaccccacgcgcgctccagcgacgcggccatggcgatcgcgttgccgtgcgtgctcaccacgcccttgctcctccccgtcgtccccgacgagtagaacagcagcgccgcgtcgtcgcggccaatgttcgccgccggcagatccaatgtctcgtcgtcgtcgacctctgcggcgacgtcggcgaggagctgctcgacgaggacaagtttgacgtcgggcgcgatggagcggagcttgggggcgagttcgccggtgacgagcgcgaggaaaggcttcgcgtcgtcggcttgccgagcgagctcgtcgggcgtgaggagcgggttggcggcggagagcacggcgcctagggagagcacggcgagcgagagcgcggggaagtggagcgagttcggcgacaggaggagcgcgacgcggccgcggcggaggccggcggcggcgagcgcgcgcgcgacgcggagcgagagcgcgcggaggccggcgaaggagagcgcggcgccggtggaggcgtcgacgaaggccgggcgggctcggcggccggggaggagcatgtgcgggaggatgtactccgggaaggagagcgcggcggcggcggcgaactgcggagggtggccgctccggtagacgcccgtggcggcgcagtagccggcggcgaggtgcaactccgtctccatcggtgtggaatagtcaatgcgttcagagagaaagctcgggtatttaaaatgagcgaataaatgagatggaaacatggttaacgattgaaacaaatcgatgaccaaattttgaccatcgaaattcgcaaagtcgatttttaaaacgtaaacaatttgatttggcccatttcagaaaaaaaaaaggagtttgatttcagataggaaaaagtacaccgaaggtcccacaacttgtcatcgagttacaaaatcgtctcccaaccacaaaatcgtctcttaaccaagcaaaaccggtcacaataggtcattagtggttttgacacaaaaccgtctcttaaccaagcaaaaccggtcacaataggtcattagtggttttgacccggttttagcttacgtggcggctgagtcagcgtaggccccacatgtcagactgccacatcatgagtgtttctctttccccctcctctgtcttcctcctccactctctctctctcactcctctcggggcaggccggccggcggtgaggaggaggtcgccggggcgaggagctccgacggccggccggcgatgcggcagcggcgcggcggcgcagctgctatggccgctacctctccgcctccaacgaacccttcctgctcgggataacgggccgcaaggtgctgcaggcgcagccccccggcggccgcgccaccgactcgtcgctggagtgggagcccgtcaaggacgacgctctcgtctacgtccgcgtcgagctcactgcctggaacgtcgcgccgctgcggtgcgcggcggagtacctggagatgacggaggagcacgccgaggacaacctgaccgcgcgcgtggaggcctacctggagcaggcagtgctccggcactcctgcgaggccaccaaggcgctcaagtcccgcgaggagctgctgccgcacgccgaggagctcggcattgtcagtcgctgcgtggaggccatcagcatatttacaagcgggtgatgaaagtcgacaaatacgaagcaacacagacacagagagacagaggcctctgcaagtctgaagctatacacaaactgataaattcgtacgcataaaaacacatccttactggcaaacgctgttggtttctgaagcacgagaacgacaggagaaacggaagagaggatgactgccatttctcggtaccactgccgtaagagtgaatttaaatgaagaacaaaacatggatcacttaacaagtccctttgccaccaccgcgcgctcgtcggccgcgtcgcgctcctggttcgacgacctcgccgtcctcgggctggacatgtacagaagggtaatggctgccatggcggcgcgcgccgatgtgaggacggaggctagggagagttgtctcgtgtcgtacgccaggggcaccatcaccgccctatcgaggtcgatgcggcggcttgcgtcggcgccggcgtcgtcagaggtggagcagagggacctcctggaggcggtggtcaccagcgtccccaccgacaagtgctcggggcgcgtcgtcaccgccaagttcctgttcgcgcagctgtggacggcgcacatcctgctcgcgttggacgcggcgctcgggcagaaggccgcgacgcagctggagcacgccacgctggaggacgtgctcatcccgagctactccggcggcatgaagacgctctacgacgtggactgcgtcgagcgtgtggtcaggcacgtactcgccgaggaagagcacggcgaggcaggggagtcgacctcagccgctgcaatcaccgaggagaagcgggggggggggggggg

SEQ ID NO: 5269 - DNA, 24885 bp, Oryza sativa
cgctttctcggactcgacttgggcaagtgatcctattgatcgtcgctctgtcactggctattgtatttttcttggcacttctctcctcacttggaagtccaagaaacaaacagcggtatctcgatctagtactgaggctgaacttcgggctcttgccacaaccacttcagagattgtgtggttgcgttggctactagctgattttggtgtctcttgtgatgtcccgacacctcttttatgtgacaacaccggagctatacaaatcgccaatgatccaatcaagcatgaattgacgaagcatattggcgttgatgcatctttcacacgttctcattgtcagcagtcaacaattgctctccactatgtgccctccgagctacaagtcgctgatttcttcaccaaggcccaaactcgagagcatcatcggttacatcttctcaaactcaatgtggtagatccaccttgagtttgaaggggggtgttaaatatatatacaagctaatgtactgtatagttggcccatgtccagcccatcggatgtccagtccattggatcttgtatcttgtatatacttctctattgctaatactattgttaggttgcaagttagttaagatgtgtgaggtcacagttttatcatcactgtcaggcagcatccatgccaatgaagtgtgccaccaacaactccagcagcttatgcatgaagacgtgaacaagcatctgaactttcctgttcctccaaacaaatatataccaacctctccaaatttctatgcctgtcttgccaactttctgatcaatgacacggcatgcagcacgaacaaattaacaaaggaaaacaccaccttctgaaacttttctttgaccaaacacctcaccttcttggccggccgccggccaccggccaccggcggcggcctgttccggcggccggtagcccggctgtcactgtacccggaccagaagggattttcttgatacctgcacaactgtatatgtattctggtagctcaggaccattctgacagtaagcagcaagggatgttgccaacagcatctgttattaatacttctcacaaattgacaaccaaacagaaaaaaaatcttgaatttatcagttgcccatcagagttaggtactcactactcactcatacatgtatgttttgcagatgtgcattgccattctttcaggattctctgtggattgtggccattggatgatacacattctgcctcagcattgcagggtttattatctgcagatgatccagctagctagcaagcaggaaactgtgcacttctggcagagtaatcagccagtcaggtgtgtgtatggctgttcagaattatgcaaacatgttgccaatggggagagagattagctaagcatgtgcagctgcataatgttaattggatagaaaattcttaaattctccctctcatgtggattatatgccatacttatacacccaatcattgggcagcaatgccaatctcctctctttatgtgtctatgtgtgccccttgggaatctctgcagcaacagcacagatcacagccagtgaggcctgtaaagtcagtaaagaaagaaagaaaaaaagagagagagaaaccctatgcaatcagagatgcaatgctgctagctgcagctgcagctgctgggcttggctttgcatgccatggctgccaagagagagttgtcatggttacatccttttcactttcacttttatcatcatcagtagtagtactcatccgtaaattgctcttctttttgtacatcctttcaggtgttttggatggttgccaccccttcttttttttttccttggccttccttctccctccctttgacctttgttattgcaaaacagcatcggatgcgccgtagaaaagctaaaaaggaagccaatcaatcgtaatccctttctcatctggagcaaagatacgtgtaattctttatatattcagtggaggtggtaggttctagacttctatagatcacatgataagaacagtgcccacggcaaaaccacgtcgatgggtcactgataagtgggtccttatttgatgatcgtcaagcttccgaggtaaagtttttttttttcagtaagaactctgatgctcacggtgaaaccgtgtttatgggtcactgataggtgggatcctttttcaacgatggtcaagcttcaaggggaaaggattttgctagtaataactctgatgccgattttatatcattttagattatgaaacaagatgttgaacaccaagatttggtctttaaataagttggttgcaacatcatggctggagggaggatccttgagcttcaaagcacctggttggaaacatttgctaccaagggacccagcttcaacctccaaatggccaatcagttgccatgagtttatcattgaaaacaatgtgcaaagcctttgttcatgttggttgcagacaaacatactgctacactttgaacaggttcaaacttgttcaaatttgcagctgaagcagtgcaatgaatcagtgcaaatgtgcaatgcatcagtgctaacaggcactgtgctgcaacaggggaacacaacaagatccagtacagttcatgtcatttggctggatggagatccagacttgggctgcctccaagaaaagccggtaagagtgtggcatttgcctccatgacaaagttggattaggcagaggccttgacaaattgtcgcggcaaaacataaaagatggcgaaaccaagaacaggctaaagaacaacccaggattggatccatatatcccatgcattgcaggataagtgaatggtgctgaagcttcagttggaattgacgttttacaggctagctcatggtaattcaggaactttacagagctcagaaccagcaacctcaagcttacgttatgccactgctttcagcaacttcttcctcacaagaacttcagggttttggtcatctccttgacaagatagtattcagagagagctgtgacaaaactactatccatgataatcaaagcattcaaaaaccacatcgaatccctctccaaaaaacctacatcaaatcagcatgacagcgtatgaattgaagcccttcatcaataatgctgtttactgtggcagtgtggtattctttcctcctccgaaaggatgtagtcattcagaggaagttgcatgtacttttcatgactactgatcacctaagcacttcatcaacatgcgcgaagagcagcattatttgagggtaatgtcatatatgactccttcaagatttgagatggttgttcttgtcccatccacctctttgacatgcattccatgtttttcagcttccttgagcactagaacatccatgctggtaatcaatgagagcagcagtgtcttagttaagcgaacacacaagttatttttaaatgatctatcaacacttgaagtagtacaaaatcaattaaagttagatggagagtaaaataacccaaaaaaaaaacatgggatgacttattgagagttgggattgctccagattttactggaatttgttacgagaagctccaaaaggtcccaactaagtgaaagggacaacactaaatagcttaattattttttaccacctttctgtattgcagttttttaaacagtacaatctggacataccaagtattatgctggcagtatgtgcaagatgtcagtacagtaatcacattctggcagtaccaagtaaaatatccacagtatgctgctacctgttctagcccagttaattgtaatcaaactactgcaagccaacctgtatattctatttgctcatgaatgcaactggagtactggacaatcattttgcagaggacaatgaactgtcaggtgcagagtatctcaaacaagcgacaagctgacgagagaatgggtgacataacaccttgttgccatgaaaatctgcagaacttctgtagatctacatgtcactaggaaaaagatttgcctgtgaccatcctctctaagtactaattaacgctagatcatatttcagatgtttaatctgctttacatttgaatccatcagatcaatatattttggatgcagcattttgattatttggtgctattgatgcactcctgatttcacttgtatatatctttgatcagttctatcatgactactcagctacctttcatactaagatattcattattccatgtgtagcaaacccagacctatagtacaagcaagttaatcggtatattaaaaagaatcaatagctaagtcagtccttgttcttggtagacacaataaggataccaccaataaaaatgtacctattccatagttttatcaataaaaggtacaatcatttatattttgatcagaaatgagacacgcattaaattggctttcctaacttggaacagcattcgggtacacgatttcacaaaatattagaaactctggtaaaatatgctcggacaggaagatgatgagttattgagttgagaaaacacatacactttagctcgtgatacataagccaatatgaatctacatttactagcctgaatacgaagaagcctctctacagtatcaaagagacaggaaatgctagattgctgaaagctttctgcgagtcaaggttcacaaaattcacaagatgcaacaatcgatatacgattatatgtcagaaagaatagaaagagaaaggatcagaactgaaattaaatcacgggaaagtaagaaagaagaaatcacagcaaagtaagaaagaaggatataaatatcagctccaaggatgagatcaaatccagaaggatgtttctcaatgatattgcttatatgaacatagtttccccactctagcttctctgctgtcaacactgcaacaaaagtatcagttctatttgatatctggaagatttatatttcagtgattcacataatgatgaaacataattaaccagaagttaagaagtggtaacctgcattggcattcccagaacatgactgcatctctatattcttctttataatctgtcaaacaatctttggaataaatagatgcaacatttatatagaataagtagatatgcaagtggcacaatggaatcatccttgaatattttataatgtatgactatgacaccactttctagaatttgaagataaagcagctgcaccgaataatatgtgaacacaatgtgaaagtctcaatatcttctgtattttgtcaaactaagtgacatcactggaagatattcgtaaggtttgaagcttgcctctagaacttcatcattgtgatcagtcaagacaacttctttgcaaaaacggctgcacaatatgccagtaatgcctgaagcaagtcacaagctcacaatactgtcagattttccaagatcacaaagtgaagtaaacatgagaggagaatgccctcaccaaccccagatcctagctcaattattgaatgatccttcacagtctcaggatgttcagacaagtaggtgttcatcagaactgcacctggccatactaactgtccagtaagatcataatcagctgccacaaatcattagaatgtttgtaagtgttggccccatgataaggaaacagcaaaaatctggcgttatgaagtgcaatgcagcattgtgcccagagcaaaaatacacccaaacaagttaatgtactgatgagaggttctagtttgtaaataagattgttcatatttgtccactgcacaaatagaaataaacttgagtatatcatgctcagatctaacttttgtgttccacggaagagctatctccagataaatgatagattgatagttactatgttacacaaagcagcatagcctcctggttatagaagcagacatgaaggacagaatgaaatggggcataagagttacatgacgacatatatgcacaaaatgaaaaccccgccattttgtttgatcctgtgaaacatggaccattcattgtactgacgtactagaatgacaatgtctgagttggaagggttcccaaaagggacaaggtaaaagtggtcctaaaactacatgattggtgtaatgaaaacccagtttgctactgcccaagcaacaagaatatatgaacagaacgtatcacatcttccagttgaactcatatgtaacaccaaattcagagatgatggagtaatctatagatggtagatgctatgctatgaccttaattcatgatcatcaagctaaaaaggagtggagatactaatttagtatccagtaacagctgattctgtaaatgaagccggttgaatagaacagcgctgttctacatagacttcttcaccaaaatgacaaccatactgagcagtataatgctcaaccaactatgctttttttttttttgcctctaaactaggctatcttagcagtggtttcaggcttccagccaagaaaatttcacccagaacagactagctaagtagaaattaaccatattttgcatcacaattgggcataatagagcagctttctggaaccatttccacatcaaagataactatacctctacacttagcaagaaagaacgagtaggagcaggaggtactaactggaagcagcgcggaggcagaggaggtggagcacttgcgagccgaaggtgaacgtagtcgtctcgtagcttccctcccagatcgacgaaccccagcaacaaatcgggacaaagcttcagcacacaagcaagccgatgcagctcgaccaaacaaaaatcagcagagagcgaaccagcgaagcacacctgcggtcgacgaagaacgacgggtccagacagacgacgtcgtcttcttcctcctcctcccttcccttcttcccttcctctcgccgctcgctcgcgctgccggagtccgccatcgccgccggtgactgcaactgaagtggacgtggcggcggcggcggcgagtcggcgacccaaaccctttattcgctcgtgggctatacaaaggccagagtcatgggctcataatcaagttgggcccaaactcgattacacaagggccaactaagtaataggcattaaatgacgattttgctatatagtgatttcctatatttgtcgcaattttttttctaaacaattcacacatgtaaatatattataatcatagtgtaattatattatataaaaattatatgtaacttttatataattataaaatcgttaaatttgtttcaaggtttatacaagcaagcaaggaagaaatgacagtgcgcgtataggtgagggtattccgtcacaacttacaagacatacacgcttcatggaaatagtatgctactacgtatcacttatcacaggatctttgaaaagttacatacaatttgtattataattatatacatacaatttacaaataattacattgtattatatttacatatatcaatttttttctaaaaaagttttatgacaaaatgtattagctggtcccttaaatgaaatgggccgtggaggtgggccggtccagtaggagtggaacgttctagagggccctggagaggggcaagcccgtaaattcgccgccgcgtcgcctccaccttaaaaccctaaaccccacgagcgcggcggaggcgatcgaagagtgtagaacttttgctcggtcttttttgcttgcttcgcaagaagaagaagaagagggcggcggcgatggcgaggcggctgatcccgtcgctgaaccgcgtgctggtggagaagctggtgcagcccaagaagagcgccggcggcatcctcctccctgagacgtccaagcaggtttcccccacgctgttcttccccccctcgatctctcgtggtgctactgctgcttctccttgctgcttcgagttggctgcgagtgtgatgcgatccggtgaggggaggggagtgtttagatcttgttccatgcgcgcgcgcgtgggggttaagttgggagcgtggtgttcttgcttagaatgtttgatttcgattgcctcgtttagggtgctgatggctagggaacaatttgttgaaattacttgttcgaatgatgcatgattgtgcttagcggggtcagattgcgtttttgtaggccgcaaactgttaatacattttgcaattgtagtaacagaaatttggttatgcctatgtcattagtctctcgtaaagaattgattttttctattatttgcgcttttggattatataatcatgctggattgctagttacactgttactgttttattacactagttgcatcaccttgctaatgttgattgtttaactctgaatgttccgctgaatccagctcaactctggtaaagtggtggctgttggccctggcgaacgtgacaaggatggcaagctgatccctgttgctctcaaggaaggagacactgttctcctgcctgaatatggtggactcgaagtcaagcttgctgctgaaaaagagtatgtgaactatctctccattgcttcacttgttagtgagaatgtacctttcggcatattgctagggcaatgtaattaccactcgttgcatactatcatagatgatagatcttgtagtgctctcatagtacaataatgtgtatgagccccatcggttggcctaataagccaaagcaaaagcatatatttgaattttcaaacttgaatttgaagttgattttaagatattttcaacgtaatttctttttagcattggtttttaagttgctaggaacaaatatataaaagttttacctataaattaacttttattccctaataagggaatatgggcaaccaatgaggctctcatgacctctatcggcagcatgctatagcaccgttgtttatggctaccatgtacgaagtagtaattactctctccgtttcacaatataagtcattttagcatttcccatattcatattgatgttaatgaatctagacatatatctatctagattcattaacatcaatgtgggaaatgctagaagacttacattgtgaaacagaggaagtacttgtgagtgctacagttaggaattgatcgaatacttggtggtggtgttgctgaagaaccgggaaccacacgtgcttcctcgtttaggctgctttcttctggtagttcaatatttagaatgcttgctgttgctagctattggttgaacgttgagtgggaaaatgatctattatgatgatttttgttcatccaatattctgtatgttcctgatagttatgctgatactgttgctgtcagtatatgatataaattatgttttaccattgctctaataatctttgcatctggaattccaggtaccttctcttcagagagcatgacatcttgggcacccttgtggactgatttggatcgtcatgaacgccatcagtaatcagttgcgctaatgcaaggcatgtttttttagtattggatcgacgggacacaatcctccagacacaactgtcttttatgatgtcgtagaattttggctaagaacatcatgaacttgcaaaagattgttgcttccttttatctgttgcgatgaaattcagtaaacgttaacgcatctgaagagcctcttcctttttaatctgctctgtcttctatgcatgtttgtgttctctgtgtgctggttggatatgtgtcgctgtgacccgagcttaatgcggagagatcgataagcggatgtgactatgattccctcgttaaatagttgattgattgaattatataaccgctttcatcccatttgattggggaaataaatcgcgctcatcgctcatctatcttggatgaaatagttgattgaaccctcttcacctcttatgcttcaggctgttgaagtcgtgaattatcgcatgcaactttgctgtaacaaatgtcatttcaaaccaggatttaacttaaattacaatatagtataaatcacggatgtagtaaactaggatatgtccatatcccatcaggctctaggttgctatattctgagacggaaggttctaggttgctatattctaagacggaaggagtatgtggttttgtcatcttttggaactatatttttcaccattctcattgtaataaagtttggcagaacagacaaatatacttctagaacagtttcaggcattttcattctcatgaaagctgacataaatccaatcacaaaaaaaccgatcagttgattggaactgtcgtctgttcgggaggatgtaataatctgaaataatgcggctagctcatgtctattgatattatcgtctatcacaattagcagaatcatacaagaaccagcaatcagaattatcaacagcgccagcacgccgcgcctcaataaaatccctcagtttggcgtctgcagatctttgaacaatatctggctataattcatgatcgtttctcataggcattcagaaatctttgagcagcatctaggttcagctctttgtaaacctggcacagagaacaatatcgtgagatctcaaggcagttttgcgtggtggtggttattgaagtgatggctgggagtcaagtccatacaagtttcttatgggcttcttcaaatgtcttgcagaacaactctgcctttgttgctccaacctgagacagtaaccaataacatattagtgcgcaatcagatcggcctgtttcaaggagagatgccactgagcactcaacagcgccattccctcttaaccaacaaaatatgtaccatacagcctcaaaaaacagtgcatgtaggatgtagcttacagatgtactatttatatttaccagctttaattgatggacacctcaaatttttcaaaaaaaaaaaaatccaggacagccatgctcacgatcattttgccaaatatttaaaatctcttaccaaagttcttaaccgcataacagcagacttttatgacaaatcgcatccaaggagatctttgatttattccttactggtttacttattcatataaccgacacatgatattaaacaatctttttgaaacttccatattatactgagcaggtagttttgtgaaacaaagtgaaatatataaagaggaaatcccacctttttctcagcaaccatcttcaattttttcatgaattgatctgagaaacatgcaagaaaattcatcaatatcagtatatgtaagctggtattctttattgaagggcagcatatgagaaatacatctacaactgcaaccaaagtcttcatccccttatgcactgttcatgcaagtcccacaggaagtaactgacctcaactcaagtcatattacaaatatcaccaagctactgcactagagaatatatttgtctattctaaaaaaatcaatactaccttcatccccaaatgtagctattgtccaggtgcatagctagaaatagctacaatttgtgacagaggtagtattattttccaatcttcatctccacaactattttgaagatctattccttatgatattcaaaactgcacattgctcagaacacagcctttccttatcatttcagtgagatacatctatagacttctcccatgagagggacttgtgctgcaagtatctcatcaatttctacaaccttgtgccaaagtgtacttaagtttgaaggccacaaaaaagatcagtttgtgcgagtgtctatttcaactctttgagtgttctggttctcaattgaatactggtaactcagactgttgttacagctcagtttagccatccaggaaatcaagcttccatatctactccctattaatctagtttggttatacacagcttcagttgttcaagtcaagaacaagaaaatcctaaatggggaattcaatacctacctgacccaattcataaagagtgatcaaatgatttctggacctcaaattgaagagaaattgatatgtgctgtgaataggagtccagcaacatgccaagttgatcattaatatggaattaagtcccatggaagtcatgagtatgtcatgtctaaccatggagaatgaggattgtggtgtgaaatgacaaacccagggcctcagaataaaggcccaaggctagttagcaattggaagaagtgaataagttccccatgggattcacatgaacagggatgaagcaggaagagcaaactttatggtagtgacacaggacgtcattccagcataagaatataaagttaaatgggtattgcaggtttagttttctgctgtaataattggtaagataagattaaaagcagagcaatcaaatatttatcgataagccttcagtaccagatgactcatttttgttgccccttgttgcctcctgcaaacaatagctttgttagaaataattacaaaatacaactaggtagcatttagatagttaaattagttcatacacacctgagcccgtgattgctgtgtgctgcctttgcttgatgcccctgattcagcctacatccggcgaaaaaaatttcatcagttcatgaccatatcacgagatcgtcaaacaggaaaacaagcactgaccatatttacttcagatcattcttcattgaagcattgcccattgatgtttccatttaaatttacttattattgcagcaaacattgttaccgttcaacccagttttctatttatgaaaatgagctctaccatctagttctctctcaaccatagcctccaactcaatgttatgcagagagaaacacaaacatgcttgcaaatagcctgttaaaagttattcctaatattaacctacacacttcaaggggctaaaattagtgtcactaaaaatagcctgaccacataaatggcatgggaaacacaattgcatggctctgtaattgaagtagcatggttatattgagatatgaccaacttagtgtatctctagcttttagaaccatctgaagtacagaaataaaaatcctacagctctacatcttcaaaagaaaattccagatgtactgcattctagcatccttatattgttaaagaaaaaaaaagagttttcctctctctatctcattttaactaacatcactcaggcaattaccagtgcactatcatctctacaacttctactgcgcaaacaactcaggctagaagacaggttcatgacgcaattcgacggatcagtataaccaaagtgagattatctcaacataatgcgtaatccagtctccacgcacatcagcccaaggccacaaatcaacagccacccaaatcaaccaacccatgccctaaaatcgagacccctcttgctcccccaactcaagcacctgaactgctagatcgccgccgaaacgccgattcgcccccgccctacacgtgctggaaacgagagagtagggtatgagaaagggggggaggggaggggatggaaattacgcagtagtcgcgagatcggacgacggggaagagctcgagcatccgccggaactccctctcgtccatggcgccgcgcgccgccgctactccggcgatgagctccgcctccgcccgcgctcgtagggttcgatccgattcgagcgagctcctcctctcccgattcgttgctctctcgctctcgaagcctcgaactcgctggagacgagacgagacgacgacggcgagtccaacccagacggagccgacgtctacgcggcgcagtcgcttgctggattatcgggtccaactctgtttcagattccggcccaaaataaacctctcaggtcttgggcctcttctgggctaggcccagaaaggacacaataaaatgggcacgaaaccaagcttaagtacagatgaatttttttcatttttaattttaatttttttaatatttacataaatattataccatccaaaatatttacacaaatggcccctgccgcccaagtggagggcggcaaggtgtgcgcattttacacttaggtcccttgccgcccttgtaccctctacaagggctgcaagggggtaaatacaattttcgccctgccaaaaatgcatttttctagtttttttttcaacttgtctgtccctcacgtcaccctgccgagggcagtagggtctatttctgtaaatattttcgctggtgcaatatttctataaatattaaaaaataaaaatttaaaaatgaaaaaaaaaattcaagtaccgatattgcgggagcaggaaccatcgacgtgctcaatgcccacttggtttattccatgagtttctgagacaatatttatttactactccctctgtttctaaatatttgacagcgttgactttttagcacatgtttgaccgttcatcttattaaaaaaacttttgtaaaatatgtaaaactatatgtatacataaaagtatatttaacagtaaatcaaatgatatgaaaagaattaataattatttaaaatttttgaataagacaaacggttaaacatgtttaaaaaagtcaacggtgtcaaatatttagaaacgaagggagtaagttatttgtgtcgaagcacaccatacacatttggcaactggcataaaggctagttcccctcctccatggaagagcagaggcagtgaagtgggccaagaagaagctgcataagagggagagagagttcgcaggaatctggaggctaaggagagagagttggtgaggaaattcttgcataagagggaggttgataacgaactaccctgagttcttgcacgagtttagggttgaggactgttgaatcattcgtcgagaagtaggaacaggagaagtagataagtcaggtggtggcgctggagacctcgggcggcggccggattcggcgttgcaggtctagtgtcagtgctcatgggagctggcggcggtgcgtcgtcttccttgttgccagtcagcaccctctcccttcttgaactcctccccttctttgtggggagtttcggttgggttgaggcggctgctggtcagcaggggaagctcaggcggccgaagtgacactgtccagtccggattctcctttggtcgaacttggcgaggaggccggcgggtggcgggacggaggtggcctgggccagctctcaggggaggagcggtgggatgcagcgagctggcggcagggttctgcggcaagttcagaagtcaaccagcagagaggcgctggtgcggtcttggtggaagccacgcgctgccaatgcttgtgtggtggttactgagttggtgggcgacaaactacttgagaggttctaggggttccaggcgaaagcctcactcggtgatcaccgggccggcaacggctacaccttcgagtgtcgtaaccctcttgggggcgctgtcgtgggtacctctccccctttcttggcgagttctctttgggtggaaaccacatctttcttagatgggcgatagcggcgtccttgatgtcgtgacctccatgggggcatcgtttttggagtcttgcctttgtggtgttgttgtaggccgggcggcgatcagccatgcttaggggggtcattttggtgctcagttccattttcagtggtttgtgcttgtgtggttagcgtgtggttcttggaggtgccttgtgcacgtccgtacttgacaacttctgtcgtgtttttctttgtaactttactcctccttaatatactcggatggcctccttcggcctttcccggtgaaaaaaagataagtcaggtgagatcttgttcatcctttttatcaattcattacccctgaggccctgaattaacaatcagtgttgtccatttgtcattgtaatttggtttcttgaaacctttgaagtctgaactcccttttgcatttgcaggagttccttgctggtatccgcatgactttggacttatttcaaactgtgggaactgaaaacaaatatagactccaggcctctcggaagtgatgatgagagctgctctcctacacaccatgaaaattatccacctcaatgtctcaatctcattgttcgtgctgtatgaatctagtaatgagctggcttttcagcatattctgtggtccaattctagtcacatttgagaaaatcaccaggcacgctcattggtgctattgcgcactaccatttgttgtgggatacagacaattcgtatgcggttggttgtattgcaattgctcgcctattcatttttttttaacaatataaatagatctcctgttctgcttattttgaattgctatgggttgtattgtcgctggtagtggcttgtgtctgacgatagcctgattttctggtaaggccactcgagcaatcttctttcccgatcagatcaggcagtggacggctcagatcgatctgtaccgtatgaactatgcataattggcgaatacttcacattctttcttgatcagatcaggcggtggacgtctcagatcgatctgtagcatatgaactagtatgcgtaattggcgaatacatttcgttggcggaggaggtcaagtcgtggcgaacgaccactctctgcaacaaactctattttccggtttcatgaaaatggagcagtgggcttcccctgctatttctggattatttttttaataatggaatagataacatcccggtctttactcaacagagttacagccaattgttacaatctaatactcgaacaaagaggaaaaaaatatttttgaaacagaattatagatgaaatcaagatcaacaccaggctccaaagacaactctctaaacgatcaaatagagtccaagagagcataaacatatccattcaaggcaaatctaaaatgcagtcatgcacaataaccaaaatacataacggggcatgcttttcaacagctagctctaattaatttatgcccgggcatgattttcaacagctcaaattaatttatactccctccattctaaattgatctacatatttcataggtacactaagaccaagaaaaattaataattctctcatgttatatttactctagcaacaaactcaatgcatgcaccatccccaatatttcctagccaatagcaaatcaagatattgcatatgggttataaatacttgtgtgtatggatgcatgcatcaatgtccatttactccaatacacaaataacgaatagactctactaaatgaacacaaatatgtagatcatttaggaataaacttaaaaactatatgtaaatcaatttggaatggagggagtaataatttatgctcgggcatgattctcaacagctctaattattttatgcccatttagtttcactccaaaggggcatgcatggctattccaagtccataggattatcgctgtcttcagtttcgtctttagttcccaaaccaaatccaatatccagttgcaatggctcatgcaagtccataggattatcgctcctgctgattgtttcacccagccgcttgtgaggatattgcgcatgaaatttcaaaggtctcttcaggtttccctttacacctgcacccagtaaaacagcaaaacaaagggcccatgagttagtgcatatagcctacacacaaatgtaggtacatttgtatgagagtgacaaaaagaaaacctacaagagcataaaccaatttagttcaagaatgtttaaaaaatgcaagagcacctaaagtggtcttctctctccccactttgatgggggcagaaatcttgtttctgttttcatttctgacaatttcttttaataaaggctcactttgtttaattatgtgcatgttcttgatatagcgtgcactgacaagaaaattttgatatgaaggcaatctagaatccaaaatgcagttgcatttggctgggtttgtgttccacatagcttgcatttcatgtactctggagtacatcttatctggaactgtactctataacttgtctagaatctcaccaaaggcggcttccataattagaggggtaaagagtctagcgaggttcaaaataattacagcctaaactaacaagtccaactagcactatagcagcagccacacaggtttaaaatatatgagcaatcacaactttgaatcaggtttactgtcatatgcaacacaaagttaccgaaaagaaaagcaataagcagaaagaacaggccaagaattaattaatcacctgcagctgtagtgaaatattgggagatggtagactgcgtgtaggagtaatcaaagtcgtcgacgatcctctcggcgtcatacacagacaccgtttgaagccttttgttggccatgtcaaccgccaacaccaccgccttctcatcagaggcgtcaaccttgcccatgacgtaggcaacattagcatctgtctacctgcagctttgccatggccggtcgaccctccagcttaggcaggagctggacattgcagcaagtggcgtcgaccgtgatgtcactagaatctaccatgaagcccttttgccagcccttgttgtcgcccagatgagccaccggtttgctccatgtggacagatcccaggaccagcaaccagtgtccgaatcaaagcaagtacgcagtctgacaatggtgagaaggccattaacgatggcaatgtcccggcaaagcgatgaggtattgaagctcattggagagttgatgagctctggcggcagtggcaggtgacttccaggacagccatgggcgagcacgttgcagatgtggattaattccccgcttgagatcaatgaaggccacctctccctgcccctcatccagagtaattaccttgttcgtcaaatggaccaggcacagatgtaggataccagcggcggtggggcggtaaagatggtggccgttgccgagatcggcggcggcggtggtggagttccggcggtcggcgatgtaggcgcggacgtcgaggaggatccatggtagaggctggtgtgcatccagagggtcgccgccatggcagggcgggcgcagagtgaggtgctcggttctactccacctgtaggggaagacggtagccatggctcaggaggcctctcctcccgccggcgatcgtcgtccgcccgcccgggctagcttaagtagagcagagcagaggagtcggagtcggagaggacatctaaatcgatctcagcaatcctatcaagacaagttggaattgacgaaagatggtttggatagaaacggattgccggcctgatcaaacacacagcatagtttacagtcttaactaagcaaagtattttcagagttcagacaaatgcattttcagagtagagaagagtgtattcaggggctcttttttcaacttcaaactttattttttttcgtttttcgttagcatgttttttaaactattagatggggtgtttttttaaaaaaaaattatatataaattgtttaaaaaattaaataaatcgaacttttaagtttataatagttaatacttaattaatcatatgctagtgagttctcttgtttcacacgaactgaaacatcttctccaataggatgaaacgaacgggccaatccactttttttttccaaattacaataacaatatcagcacgcatacaaaacactagagtcgaacgcgcggcaccagtggtgcaagaggggaatttgttgttatttagttatacaaagttaaggaagaagcattatggtagaagagtaatcttgatggaaaattaattaacaatttataatatatatgaccaaacatctttaaagttataggaatttgacatgatgttgtgtgctgtatgaaaaactaatattaagctagtatcaaagatcatgtgctatgaaaaataaataatagtttgaccataattgtatgtggtgctctgaaacaacatgataaggaaaagccatgtgtggtatttaggaagatgaaagagcaagatgtgaagccaggtgattttcagggagatatggttcaaattttaaatctcgggaatcagatggttgttgatggaatgcactgacaaaattctcaaccacccagacctatcacagctactttcactaatcagcacacccctgtgtcccaaacctaacgaagaatgaatcaatagatagttccaattccaccagcaagtatccaagaaaaagatgtatatgtatcccagtttgtaggagatagatctgggatcagagaacctgaaatgcattgccctatcgcttgcatttcagattttctgatggtcagcaccaatgcctgtcgcttgctaaccatcagagattgctaacaaaagagctctatatctatctcagtttggttgcactgcacatttgcattttaatgtatattcccaaaggcttatcagattagccatgaacattgtaccatcatatgataatgctgcatgggacagcatcacctttaaattccttgtacagcatttcattccaaagcttgaatgctttgtttatatagcacctatcttacagagctgaggtactataaaccattttgcaaacaattataaatgaattccaagaaaggaagcaattaaatgaagcaactgtgactttttttgggacaggttggagctgccagatttttactgtgattaaaatgcagcaccaaaggatgatttataacagatgctatattgttgtagaaaataatcaggaaagtgaagctatgttattctagaagataagaaaggaaaattaaggcaaaatagcaccattcaacaggactgactaagatcaaagatctataaagcttatgttgctagacatgaatctaactgggaaaaaacatgtctcccagattagaaacaaacatgtatcccagcttaatacatttctatttttccataacaacagtaatgtaggtcatcccagattagcaacaacagttggctgagagctatctcatgcatatttttatgccatatctttaccctgaaaataaggagcatagcaaagcagtagacatccagagtaataataattaagagttataggattccaaccataagtgcttggtcatagtctggattgcagtttcatgtaaagcaaaaggattctacgaagcaaacgccatatatatgacagcagctatttacattagtggccataatgcagaggttctaaacaaatggcgttgcttctaagggtgggtgtgcatactggtgacatcctggacatataaccaaaagggacagtaatgtgctgcatgttgtttccttcttcatccgctagataaagagcaaagaaaagtatggattagcaaatatgtattgagctatgtgtcctatgatatatagaattgagatgattgtttatgtactgaccttttcttatgtttctgctgactgtcatctttaaatagtttcttagcagctgaggctgaggctgaggctgcaggcctgtttttgttcaggatacagttagattatatttttgctagaatagaaagttgttgtaactgaggaatgatggaaaaatatacctttttgggggaatgtttttggtaggcggtgatggggatgctgatggagtatcttctgctgctattgctagtgcctttgccttgtaggatagtttatgttgtcagtgtttatagtttttgctgaaagcagggataagtattaattaccttgtcctgagtagcagaagatagctcaacagacgatgcaatctgcggaggttctcccttaatttttgtctcagttgttgcctgaccattgaaagaaaatgcaaagttatattacttgtgatgcagtgataaaaatagttattgtgtaagtagcgatgttagaatagaaaccttaggatcatgtgagaatgagatctgtttatcttgagctggcttgggagagactgataggacatagcttttcttgcttggtgctggtgcattagctttgctagttggtgtctgatctgaagcagaactgatagtataccttgttggtgtcgatggactatccattggtaacatactttctgtcgtttgtgcttctatctttgatcctgtactgccttcacttgttgctggtgctagttggagagagctgcttgagtctgctggcataatagctaatgtctgttgtgaactgcttggtgagataggcagtaggccctgcacttcagcattggatgagataatgttgttaacctgtaaggtttcttgatttttcataatagtatcttgtgtgaagctgatgttccagataaaggtttggttgaaaagagctacaatctcatctggaatatattcactgtcaggtggattttggtcaatgagagtctcaaccggtttgcgtacgaggcgttgtgctattctcccaaagaggataaatgtagcttgagcagtatcatcagcagcgatcaacacaaccttgtatctacatgcagaatagaaatagttatagcagttttgataactgtgaaataagcatggaggaaattgtgccagcatattcttaccttggcactggtatgcctacattggagcagctggtgcatttataggtggaaccatatggttttgaggtcttgtagcatatgtcacatgaataataccaccaggagctgttgcttgatatgcctttaatagtcactctgactataaaacgtgctcgctgcaaagaaatatgattttatcatttttgtcaaataagaaaggacaatattgcagtaacaaagcctgaggtggcactgaccgcatgtttgtgtgggttgagagcaaggatttgtgctatggttttttcttctggaatatcctggttaaaccctgtggtagcagttcaacccacttgataggttgaaagtttgcgctaaagctacagaaagaagatatcttaaataataatgtatcgcagggaaaatgtatatgtaaatggatgattgtgtaagcattaaaacaataatataagcttgtggtgtcacctttcttttaactcaagcacttcaggcatatcaaggttaatctaccatttgcatggtgaacttccatttaaagttagtcctgtatataattgtattaataaatatgtactgcagatttacagaaggcatgaaaagattttggtacaaatttatagagatatacctatccctttgtagttcttgacaactgttccaacaaaaacaataacctgaggtttcttttgaccagcattgtataattcttctgcattgaatgcagctgcagtatttccccatagtgtgataggcagtgtagaattgctagttttataaaatgattataaatttttggtgatcaatattagtaacttgttacaatagttagtgtggataatgtaaggtaaaggcagtttataacaaaagaaaatttcagtctatactgtagcttaccttgcatcccaaatctgcattgttcttttcaaagtttctgtgtttcttgattttgggcgtagagtgtctgttgcaccaatttcagttatgacacccataatatctggttaaagagaagatatatgtaaacaataaaccactaatgtataagaagtaaacataggaagacaaaaaagggataaggaggttataccaacatagaaagcatttttgtccacaagagacgggacgtcttgaaaaggtgtcaatgaaaaagttatggcagggaaatcatcagaagcatcaatgcattcttctaaggttgtccatttagtgaatgagatcatcaaagggttcgtaactggcctatatgttcagtttgcatatctgacagagaaggagtcaaagtagtaaaccttcccttcctgtagaagagtcctaagcttaatcatggcaggtggatagatttgaacatggatgctattgccctgcatattgtgtatataaagcaccttgttagtaccatatttgtatgtaagtattaataaagaagaaatgagtgttaattagactataaccttttcatccagcaagacaagatcagtgtggaagatttttgtttcatcattcagatcatggtagtcccattgcctagatactcttgccttgaactgtttattagtgtccccatacataaggtctgaaataagcacgtataccattggaagcctgtaattaaatattgaagatatttagttttacgtatatataaagcatcaatgtaatgaactaagcagtgagaaaatagcacatggaaatctagtagtctgttggtgcaccagtgctacagcatatactacatgtgagcacaatatatatactccaagatttatactacattgcatatactacatgtgagcacaaaagccattgcaattagctgatgagggaaagcatgctacacatggagtggtgaagcctgcaataggaaagaacgtccactgtgacaccaagaatgtaggtaaacatagagataaaatatgcagagcggcagcgagggcacaccgcttccattgtagcagaaagtatctcggtataaacaacatttcttgtttggtttccacttgacccgtcatcgttttcaatcagtattttgaggcctgatcggtttgttgctcttgaaatagcaacatagagttgcccatgcgtaaagacaggtttcctaaggtatatgccaacctgctcaagtgtttgtccttggctgttgttgatagtcattgcataacaaactcgaactgggaattgtctcctttgtaatgcaaaaggccatttcattttcgatgtgcttagtgtaattcttagtatataaactgtttcaccgatgtttgatccagttagtatagtacattgtaaaattgtttcgcctaaagcaataagtaatagtcttgttccattacaaaggcctattgattggttcaaatttcgtagaagcataacaacactaccttcctttaaaacaagtttgtgtgtaggaaagttagttgctacacctcctagagtctgtgtaggatcaaatgcacaagccacagtatgcatgcatgtttggctacttttgctatgagacgtttgagaaacactaaaaaccaaaattttgggacccagtaacctcttttcatcatattgcctcatgttaaaa

SEQ ID NO: 5270 - DNA, 56116 bp, Oryza sativa
tgggaagaaaaaaacaacaagaagttgtcgcactctgttgctccagctcgaggaattttgtttcttccccaacgttttttttggactgtgttgtgcgcaatgatcacggagtaattaactttgcttgtccgaatgcagatcatacttgctggtcctggggataaaactcactggtgattgatgaagacgaactgtaccagctaacctcttgtacgagctcagaccctgtgtttggaatcattgtacatctgtgtcgttgtagttagatactctaatacatatctgatctgtgaggtgtattgtagtgaggggtagtttagtagtagtaggttcgccaaggcatcgtttttactgccttgcgggtcagtctagtttagttggtacattatatttctcatttctgagagagagacacccacgcatgttgtagctgtgtcagtactctagtgtatgtaactttgttcatgaaactgtttaccaaacataatggactatccccctttctgcttatcttggctctctgtttggagagcttatggtagatggtgcttctcataaaatctcgacctctcttgaataactcagtttttttaattctcaatagctgtttttcgaaatgtaaagctctcctaagagcaagtttaccgcggaacgtgcgtgaagcgtcatcactgttgtggtgccgtgcagcgcagggctcaatactgggtgagttggcccttggccggtcctcggcaagatgccaagatgacctttgggcaagactgccacttgttgtgactgtaccttggaagcaactggctttgttcggtcaattcccatgaggcagggattcgagggaaattattccacacctattgtggtgttgaattattctccctcaatccccttcaatctccctcaaaccgaacaaggtcttaggccctgtttgttttagcttaagattattgtaatctagattattgaactagattactataagctagattataataagctaacataaaataagctgctagctgtttgtttctctagattattatctgtttgttaactgttagccacccattaatctaaaaaaagcacctttagagtggcttaccagattatagtaatttgacttatagattataataatatattataataagctatctgtttatttcagcttacttctaataatttagattataataatactaagctgaatcaaacatggccttaagctggaaaataatcctgggagagcaggtaaaattaatccatacttgaaaaaaactggtctcataggattattttctcttttaaggcctcgtttgaaataaacgaagaaaacacatgaatagaaaaaaaatgcaggaatatgatatagtgtaaagttgataactaagaaattcaaaacacatgatagaagaagtttaggctgtttacatgaaaaaagagagagagagagagagagagagagagagagagagagagagagagagagagacggatggaaggatgaagcaaagggaatcttcctttggatcaaagtagatgttttatatttcctaacaaaatggaggaaatgttttccgaaggaattcaacaaccccattcctttgttccaaacaagctcatagggaaaaaaagatccaaaggattgcaaacctccaaaaatcctttaaaaaccaatgttccaaacagggcctatgcttgtatagctcgcttattactcactgatcagcagggagcatcttccttcagattgctcgtcttccatgactcctctagtcctcttgaacgcagaaattttacaggaattttgcataaattagttctgcacccacgaaaatcctcaaaatttctactttctgagctcactgactttttcacactacagctatttagtatcaaataacttgaacttcacatctatcaagcaagcaagtcaaaagcaggggaaccaattgacttccttttcctctacggacagacaaaactgtcataaacaagtcaacatgtaataacagcaaagcttcccaagcgggagctttaagaaaacactcagtgagcaacagctttttgagccttgtttgggaggatactgtccgggaggataagctctggtgggatctcacggaccacgccgagcatcgaatcgtactcctcgtctttgtgcgcaaacttcttcctcagcatcttctcgagctcaatctcatcgaaggtcttggcattctcggctgcgtggacttgagccaaattgatatagtttgttgctgactgtgcaatgaacgccatctcctcttcagtaagctttcttaggaacttggcaggattaccaacccagacctagcaatgtcaggaaacgatatggtttaataaagccatgcaatgtattaacttaaccataaaatataaatacaaagcatatttaaatcttgcagctgttcacaacaagtgtggaacataaaacatggacatcagtataaacatgcagccagcagctttgtttagtaatcctccagtccccgattacagttttataaataaggaaattcatgcaaaatatgtgtcaacacatcataactgtaaattaagggaaaaatgcagactaaacctctacctcagaatcattcaattgcattattcgaaaacaattaggtatttttctgaacaaagagcatgccaattttgtaatcatataccagcatctctgagaattacctcattacaaaatgttggcagttgattgcacatttctcatatagcaagtgaaaaaaaaaaacttgcttagcaagaaaataggaaggtaacctctccagaaggaatcctggtgttttgctttacaagggatcctgcaccaaccatgctgtgcttttcaaccaccactccatcaagcagagtggcacccataccaacaaaagcttcatcctcgacgatgcatgcgtgtagaacagcactgtgacctggcagaagctttattgtttaggtaggtgcatagcacagtgtcacagtgaatagtccatgcgaaatgaagctcagaattttaactcgtaaatcaatcacaaagcagcaatggaaaccatatttttacgattttatcaggtataaatgatgccatgtggttaatgtcttccagaaaagccaaatcacaacttcaatagcatatcagagtgtatattacgaattaagataggaagtgctctactgacctattgtaacactgtttccaattatggttgggagaaccttcccactgatattagcttttgaaacatgtacaagggaattgtcttgtatatttgttccaactccaatatgaatgctgttgacatcacctgaggacaaaagaatgaaaaggagctaaaatggttatcaccgcaccgtggaagtatccaaagtacaacttcaacactatagttactgaaactttaaatatcaatatgctagggttaacccagtatgtatgacagcacaaatgcctcacaccatgataaaagatcatatggtgtaggaggaacgttatcatgtgaatgaagctgcttgaatcctttttctacttggatttggttgtaaaggagaccatacaggcattggtcaaaaccattctcacctaattgttttcttaagagctactagtatgttactccctccgtttcatattataagactttctagcattgcccatattcatatagatgttaatgaatctagacacacatatatgtttagattcattaatgaatatatgaatgtggacaatactagaaagtcttataatatgaaacggaggaagtagtacttaatgctttatggttgggagaaccttcccacatcatcgttgagagcccaacacatcatcgttgcaggttaaaaactcgaacttcatgtgaagtgtcagttgagagcccaacaatgaaaagatgagtgtactagagctgtttgataaaactgtgcatctccgtacgactggtggttctgtcagttgtctatgtagtaccattcatcataacaatgagtgtactgcagtcagaagcaagtttattccaaaaacaaaaatgtacagtaaacaaggtgtaacaaagaaagaaatgggaaacaaattatcaagacaaagcccatgcttactcacatgtgtaataatactacagtgtatatcgaccaagagtttacctcttaaaatggagccataccagattgaggatccatgtccaatctcaatatcaccaatcacagctgcactgggagcaacaaaaacatccttgtggattctgggctctttctcaaatatgttcatgattgtgcgatgccttggcactgacaagggcatacaaaacggtaacatgatagtcaggctcaaccataaagtttatgtaccttgctaaattcattagctcgtggttattctaaaatgacctatctagacataataccaaaacctttttgatacaatgtccaatttatgctaattcaaggccctctacaagatgcagcatggtggaaatcaatcaacaccaactacagcaccacacctaactagaaggtggaacaaatgacattcttcatgatgctacgcaacagaaaatagatgcataaccactcgaaaattggcatgccaaattgccaatgtgacactcccacaatgggcagtatgaccgcaataaccaatatgcgcaatccttgatttacttgctgcagttttcacacacgagatcgatcactagttgaaaacctggaatgcagaacttcacaaataaccgacgataatttaggctcatttcgagactcctcgaatccagtcaccccctatccattcctaccaatttcttcccaataacaactgccaaattgtcagagagagagacggcggctgctgctgcttacgctgctcgtcgacgcggaggccgccctggatggtggatccgaggcggtccatggcctgccccgtgccgcggatccacttccccgccgtgtagatcgcccgccccagggtccccatgcctcgtcctccccgcttgctccctccgctgtccggacctcgccgccggccgccgcccgccgccgaggtgagaggtaactgtgtgagagagagagagagggagaggaggtcaaacagcttttggcccaggttttttatgggcctggatccggcccgatcatcacagaggcctcgcggcctattgagatttgggcccaggtttttatgggcccagcctgttgcgcgaattctagagtgatcacggccgtccaaaattcgattgaatttttttctttatgtttcaaacgattaaacagtactccatccgtcctaaaatataagtatttttagcatagtatcaagtcaaatatttgtaactttgactattaatagcaaaagaataaaaaggatcaatcatgtaaaattgatgttactaaatttatcattaatgtaactctttttatttaaaacatattacttttatagatattattggtcaaaatagcatctcatagactatgtcaaagtctaaaaatacttatattttaggacggaaggattagtaataggctcccttgttgggaacttcggatacgggcttaaaatttgaagtgaaatattggcttacccacatgattggctaagagttccaaatcgctcaaacttaacgtgactgattatgttgcagtcatctacggactgcagggaactggagtcttggatcctgcttgctttgcatcaacaaaaacaaaaatctaaagcttttacaacgtgcacgcattctgcagctgccgtctgccgatcatccgcaccaggactacagagagtgtgcaaccgaacaaaaataattgaccctgtttggatggtgttacatcggatggatgtttgtacaaagtattaaacgtaagctattgacaaaacttattctatcctagttaattcgcgagacaaatttattgatccaaattaattcatgattagcctatgtgatgttacaataaatatgtgttaattatgaattaattaggcttaaaaaattgtcgcgcgaattaacactcatttatataattagttttattaagtagtgtatgtttcatactacatcagtcccaaaatacttgtcgctttgatttttttcttgcaacctttgaccattcgtcttatttaaaaattagtgtaaatataaaaacgaataagtcacacttaaagtatttttataataaagcaagttacaaacaaaataaacaataactctataatttttgaataagacgaatgatcaaaagttatgtaaaaaacacaaaacgacaagtatttttggacggaggtagtatctaaacatcctatgtgacctaggagtatgtgactgggacggacaacagtgtacaacctttcgttgaacaacagagacgtacacgtacgcaatgttgcacgggtcacagatataaaatgcacacgctacaacgcagcggatgtactcattgcgttggtgcactgcacgcatgcagcgagagatgcccgccgacgctgacatgacgcgccgccgccgctcgccgtcgctaccgtgcgcggtgcgcgtgcaggcggccggcttcgcgctcgggcaccgccgggacggcagcgtccggcgcctcgtcttctccctcttggacatccacgtcagggccaagcgccgcgccggcgtccgctccgtcgacgtcaccatcgacgcctcacgcggcctctgggcgcgcgtcttctccccgccgccgacgaagggagaggcggcgcaggcgctcccggtcgtcgtcttcttccacggcggcggcttcgtgctcttctccgccgcctcctgctactacgacaggctctgccgccgcatctgccgcgagctccgcgccgtggtggtgtccgtcaactaccgcctcgccggccccgcgcgccgcttccccgccgcctacgacgacggcctcgccgcgctccgctacctcgacgccaacggcctcgcggaggccgccggcgtcgccgccgtcgacctctccagctgcttcctcgccggcgacagcgcagggggcaacatggtgcaccacgtggcccagcgctgggcggcggcgtccgccgcctcaccgtcgtcgtcgacgacgctccggctcgccggcgccgtgctgatccagccattcttcggcggcgaggagcggacggaggaggagctggagctcgacaaggcggcgctcacgctgtcgctagcgaggacggactactactggcgggagttcctgccggagggcgccacacgggaccacccggcggcgcacgtgtgcggcggcggcgagcacgacgtcgaggtggcggaggcgttcccggcggcgatggtggcgatcggagggttcgacctgctcaaggggtggcaggcgaggtacgtggaggcgctgcgcgggaaggggaaggcggtgcgggtggtggagtacccgggcgccatccatggcttctgcttgttcccggagctcgccgactccggcgagttcgtggaggagatgaagctgttcgtccaggagcatagaaccaagcgtgtgcagtagatggcttgttggcccaacgctgtaattgatccagtgattatgatgattccagcagaatttacgagattatttttcgattacacgacaggctcatatgtatgcacatgtactcccccgtcccaaaaaaaaaacaatctaattagagatgggatattacctagtccagcgtatctaaacaaacatatgtccggatacgctggactaggtaatgtcccaccttcataggttgggttttttttttaacgggaggagtatatgacaacacacataacaacacaatcatacgccaccaatactgtgagaggcactacacgagaaataaattttattattcattcctaaggaatactcgatgggatgagaaataaataacaaccttgaagatgagtaaatatcatagagcaagttttatgtcatttaagagatatgcgagaaatgaagacatcacatgggagacaaaaatccatctgcggttatttgctgccttttgttatcataatggttgccacctgctattcgttgcctttcgtcgatatacgattatattactatagtgaagtgtgtgtcgatgggttatacctcaatcacatgattcgttcatatacaaattgtttggaggacgtaggaattgattgttaggaggatacaaacaaatctgtaaatggagcaaggggaaagggatttttatataggtagacccttgatgacgagtaatagcattatttctgttgaccggagctggtgttgccatcgtatatcaatctatcacaagtacaaagtagagaataacctaatctagtgtaccagcgtatcaatgtaaagctcgagtatggttagtcgttggttagctatttttggcttcctcgagaatccattcggcgagattggaggttgctctatattttttttattaggcttgtccttcacttctgggatcttgtacttatatttttaggtgtttcctttttaagtagaactaagaagataaacatagatacgatcgtcggttttgagggctctgtatttattttatgtgactcatttcttatctatttaggacttccgctatatgcacgagagttgtttccgtacaaatggtatatgatggtcttgcaaagctaaatacatgtgtatagggtactacatatttagagcactcacggtctaaatttaaagtacttttggttttggcatatatatttatctattcattttatttaaaaattatgtaaatatgcgaatataataaatcatacttaaaacaacttcaataaacaatacaagtcataacaaaataaataattttgtaactttttttttaaaaaaatatcaaacatacattcaatgtcactggcgtcctagagtctcaaaggtcactctaatctcaaatattcttttcagcataaaatatatagtaaactgagaccgaacaggatgtatctttttacaatgaatacgaatgtgaataaaaaaatctatccagattcatgaaatcattatgtatctcatctaatttcaggttgctatattttgagatctcctctacgtcttcgtctcaatctccttgcaagcgactactaccagaatggaaagactctacgtagtccaggacactgcgtgtgatacacttcttgtctatcaggtgggtaactgggcacgcatggcagatagttgctgcctaggactcgccaagaacgtgccacacaggagttcagagaaattcatctggagaaaatggcaaaacggtaaaaacaaaaacgaatacgaaactcacaactcacaaggaaaaagtctagggcctgttttgggggagcttgttccagctgcagtttttcctaaaaactgattctgctagaagttgcctcaaacagtccacaacttctgagaatctgtagttacaaattctgaaaaatgaactaaaaaatcagaagctggagaagctgggtttcagagcttttctagattatcaaaaactagctaccaaacagctgcttcttataatttaaagatcccaaacaggccctaggagtagtatctctctcatgattcattacttgatacatacagaaatcatacaaccccactagctagtttatttaagtctattgcatactactctgtcgaaaaaaaatcctacctacgaacctaaagcatgtatccatgtttataggtaggattgattatttttttttttgacggaggggtatgtatctgtaaatatttaaaattttctcctaaattatgcagaagccagcatgatagcgtcgaattctgcgtgtgattcgatcaattggacacttaaaaaaagaacaaatataattaagccatacggttggagctatgctcctggacgaactgcttcatctcctccacgagcttgccggagtcggcgagctccgggaacgcgtggaagccatggatggcgtccgggtactccaccacccgcaccgccttccccttctcgcgcagcgccgccacgtacctcgcctgccatcccttgagcaggtcgaacccgccgatcaccaccatcgccggcgggaacgcctccgccagctcgacgcgctcgccgccgcacacgcgcgccgccgcgtggtcccgggtggcgccctccggcaggaactcccgccagaagtagtccgtcctcgccagcgacagcgagaggctcgccttgtcgagccccacctcctcctccgtccgctcctcgccgccgaagaagggcgatatcagcacggcgccggcgagccggagcgacgacgacggcgaggtggtggacgccgcccagcgctgggccacgtggtgcacgatgttcccgcccgcgctgtcgccggcgaggaagcagcgggagaggtcgacggcggcgccgagctcggcggcggcctccgcgaggccgttggcgtcgaggtagcggagcgcggcgaggccgtcgtcgtaggcggcggggaagcggtgctcgggggcgaggcggtagttcacggacaccaccacggctccgaccccgcgggagatgcggcggcagagcgcgtcgtaggggcgcgacgccgcggagaagagcacgaagccgccgccgtggaagtagacgacgaccgggagcttcaccgccgccgtgttcgtgggcgggcagaacacgcgcgcccagaggccgcgggaggcgtcgatggtgacgtcgacggagcggacgccggccgcgtcgggacgggggctggccgcggcgtggaggtcgccgaggtagaagaggaggcgccgcacgctgccgtcggaccggtgcgcggccgagagcgcagcaagctgcacgcgcaccgtccacggaagcggcggcggcgacgacgacgaccggcggctgcggtcaacgccggccatctcttgctgcaccaagtgtggaggagagttttttttttctttttgagtgaattgcaggagtgatgtggtgctttgatcttcgatgtgaccaatgcgacaaatctgtcgcgccattaattaatgtttaaggacaagttgttcgcaagttgcacacggcacagtggctgtggagttatattttatttcaatttgtttgtttagttttactactagtataaattattgtttgataaagctcaaactgtaataagagtgccaaagtactgaaagagaagtgcagatgactcaagagttgcaaatttctgccatatgtaaaagcttctgttctttattgtgtagatatattttgacccttgaatatttgaacattggtaatggtaatatgatgtaatcctagttggccaaaatcatgtccaattagctcaaattctctgtccatatcccgcaaattctcaaatttccttcgtctcttcggttgcttcccgttcatcttctccatcatcgtcgtcatcgcatccacagtcgctgtccatagccttcctcttcgtcttctccacgaccggcgtgtgcacagccgcaggtgcaagggttgtcgccgttgtcgtcgatctcgcactcgacgtagccatgggcagcgagctccgccttgacccactcctgctgctccttccagtactcgttcaggtgccgtatatatggcctccgcaccgtcggcgtccaagctgcaggagcgcctcctcctccgcctcgctcgccgccagatcttcgctctgtaacacggtcgcggggcggacatcgtgacaggatgtgcggtcgatctgctcctgcagcatcctccacttcctcagcttcttcattatcttcttcatcccttcggcttgcgacgaccaactccagttcatcgccggcagaatctggatttgttgggatttttctgatggattcatggatcgctacgggaccacgccataaatgggccagaatgcccgtgttctactcggcctcgggctcctagtttcctttgtgaattctccgccgcgcccatgtgtgccggcccaggctcccaccaaatacttctctgtgacttgtgaggaggaaaaagtacaccggagatacctactcttgtcgccgatttacaaaatcatcccttaaccaaaaaaccaaatacaatgtatcctccaacttttaaaaccagtgcaaacaaaatccttcgatggtattgtccccagtttcagctaacaaggcaccaatgtggctccttcgactagatcttcatctcacatggcgcttatgtgacggtttcatcaagaaacaaattataaaataataaaaatgggtgggccaattgatcagatccccttattccttttctctcttcttcctctcttttcttgcgtcagacaggaaggaaggacatgaggacgatggcgaggtatgcaccttgcccttccccatttctctcccaagcttctccactcctccgcggatgaccccgcccatctcctctgcgccatccagctcctattcaccgccggtgccctcctccatggtatggtcaccgtggttgcctcctctcccacctcacctcgccagcctccttcgctcccgacgcttccctctacccagcgccgccatgtcgctcgtcgtcggccgtcggacctcctcctctccgcaccggacagccagcccacccaaatgacgacaagaaaaacgagaaagggtagaaagggagagaagaggataagagagagggtaatgccgtggtcaccttgatatgtggggttcacgtgggttccatggtgactcagtcgtcatgtcggacaaaaccaggatcaatgttgtctaaggacctggaatgatctagttttgtaagttgagggatcttatacatctggtttttttagttgagtgacgattttgtaattcggtgacaagatgagggacctcggacgtactttttccgtacgaggacaccttgtctccatatggcccatcaaaagcccatcaccgtcgttctcttccttcttcccaccaacgcatcctccctattcttccccaacgttcaagttcaaagttcaaacaagcagccatggctaccaagaaacctccaatcatgctgtttaactattaaaactggtagacagcaggctagtattaatcacacataatcatattaaaaaatataatgcagaaattatcagtgatcgaggttccagccgtctaatttcccgaacagattttcttctcttcagtttcgtcctcataacaatcatcgtctccttcttgttcttcttcttcttcttcctcctcatggtcggcagcataggcgcagccgcaggtgcaggggttgtcgtcgtcgtcgatctcgcactagacgtagccatgggcggcgagctcggccttgacccactcctgctgctccttgtggtaccggtccatctcccgcttggccaccgcgtcgtcggcgtccacccgccgcagcctctccttgagcgcgtcgctgatctgcaggcggccgatgtccacgtcgtagcgcggcggccgggctggctccggcgaccacgacaggatgaggtcgatctgctcctgtggcatcctccacttcctcagcttcttctcctccttcttctcttcgccgacgttgttgacctcgtcgacggccatctccgtcgtcgcggcggtggttcgatcgatgctggattaatcttggattgcttggggattttttttttctgccataaataggggcagaaaggtctccatgttcttcttggtttcctttgcgaattcggatggaataagttcacttcatgaccctcaaaagtgatcgaaatctaatccatgacctcaaattacaaaaccggatatcttgacccccaaactcttaatacccgtgcaattttactcccagtgcggttttggagagcggtttcgctgacgtggcgcctacgtggcagcattgactcggtcttctttccacgtggtgttgacgtggcgctgaggtggcattagaaataaaaaaaatatgcgtgggacccatctgtcattcacacacaaaataaaagtggggcccactgacatgtgggccccacatgtcatcctctctctcactacccttcttcttcctcctctctccgttgtttctctctctccgttgacataagccgccggcaggagggggctcgagtgccggtggtggtgggtgggtgatggagtggtggtggcggtgggcggtggacggtgtacctccggcgacgggcgcaggagcagctccttctaccgcactgggcctcgggcgactgggcgacggtaggcggtggacggtggggagcacgggcggcgggagctaaagaggcggcggcggcggcggacctcgggtgtgtaggcgacggtgggcgatagacggtggggagcacaggcggcgggagctaaagaggcggcggcagcggtgggctggatcgtccggctgctgcccgccccctctatctcctcctcctcgtagtcgtcgccgtcgacctccccgaccatgcagagtaccagatcgagaccagccgtccgccgcccctcgtacgcccgccgccgccgccgccgctctcgtctccgaccttgtcggctgcggccatagccaccacccacgggacgcgtcgccgccactccgggtcagcacgcggcagcgctgtcgtgagcgcgagtgcgggaggaggcaccggcggcggcggtggcggcgacaacacgagctcggcggctccgcctctcccctctcccttccggcccttacacaccgccgcctcctctcatgtcacccatcacatccgtttcctccctcacctgctctcctctcctctcctctctccacttggcgaggccgccgccaccgcttcagcttcctccgccgctgccgccgctctggcgcccgcccgctgccgctccagcctcccatgctccccgcggccggccgaaggagagaggagaaaaagaaagaaagagagaagggaggaagaagaaagggagatagaggatcccacgcatatttttatttctaatgccacctaagcgccacatcaacgccacgtggaaaagaagaccgagtcaatactgccacgtaggcgccacgtcagcgaaaccgccctccaaaaccgcccagggagtcaaattgcaccggttttaagagtttaggggtcgagatatccggttttgtggtttagggtcatggattagatttcgatcacttttgagggtcatgaagtgaacttattccaattcggattcggcctctcgagcaaatgctattatgtgggccttgtgttgatatgggccggtatctcggcccattaagagcctgtaataaaagtacgaaatgttcttcaaaatgtactgctgtacttttgaatttagtttctctatatactcgtgtaagtcgatcgctctcgttttaatactgatttaattctcgtcccgtttcccctttttttttgcgacaaaaaaaagtctgaaatgtgccgatgtgcttgtgctccacgtgaacagaaccgtgtagtttattttatccttaagagtgtcacttttaaatgtgacaattaactctttgacattggacccacatatcatggaggggaggggccaccgcgcaccgctctcccccttgttgccgcgccgccaccggcctcctcctctccagccaaatcaaaaagagggaggtgaggggagagagtggggcagccgccgcccctggcctcctcccctccaaccagatttgggaaggaagggggagtggggcgctgccaccgacgctccatatgctgccttgctgccaccaacctcccctccttgactccaccagactgtcacccgcgaaagtcgccgccgccggatccaccacacgcttgactcgccgtcaccagatctgccacccgcttgattcgttgccgctggatccgtcggtgaagacggaggaggggggtgtgcaccagtgaggaaggaggaggggtgcacgccggtgggcatctgcagggaaggagaaggagaggggtagggaaggagtgcgtaccgatagggatggagagggagtaaagagttaggtgcggtggagagagctgatcttttaatatggcagtcctcttcaaccgccagtggaaatcgctaaagtgagccgccagcaaaaagatacactttcgttggccagcgaagatccatttttgctggcggtctatagccccattgtcgctggtagttttcacgtatggccgccggagaaaataataaggtgacgccataaaagatcgattttgtagtagcatacgctcctaaagtgttcgactttggcacacgtgaaaaaaatcattaaacatttgttttatacaaaacgccctctacttaattagaaaatatcattaaacaaaagagtgtgtttcattttggaccgtgtaatagacgactaaagttggaaatagaagttgtttaaacttacgaaataattgtatgataacacaatgattatattttctggcccaataagggtgcgattgtttcggctggggcggtggacggtttagtcgcacgcaaaacgagaaatgcgattagtatatgattaattaattattaatatataacttttttatgaataaatttgttggatttttttaacaacttctttatagaaagttttcgcacgaaatataccatttggcagtttgaaaagcgtgctaacagaaaacgaggagaatctaatcctataggctcaaaacgagagcctgtaagaaaaggatagaaccctacacgaaaagtgttcttcaaaatagcttttgaatttgattttttctatcgacgtgtaatgcgtcgcgtacgtctcaaaagtcagactgattttacttgtcgcaaaaagtaattcttatcatgtttcaaggctgtgtgtttagatctaaagtgaatccaaacttcagtccttttccatcacatcaatctgtcatacacacataactttttagtcacatcatctttaatttcaaccaaaatctaaactttgcaccgaaaacacagccttcctctctctctctctctttttctcttgtcgcgtcaaaaagaagtcagaaatgtgcagctgtgctcgtgctccgcgtgaacagaatcgtatggtaggttaatgtctccgtcagcatcatgggatccatgcgatgaaatcggaataaaaaatacgctgctagtaaaatcggttttattttattaggtatgtttaattcatttaaactacgttcagtgtttgggtgttacttttataataattggctgtagctctgatgagcaaaagccgagatgttttatttcattatctaaaaaaagtaaaatctgtttatttcacagagcaattcatcatcgcaaaacttgatcaaatttcagcaaaatatatatgaaatagcagtccaggttaacattttgaaatgccaaaggtaaataaaacgcttctaattaagcattcgatttgggcggcgcgttgcgctccatgaacgccttcatctccttgacgagctcgccggagtcggcgagctccgggaagacgtagaaggagtggatcgccgccgggtactccaccacctgcaccgccttcccattccgccgcagcatcccggcgtaccgccgctgccagtcctgcagcgtgtcgtaccctccgaccaccaccatcgccggcgggaactcctccgccagctcggcgttctcgccggtgacgtgcgccgccgggtggtcgcggtcggcgccctccggcaggaacgccctccagcaccagtccgcgcgcgccatgctcaccaccggccccacgccgtccagcctcagctccgcctccgtccgctcctcgccgccgaagaacggctgcagcaggacgacgccggcgaggcggacgcggcggctcgaggaggtggtggcggcggcccatcggtgcgcgacgtggtgggcgatgttgccgccggcgctgtcgccgacgaggaagcagcgggtgaggtcgacggggacggccgctactacgtcggcggggaggccgacggtggcgaggtggcggagcacgtccacgccgtcgtcgtaggcggcggggtagcggtgctcgggggcgaggcggtagttgacggagacgacgacggcgcggagctcgcggcagagccggcggcacaaggcgtcgtactggctggaggcggcggtgaggagcgcgaagccgccgccgtggaagtagacgacgacggggagcggcggggattccacggcgctgctgctcgcgggggagaacacgcgcgcccacagcccgcgggacgcgtcgacggtgacatcgccggagcggacgccgtgggcgtccgggcgcgccgcggcggcgctctggcggtctgcgagggagaagaggaagcggttgacggtgccgtcgccgcgctgcacgatgtcgacggcggtgacgagggcgaagagctggagccgcaccgtccacggcaacgccggcggctcgggccgccggagctcgtcgccggccgtttcttgctccttctcgtgccccatttcgccggtttctgtgcgagtcatttcagtgtccagaggacactatatataggtgaaccgattaattttttttggaaataaagggggtgtttagtaaagtttcggcgtgtctcatcaggtattatatacggtgtgccataaatgttcggcactaataaaaatactaattacagaatccgccggtaaaccatgagatgaatttattaagcctatttaatctgttattagtaaatatttactgtagcacaacattgtcaaatcatggaacaattaggcttaaaagattcatctcacaaattagtcacaatctatacaattagttattttttagtctatatctaatacctcatgtaggtgtttaaacgttcggtgggatttggggtgggatccacacaggaccaaaattatcccttgatttttacgtgaatattccaatttgatagtagaaatttgaaataccgtgtaactactcgtactacctagaatttaagtccccagcgccgaatttagcctaaattggcattcatgagtcatgaccatatcgtcgaaccaatgaactctagctgcgttcaaatttgacaaattggcacttgatacctctcataatctcatgtacaggtattttaatgcaattccatacgaccatatatagctccgttgcttctgtttgttttgagtataattagtacgtcttcaatttaagttttatagttgaacacattggtactacgtacgtacaacccaatagcttcaatgcgatatgattttgatccaatctcattattgtgtactgctcaactgatgagcacatagccacacgtttgtagcgatttttctttgtttgattgaaggatataattaattaatccagtagccttttgcaatgatgtgtatctgattatctgatacgtacatttgtggttgtggttaacgtctcaagtctctcgcaacgaccatgcttacgttgatggcgatgcatggctgcctattggggactcttgaggaatatcttcttattgttattgtatatatactcacatagttataaaaaagtttaaaaggatgtattaacatgtaatatatcactttataaatatataatttaaaatttaacttgtacatctcgcaactaaaaacaaactaacaaactatagttggatctttttttgctgagatgagctaaagcatcattttttttccttcacttttttcttcataaaaaacaaactaaagatgttactccgataatttccaacgagacatagtccccattggttggcaagagcttagcggcaaaaataattaatgaaatttttttatatatccattacttatcgacttaaaagctaaataaaaaaaaactacattgagaaaactttgaaattaaatttaaaattttatagcgataggtcaaatgatgaggccctcgtcactaagcagtgggctgcttggacgtgatgcattcttccacgaacgccctgatttcaccaacgagcttccggtgatcgtcggcgaggaactccgggaagaagtagaaggagtggatggcctccgggaactccaccacccgcgccgccttccccttccgccgcagcatggcggcgtaccgccggtcccagtcctgcagcgggtcgagccccccgacgaccaccatcgccggcgggaacgcctcgtgcagttcggcgtcgtcgtcgtcgtctccggtgacgacgtgcgccgccgggtggttccggtcggccccctccggcaggaacgccttccacgacaggtccgaccgccgcgtgttcagcaccggcgccacgccgtcgagcgcgcgctcggattccgtccgctcctcgccgctgaagcacggctgtatgagtatcacgccggcgaggtggacgacggggttatcggtcgtcgtcgtcgtcgtcgtcgccgtggccgtccatcgctgggccacgtggtgcgcgatgttgccgccggcgctgtctccgacgacgaagcaggtggagacgtcgaccgggccgacgtggtcggggaggccggtggcgccgaggtagcggaggacggcctccccgtcgtcgtacgcggcgggagcccggtgctcgggggcgaggcggtagtcgacggacacgacgacggcgcagagcgtgcggcagagcgcgtcgtaggcgcgggaggccgcggagaacagcgtgaagccgccgccgtggaagtagacgacgacggggcgcggcgacggcgacggcgagtagaaaacgcgcgcccagaggccgcgcgaagcgtcgacggtgatgtccgtcgagctgacgccggcggcgtccggccgcgggtcggccggcgcccggcggtcgaacagggagaagaggaaacggttgacgctgccgtctcggcgctgcgtcgcgtcaatggcggcctcgaaaacgcagagcctgagcctcaccggccacggcagtgccacccggcggcgccgcccgtgcgcgcccgccatttcttggctactccgacggttctaccttttcgtttgggagactgataaaaaaatgcaggttcagaaacaaaattcagagaagttcaggaattttatctttcagtgtgcagccacaaaattcagaggttcagaaagtgttgtttcagtgttcaagcagccacaaaattcagtggttcaggaagcgtgtctttcagtgagtgttcaggcaggcacaaaattcagagaagtttaggaattccttggtctgaaaacaactttcaaagtgatatgaaattgatattacgattgaggcctggatagaggtgacatggagttatggagatcgccaattctccgtacttgaagataacgcagacgctatctttgcggtctcacgccgtaggattgttgtgagaagggtgcaagcaacacatacgacatgtgactatatgaggtcgcaatttgtttgtacgcttatcagttatcacatctctcttccttttcgcaaggcaaattcaggtgattcttgacttaagtattgaaaacttaatcttttttgctgattcagtaagttcagtgcgtactatagcttagtttactgaacatttagaagcgtctgacatgggattttgaagtttaacaggagcaatatcctgaaaaatcccagatagtattaggctgattttgaattacactaggcctacactgtttgatgaaaaacagagtgtgagtaaggatgggtaagaacaaggattttctacgcctaaatgccatagcacccatcatttacatacgacttaaatacttatagaaaaaatttagtaacattaattacgatgatataaatctatacagaaacatgcaagattatatttgatctacaactagataaaccaaaataataatcgatatcgtacaacgcagataaaatttattatttttgtttttcatgtgtatatcgaatttagacttacatgtttgtagtatcttatattatcgtagtccatcttatcaaattttatgaaatttttatataactatttaaactacatgcatacacctgagtgtagaaaatacattcccgaatgcgtaactattggaggtatgtactcttacgagtcgtcgactcatacataatttctataccaaatgccttttttttattttttatttttgccaaacacggtacaaacatactaatttgtcaaaaaaaaaacaaactctaaaaatgaacctggacacacatatatccagattaatagttaggattggtttatttggacggagggggtaaacacttacatacgtacccacacttactccttactatctccaaggactgcaccggtgtaaacccactctctatccgtatgaacatctccaaagactgatccaacatctttcagtataaagcgggtatgacacctaccattaaaaaaagggtaaaaatagttagctgcaaatacgaacaccctagtaagtctatgacatgttggggtgagcatgttttcaacacatgaaacttagccaagtgatcttacactcgcttcgtatgaaatgccaaaatttcatcgcggtggcaatgcatgatcatacaactttcatcttaattcatacaactttcacatgacacttagctgtgacctcaatttttcatttttgaattaaaaaccgttcaaattcaaatttaaaactttcatatgaaaacttaaaaccttcatactcaaattatacagttttcaacataaaatcatacgaaacttttaactgcggccttaaactttcaccttgaatcacagaaatcccaattcaaaatctcaagtatatgaagtgtacgacgcgtgtacggtacgaagcagatcaaactctcgaatctcaattcaggcggtggcgcgcgccgccctgttgctctggacgaacaccttgatgtcctgcaagaccttgccggcgtcggcgagctccgggaagccgtagaagccatggaaggcgtcggggaactccgccacctccaccgccttccccttccgccgcagcacgtcgacgtaccgccgctgccagtcctgcagcgggtcgaaccctccgatcaccaccatcgccggcgggaacgcctccgccagctcggcgttctcgtcggtgacgtgcgccgccgggtggtcgcggtcggcgcccaccggcaggaacgccttccacgagaagtccgaccgccggaggttcaccaccggcgccacgccgtcgagcgccagctcggagggcgtcctctcctcgccgccgaagtacggctgcacggggatcatcccagcgaggcggaggttcttggccgtgggctgccacgtggccgcccagcggttggccacttggtgcacgatgttgccgccggcgctctccccggcgaggaagcagctggcgaggtcgacggggacgacgtcgccgtcgaggcccgggatgccgttcccgtcgaggaagcggagcgcgtccacgccgtcgtcgtaggcggcggggtagcggtgctcgggcgcgaggcggtagttgacggagacgacgacgacgccaacgtcgccgcacagcctgcggcacacgccgtcgaacggcgccaccgccggcgagaacagcgcgaacccgccgccgtggtagtacaccatcaccggcatcggcgccgccgcctgcgccgccgccgcgggcgcgaacacgcgcgcccagaggccgcgcgcggcgtcgatggtgaagtcgaaggagcggacggcgccggtggcggcgtccggggacgggtcggcgcggacgctcatcaggtgttcgacgaggacggagtagagcgcgcggttgaccgtcccgtcgcgccgctccaccgcgtcgatcgccgccgagagcccgatcagctggagcctcaggcccagcggcataggcggcggcggcggcgggcggcggttgctctcgccgccggcggccacgtccttgcccatcttccctcccattcgcgagcttgacgaacactctcgttttcttctctcgctttttcggtgtggatttgtgagtcgtgatcacgcaacgctgtttccgaaatgggcacgttatcgccgtcccgtaaatgaggagtacagtgattgtactaacgtgtcgctgtcggcgatgggacacgttccaaaaaaaaaatatttttccatccatttcacatgtatcaatacaaaaccaaaaccaaaagaaaatttaaaataatcatcgcttcatcaaatcctaatacagttatttatctactcctaatacatttattctttacttcctccgtcccattttcagtgtagccatgattttttacgtccaactttgatcgtccgtattatttaaattttcttaaaaaaaattgaaaacataagtcacgagtaaagtgctattcatattttatcatcttataactacaaaaatattaattataaaaatttttcaaataaaacggacgatcaaagttaagcgcgaaaacttatggttgcacttaaaatgggacagagggagtatttttcacaaatttcggtgtgctaacggtaaacgggaaagttgaagtttggaattgagaaaaaagaactgaggccttattttgggataaatgggagagaaaaaaaatttgtcctcaaacagtggaagtactagtaagaaattgctttagtagaaaattgaactcggaattgttagaggacagtggctgtttaggtgctgaacctgtccagtcagtcgtggctgcgcctgcgccgcaagttcatcagtcaattgcggcatctggaaatccatggcaagaacagagctaacactgccaaaagcccaaaacacaactagagcataaaacggtggggttcggaggatgaaactccgactcccctttgatctctctctttcagcttattttctgcagttttcttttgttcgtcgttcaggtgcccagacgcaaaattcataccgtttaaattaaagccgtctgatacggatgaaatgatctgttataagaaagaggaaatgcaattttcagtgttattccaagatgagagtagatcactgaacagaagagcagaggaatgaactcaaatatggattctgatttcagaaaccatgagatggctaaaaggattgtgggatgaggtcatatgagtccgtagagggtttaactgaagatctctgaatattaacaggtgagcaggtgactgacaagatgacgccgccggctgttcttttgcgctgtcggtggcgagcaatcattttgtgcattagtttaaagcttgcatgtgaatcattttcatctaatataatacttctccattattcttgggataagataatccactaataaattggtcgttgaggatcgtgcctgcgccgcaagttcatcagtcaattgcccgatcaactgagaaccgcatgatcactttcaaatagcaactttccttacggcaatttaatttgggtgcatctttttttcttactggaggagtcaaaacaaactgaatcaaagttcagtgcaaactttgctgaaaattgaacccaagttcagtgtataatacagagtagcatgatttactgagcatttagaagcatataacattttttttgtgaagtttaacaggagcattcatccagattccagcctgattcattatattgagagtgctcctattgattcattgcgaagagaattaacatttcccaagcagtggcactaggcagttatgaaaccatcaaacatcgtctgccatttacacttttggtcttgccatgatttgaaattttaattctttgaacactacagaccaacaaacgagaggatatcagctgctgctatgaatcaacgcttctctaaactgcttagcacttggtacccctgcaaaggagacgcagtatgcgataggagtggggtccggagtttaaactccgaacctctttggtctccttttttttttcctcaaggtaattttctacaattttttttcatcgttcatgtgatcagacgcaaattgaacctgttaaaattcgtctgatacgggtgaaatgatctaataaaagaatttaataaattgcaatttgcagttatttcaacaaacggaaggaaaaaaatatttgatgattccttttcaaatggatttcgctgctttgcacttggacaacacctccaatctgaacttctctgcaggatgattaaggtctaaggagtaaggaacaacgaaagggtggaaacgagccggctcggctcgcagtggctcgcaacaaacaaggcttggcttggctcgactcagttagggaaacaagtaaaacttgagcacggctcggctcggctcgtttcctggctagcattcatgttgaaacacctcttcatatatattttataattattaaaaaaaagcaagaacaatcatcaacatgtaaaatttaaataagtttcaattcttcaaaatcttaatggtaaatttcaagttgacaaataatatctccataaaaaaaataaaataatcgatataaacacatgatggtctaggctcgcgagccaaaagaagttgctcgcaagccagctcgggctcggctcatttcagcaatgagatgaaaagaaggcttggcttggctcgttttgcttacgagccgagctaagccaaccaaggttgagccaagcccgagctgagctcatgagcctaagctttttttttttccaccactagctaggagtggagcgaccggagcgagcgaggagacggagtttgtgatgggaaaggggttggagtttcaaactccgacagaccgacatcctttggtctccttcttttcagttaacgttctgaattttttttcttcgttcattattttgatcagacgcaaattaaacctgttcaaagccgtacgatctgttaaaacagaaaacctattttgcggtcattccagtcttccagatgaggctaagcaacgaactgccgaactgctaggagttcttattcggaaaaaaaaaaacgaactgcgaggagtgaggaatacaggaatgaactcaaatatcgattctgatttcaggaaccatgagaggactaaagcctaaaggtagggggaagagttcgcatgaatcagtagaggttttaactgaaaatctcagaacataatggccaaatatttaaagtgaaatgctgataagtaccaaaaactacaagtttcagaattttaatttcattgtcaatttgtaattggtagttggaattgaacctgcctcacaggagaagggaatactatgcacaatgatgctatacttttgtaatctttgtacttcattttagatagcgtagcacctaaaaaaatcctccttaatatttatgtgatttttttaaacttttaattcagctagccatcttttttagaggagttggggacctgtcccatcacacgataatttttgttttctcagatggctgagatgtaaataatttccattattaaaagaaattgaaccatccccaataactgaacagtactagacagttctgaaaccatcaaacactatctgtaatttacacttgtcttgtcatcatgccatggtttgaaattttgattccttaaatcctacagaccgacaagcgagagaaaatcatctgctgctacgaaacatgaatcaacacttcgctcttccagtttgatgattctttttcagatggattttcgcagctttgcacttggagtgggggtcggaggactccgatcccctttgatctctttttttttcaggccatgttctgcattttgttcgtcgttcatgtgagcagacgcaaatttatacctgttgaaagccgtctgatacgagcgaaatgatctgctaaagaaaacaatttgctgcatgaactgaagagcagaggaatgaactcaaatatggattttgatttcagaaaccatgagtgggctaaagtgtagggtggtgaggtcaaataaaccattagtgggttggactgaacatagtgaccaaatattatcggttgaaataccgattaatatcggaaattagaaatttcagggtcaatattactgttaatagtaattggtactgttgaacttattagcgtgctccccaataaaatccattagacccctccccctgatgaagcaaatcagattgattggtccacaacaaggaagaaattaaggcctgatttcactaatgatttcgactgcatggacttttgtggaagcacgtgtgtggcggcgttttgcagaaattaaccaatcaagcacttggctagcataattcctttgttgttttcttcctttaggtgatccatcttctttgtaacatttcttatctttcatgtaattcaccaactcttcttataatatatatattttggtaaccctccattgaagctagccttttgcagcctctatgttcatgaatgtacgtacagtaattaacctgtatgagcatcagcatcagatcatcattggaatcaaagcaatattcaagcaacaaaccccaagaaaagcgaagggaatgacaatattatagttgtgcctcagcccctctaagtctaaggtttgcctctcagccaccctaaaatttaaatattaaaatttaattttgaagttgattttagagtttgtcgtagtagtttatttttgacaccggctttcaaattgttaaacatgcatatataaaaaatgtattcacaaactatttttttctttaataaatagttgtaggtgaaatgatggtagtctcactatccctcttgatccaaacaactccagcttgcaaagacattttgccagataattggcatgcatgcagcctaccattttcaatattttaaatagcgggctaagatatttagcggttagcttctaaaactgctatagcgggctaaatggagctataccggctaaattgtacatgaaagcaaatagctagaaccctctcaaacagctatagctgaagaccctgaccatttctcatctctataaatagaagtgcaaatctcgagctcctaatcacaggcagctgcagctagctagctaagcttggataacagtgcaagggcgccggacggctacttggtccatggcgtctctgacgatcgtcgtcgccaccatcttcctgctcagcctcacctcggcgagcgtcgccgtccatggccggagcagcaggaggaggttcgtcaggagctacgacgagccgtgcatggagatgaggctgtacctccacgacatcctctacgactacagcaacagcacctccaactccacggcggcggcggccaccaagccgacggcgctggccaacgccgtgccgtcgaccggcggcaccttcttcggcgaggtggtggtgttcaacgacccggtgacggaggggagggcgctgccgccgtcgctggaggagacggcggtgagggcgcaggggctctacctctacaacagcaaggaggcgttcaacgcgtggctcgccttctccatcgtgttcaactccacggggcgccgcggcacgctcaacctcatgggcgccgacatcatcgccgagaagacgagggacatctccgtcgtgggcggcaccggcgacttcttcatgtcgcgcggcgtcgccaccctccgcaccgacgctttcgagggcttcacctacttcaggctgcagatggacatcaagctctacgagtgctacgtatgatgcatccatccatggtcgtataatatatactccatccgttctaaaatataagtatttttagctatgaacgcttatattttaagacggagggagtaccaaacactattcattattgtcgatgcaaatttcagtgaagatgtgacatctttggtcagggagacaaatgatcagccaattgacaaggtgatctgatgctcctagcttcgtctacctatagatttatttgttgctgctcccatcatcagatcagaccaccagctgtatgagtatatacacagtttgtatgctaaattctttctaaataaacatccttatgcaaatgtgttgataatgaatctatctattatatactaaaagtccattaaactccctataaacactctaaagccaccacgtgagactcctacaaacgctcctagattgccacgtgccgctttaataaatcttacaaattctaagaaaaaagcaaaacatctagccatcaattttcatttaatttggtggatccaccaccaactgcagccgccgccccaccaccttcaatccctgccaccaccaccaccaactgccggctgccgccgccacctcacgccgaccctccgccggtggcctccccaccagatccggccgcggcggcccggatctgggcggtcttcactgtctactgcgcggccctccaccgccgacgggagagggagacgaagatgacgaagccccgccgccgccgtccttgcggccgcgcggctttgccgatggccgcttgggcagcggcgatgcggcggaaggaggaggggggggggggagcaggcggcgccggcggtttccgcctcccgtgtcgcccatgagggaggacgacgcgggagcgggcgacgctttttgaactacgccttcttggtagcatgtttaatcaaaataaaaatcttcttttcattaaacaataaaagttgacaagaacattgtatataaaaaagagagatttaattagattgtttatgagataggattttgtaggattattgcaggaatgactccaattttctcctaaacagttaatttatgccattggaatgattttgaaaataacatattataatagtatatgtcttacgattgcaaattttgttcccatttctacttttagaatttcttatatacaaaacataattgtatctatgaaaataaaaattatagttaattatatacatattattatattatgtttttaaatctggtttggcgcaaattaaattgcatggggaaaaacttgctaatctcatcaatgatttttgactgctcagatttgctaatcttctagacaagctcacctccgggatccggctattatgccgggtttcaggagattaagcgattggctaggcgtagatcacttttcttcctttacgactttaagcactccctcttctatagatacatgtaacatcgatctcattaattcacccactctaatttcttataatattttaatagacatgcgaccagatctgtcagaatttttttttctggtaaccctcccttgaagcctttgcatacctccatactgctcataataacatgttacaataccctgcatcagcatcagaaattcagaatcaagcattcgagcaaacagtccaaagtaaagagaagggaataacaatataaatatataaatataatagagtagcctttgcttatatctcactccctcttgatccaaccaactataggatatgagatttgctccgatccaacaaaaagtactttgagttaccagtacctcacggtaccaaatcattttcgatcattggatctaacagtacccattctgtccagttagattcaacggtcgaaaatgatttgataccgtaaagcaccggtaccttgagatacttgttgttggaccagagcaaatctcagaacctacagcaacacattttgccaggcatgaacatgcatatattattccatttcacacctctataaatagagatgcaaaactcgagctccatcacagctgcagcaaattaagccagcaacacttgctaagtggagtggagtagctagcttctccagctagttagtgaattaagctcattaagctgagttaattgcactaacttactactccaagatagcaatggcgacttggtccaatccctccctgatcgtcgccgccatcttcctcgtcatcagcctcacctcggcgaccgtcgccaatggcggccgtagcggcggcggcaggaggctcgtcaggagctacgacgagccgtgcaagaagatgacgctctacttccacgacatcctctacgactacagcaacagcaccgccaactccacgtcggcggcggccgccaagccgacggcgctggccaccgccgtgtcgccgaacggcaccttcttcggcgaggtggtggtgttcgacgacccgatgacggaggggacgagggcgctgccgccgccgtcgtcgctgagggagacggcggcggcgcgcgcgcagggggtctacctctacgacagcaaggaggtgtacgacgcgtggttcgccttctccgtcgtgttcaactccacggggcgccgcggcacgctcaacctgatgggcgccgacctcatgtcggagaagacgagggacatctccgtcgtcggcggcaccggcgacttcttcatgtcccgcggcgtcgccacgctccgcaccgacgccgtcgagggattggtgtacttcaggctgcagatggacatcaagctctatgaatgctacatctgatcattacatgcatgttttttttaaaaaaacaaattgaatttccatttttttttaaaaaaaggtgaatttccatctcgatatatagttgcttgatttgcgtgacgagttatatgcaccgacgagtgtgcaaaatgtatcccaaacacagttttattttccccctaatttgtgtgtgtagaatgtatcaaactattatcgcacttttatttcattcaataaagactaaccacataatcgtgttttgcgcgactttttatcctgtttaagaacttttgtatgtggtctattagtttaccttagctcttaataaggttttgatataagttaatttatttataaagtatctattatcctagccaacaatagaacttccttcgtcccataatataagggaatttgggtggatgtgacacatcctagtgcctctcgagggtcggcgccgaccctaggtgccacatcggcgcaccagatagaccaagaggccagggtggcagcggggaagatgccagcattcgttgctgcttgcaaaaatagttccacaaaaaaaatgataagtattccacaggttgagtttttatatcttaacaaacatactgtttgagacaccagaatccaacagattaaattctggagctctgtctccctattaaccatctgcagggaagtcttattctaccagtcgtcacaaaagttgatacaagctcgaaagtcgagatcaaacaaaaaaaaaccaaccgatccgtagattcgctacataagtaactatagttgccatgaaagtaaaagaaacacaacagctgatgacatttgcactttgagatcggcaatatcaacatcatgacctccttcaaccaagccccatctatcaacctgggggaattaaacaccataagacaagagaaaagtaaatagccttaataaagatagacaatggttgcagaataacctggtgatcttcttcaagtctgatcaattcaattgcctgctcaattcccagcttccctctgaatattgcgagagggattaccagggaatgggctgctgctgccatagcatcaatagatgccaactcaaagtcggtggtattcttcaaaacagtttctacagcattagctaacccttcatcttgctttccaccaaaaaagcttgtgtatacaacaggcttgaagccaaactcagtgtttacccagtctagtatagggtcaattttctccttctgtctttctgcacacacacacacacacacaagaagcataagaaagacattgctggagggaaatgaagagaagacatcgctaaccaaaatgtatggagttatatgctcacaacactatgaattcatatggacgtcattgcatacacagtcaagaggaaacaacttacgataaactcctacagtcagctcattatcatcaggtgaacggcagaataccaaatcttggtggaatttcttcatcaaattatcaattattttttttcgtgtcaatggaactcgttccagtgcagtgcaagcaagcttcataagaggcattgtaaaaggccggattccatctgcttcctatgatgtcaagaaagtttggtatcagtatatgttacataagaaactagaaaatcaaatacataaagaagagacttgcaaagaagttaaattcaaatataattctgggctgtgtagatgagaagcacatcaagtaaacagaattcgttgtaacatctcctgtcacttgtaaaatagatgatgtttgattgcagcaattcagccatgaacatatgttacagttgaaggcagtaatcaatattaattggatgcacacccgtgatgctaatataaccaaagaacaaacaaaaccgattacttatgacatgacagatcttttaattcacatatgcaatatggaagtatagagcagctgactacttcctaagtttacccaccgcaacatataagtacagacatacatacattttaagggttgccatgtgaatatgtgatgcaaatgcaaaggcgcaattgccttatgaagtttgcttttacttagctgctggaatcaacctgataaatttgaatacagtccatcttgtggtagtactattatagggatgataagataagaaccagacaacaaaataactctaaatgctgcattcttcatatcctactgaaacaataactctataataccagtatccgaattaattaggagtcctggtcatcttctttgctacttcccccgtttcacaatgtaagactttctagcatttcccacattcatatagatgttaatgaatctaggtatgtatatgtgtctggattcattaacatctatatgagtatagacaatgctagaaagtcttacaatatgaaacggaaactattctttaaagctgaacaatatttgtagttattctagctgctctagccgcaacagggagaaagaaaagaaatgtaatgccaaaaccacctctaattgcacgatctaaatcatcgatgccactgccactgaatagtacactatggcaagcgagattcactgattgaatagatttaaattgcacaaaatccttccgcaactcattacagttctgggttaaactgaacttacaagattaagatcgacctaagcgctactagtcacccaatttccatttcgaatcatttgatttaccatcttccatccgaatttgagtaatcttacactacagttgagcagcataaccaatcgagggccaatcaaacagaagatggggatcatgacctggtactcccactcggcggcgatggccatggcgagcgtccgcgactgcagcttgagcggccgcttcgccggcgacttgagggtgcggtagtcgagcatcaccgaccacccgttgccgtcgtcggcgcgccgcacggtggcctcccggtagaaccgcttccccaccaccgaccccgtcatgaacgacatcggcatcgccaccgacgtctcgtcccgcgtcgttaccgccgccgccgccgccggcttcttcaggtagatctcatctccccctcccccgcccgcctcttccctccctcccggagaggaggacgcctccgccgccgtccccagcagccgccacctcccccccgccgccgccgcggatcgctgcaggaggaggcggcggcctgcgagtgtcgccgccatgactggtctcgctccgctgtttgggcctaagctgctgttctagtagaggcaaataagtctgtttcgtctccctcatctcttgctcctgtaaatcgtctccctcaactgcaaaaccggatatagcgccgctcccggaaggctttttttgtcttcggaaagtagtgaaaatcaactccttcgatcgttttggaagtggtttctactgacatgacagtttgaccacggtttaacttgctaagtcagtagatgggatccacgtgtcagcgactttcatgtcacctcatcttcttcatcatctctctctctttcgggctcattcggtttaaaggatttttataggattattgtaggaattcaaacattaggatttttttcctatatgcctcattccttccattcctataaaatcctatcaaatacctaaggattatagccttacaagcttattccatatgattcttattatcatgagataagacctcttagaaaaattcctaagaaataagatgcatctaacatcctaattctttaccttccctgtacctttgatttgggaatcctataaaccgaattagccttccatctgtccccccccccccctctctctatcatcaggctcaataactaggcccatccgcaaaatcggcccgatgtttgaggcccaactaggcccagagaaggttcgagacgcgtggagcagcttcgtctccgcggcgacctaaaatcgcgaggactacgaccaaatcacgcaccttcgctctcttttccattgcagagccctcacgcttccgcaaccaccaccgcgtccgtgatcccatccacctccatcgccgccgccgccgcgtatgcgccgccggtgaccgggatccatggcggagccggacctactcgcgcccttcgccgacctccccttcccccccggcgacgatttccccgacttcccgaccctcggggatgacgccttcgcgctggaggatttcgatctcgacgatctggacttcgacttcgatgtggatctcttcccgccggatgcgccgccgccggtgacgacgtcgtcgtcgtcctcggccgccggatcgccggaagcggggacgtcgtcggccggcgacgggggttccaagaacgaggagtccgcggattcgtcgtcgccgtcgaggagcgggagtgacggcggcggcggcaaggatgggaaggatgatgaggcgaagcggcgcgcgcggctggtgcgcaaccgggagagcgcgcaccagtcgcggcagaggaagaagcagtacgtggaggagctggaggggaaggtgaaggtgatgcaggccaccatcgccgacctcaccgccaggatctcctgcgtcacggccgagaacgccgccctcaagcagcaattgggtggcgccgccggtgctggtgccgccgcgccaccgccgccaatgcccatgtaccctgcggtttacccattgccgatgccatggatccacccagcctacgcaatgcgtggctcgcaggtgccgcttgtgccgataccccggctcaagacgcagcagcctgcgtccacaccggagccaccggccaagaaggcccggaagaccaagaaggttgcaggtgttagcctgcttggattgctgttcttgatgatggtctgcgggtgtttggttcctgcggtaaatcggatgtatggtgcagcgtacactggggaaggcgctgcgattgttccgtcacatcatgggagaattctggctgttgaagggccacaaaatagtgtctcaaatggtgttgatccgaaggtacctcagaatggaagcgaaacgctgccagctttgttatatttgccgaggaatgggaagcatgtgaagatcaatggaaatctggttattaagtccattgttgcgagtgagaaagcctcttcccgtttgtctaactatggcgagaagggttctggaaaccaaggaaaggaggagactagcttagcaatccctggctatgtagctccgttagaagctggagaagtcatggattctgctaaaggaatgaatgaactgatggctctggctcctggagatggaagcatatacagggaggatgatgggatgctgccgcagtggtttagtgaagcaatgtcaggtaagaatgctgcataatgtcgcacgcacaccctatttaatttaaatgaacaatactgtatatgccttgttggtgtttgtaggacaatgtggcacttagtgcgatgaattgtttggagtataacacttactatctgctagagctagcgatcttaatagatgaatgtagtgcttattcagtgctggaagtagaagatatctgcatatattacatgttcttttgccgtggtaaagttgtaaacttattgtgggtttagtatgccactcgggtggatgattaccaatataccatgatacataggaggcgatcatagacttttgggtcagtggttcattgtttagtcaccattgtgaaaagctcaatgttgtagttttttccgttgcggtatgctattggagaaggtaccattgcagcatatataattaactgctcaatgcatatattttgttgactggaatgttatgttctgaattactgctaattctgtatattttatgatatttaatttactattgtacagtatactatttatgtacattagtttgacgagtaaattgcattgccggtacacgaacttgtaaaatgctcgttttggtgcttgaatttgtctggtgcatgcggaggaaggcaaaaaggacacaacatggctaatcttattaatttaggggctcattaggaaattatgtaaacatatatctgagaaggtttgctattagacatacacctcttcaataaaaatagaatggatatagtgatcgtagaaaaagataaaaaaaacaaacaatgatataagggttagaaatatatgaaattcatcactttcatgatgaaggataaagtagagaccacatttataaatattgcatgtcttatgtacactcactacacgtatgcacgtcacatcctaatcaacattagcttcgtaaaattaacattgccaagctattttggtcctcattcgcacgaactagacaagtttgtgtatcgaaacaagcatttcacaagtttatgtactaaattgcacccacctaacaagtttgtgtactaccaatgcaatttactcttagtttgaccttataaacttcctctggacaaaaagtcactgatcgaatgaattgattatatccttagctgcctctgtatagttgaattcaaccttacatgtataaccatcacaagtaggtatttcctttgtttgctgaaattcttccattacacatgtcctgtttatggacatatggcacaattgaataatatactggtttttctaaattgtgtagtgaggtagtacttagatttgtgcatatgtgaagcacttattctcttttttgttgatggattagtagagtgatgaaacatttgtgccttgtgatgtagctttgaccctaaccttttaattcctcggctgatagttgttataagtagtttgatgacttggtccttcatttactgaagttaaccctgtctattgattattttccaggtcccatgttgaactccgggatgtgcactgaagtattccaatttgatttatctccaacaacagctgatgcaaatggcattgtgcctgtctactctgggtcagtgactaacacgtcacaaaattatactgaaaatcttccttctggccctgttcagaaggtgaagaacagaaggatttcgtactcagaagccatccctttacgaggttcgacatccaatgacacggatcatttcaaagcaccccccaagaaccatagtcagagccatgctggtcgtaagccagtttcgtccgttgtagtctctgtcctggctgatccaagggaagcgagcgatagggatggtgaggggaggatctcctcaaattctctgtcccgcatcttcgttgtcgttcttatagatagtgtaaagtatgtaacatactcttgcgtccttcctttcaaaagccatagccctcacttgtaatgtaagcaagttttacaacgtaatctgtaacagaacggatctccaaatgagctgactttattgtgcgatgttgatagacatatagagccttttttttttctttttactggattaccagtttattgacaggaatgagtgttggttccttgtctctgtgcttgtgtttccatgcctttgtgatgcatggtcttgtttggaatgctgggatgtcgaaatttctctgaggttttcgcgttccaaggaggcataattcattgttgcatcaccgcatggctctctggttcttgtagattgctggcagttggcagtaaaaggtagtttctttttattactacaacataacttgcatgtactccttttccttttgttatctgtctttcaggtaggtgatttgcgtattttcttgaaacaagtggcattgttttgttctcatgccatgctactcttagcaggatgtcagggatatcattttcatgtcgatgtttatgatcactaccaattgtttgtttcacagatatgtcctcaccacttacttttgttggcttgtttctgttagtttttgcttgtacatatcgtagacctgttttcattgataggaagcaaaacctacagaaaattgttgcttcataagaggatttaagcattcgcagttttttgtaatcccgagtctgaataaagcaaaggtaacctttctacttccatcatggactcacttgaggtgtggttagagagtcttgaccaatgcaacccaggccctagagctgctgacattatccatcctgtcaagtcctgaatacacttttatctgctccttttcatcagaggccaaaagcctggtttagttcccaactttttcttcaaacttccaacttttccatcatatcaaaactttcctacacacaaactttcaatttttccgtcacatcgttccaatttcaatcaaacttccaattttaacgggtactaaacacacgtattacctacatattttctgtggcttctccaaaaagaggatcatgttgcttgatctgtgtgtagcgtgtgttgctcacttgtgtgtgctattaaagacactaaacaaccattgcggatagcattaagttgtgatttgacattccaactgatgattcattggcgccctcgttacctactggactactgtggatccttcctgtgatcatgtcctggtctttctgatcatgcacacctacttgtcttttgtaccggcttactccgtatgaatggattggtgagatccgttgttgattgggattccatcacctaattcgtacgtagaccactttgatctcgtcagtgagacctttgttgattttgtcagtgtttttgctggatggaacactctgttgtcggtcagattattggaagaaatagcagcgctcctggttcaggctgctgtcatagtgctgcctgaacttgcaacatttaggcccggatgcaaatcgtctgctggaccgcacctgcagtaggtgtcactgacatgtgggtcccacctacttcgggcccacttgtaagtggcacctactgcatatgcagtacagcacaggatctccgcactcttaggccccctttgatttgcaagatagagaaaacataggattggagaaaacacgtgattttaaattttggtttgcgtgatagagaaaacataggattggagaaaacgcgtgatttaaaatggtacccttctctaatcatatagaaatgaaacccatgcaaaaataatagaaggccccttaaatgccataggaaaaatgaagaaaaataataaagaaaaggtgagacctctaggtaattttccgattaaaatgaaatgtacaaatataataatatggaaagttttcttccttttccaagtttaatgtaagaaaaaatattttcactagaatttgaattctatgaaaatcttttgccaatccttagtagcttcagatcaagcaagttttgtttaactataacatttttagaacggaaggcttatcaattgaatgatcaagtaataaataataaatttgggaagcacccgtggtgacttcatgacaaccaaggttcaaatcctgatacacgagtcagggtgtgcatttgcaagtatatgagtgaggtatgcgtgtttgatgatatacacgtgcgtatatgtctaccgtacaataacgataaaaaagagagtaaaggtctgttcactttgatgccaggttgctaaaaaaaatagctatatttagtttgctgtcaaattttaataaatataaaagaaaacctaccaaaattttggtaactatactaaaattttggcattaaggttttttttacatcaaagtgaacatgccctatataacaaaatccttccgcgaaattcagttgaacagcatcgccatctctgcacaaaattcagcgaatcagcgagagaaggaccagttccaactccgaagtttacgcggtccacaaagaccaagtgcaccgaaatatgtccccccatgctgacttcgtgctcttcttttagggcccgtttagttccctaaaattttttctcaaaaacatcacatcgaatctttggacacgtgtatgaagcattaaatatagataaatagaaaaactaattgcacagttatagagaaaatcgcgaggcaaatcttttaagcctaagtagtccgtgattagccataagtgctacagtaacccacatgtgctaatgacggcttaattagtctcaaaagattcgtctcgtggtttccaggcgagttctgaaattagttttttcattcgtgtccgaaaatcccttccgacatccggtcaaacgtttgatgttacacccaaaatttttcttttccccaactaaacacaccctaatacttcgtctgcatcttgagttcaaagctgcctctgtgttagccctttgcttagctactaatcatcccacatatttcaaaccatttaaaatccaaatagtcctaataacctactgcattaacgtcactactagagatagtgagagaagataacaaagtgtgttctcgctgacgaaccaaggtgatttcttctatatatattttgcgtttttatatgattttttaagttcgttgctaggttgcatctgctatttttttgcccccaatttttgatggttctaccaatatccgaagcctcaaaaccctatctttgtcactctcctgcttgattctgcctacgcatccgaatcttggccgctttgtaagctgaatgtcgcctgggttttctcgagcggagtaactgggtttggatctttgttcttcttttggtcgccattttggagttgaatctcttcaccgcgtcggacttcttccctctcctggggattctttgtgccgcaagttcttggtgagccattgtttgagcatttcagggttttctcgtctgcgccttcctttcccccccatttttggtgctcaatcctgcttgaggtttttattttttatttcccctctatttagggttcttgatttccatccaattgttgtttgctgctctttttgaagcgtttcggtgaacagattgttgtcattagcacttcgtttgtaggttcactaagtttcttttttttcttggtttcattttgcaagttgttgctaactgcaagaatctgtaacttaccagaatgcagtgtcactcatccacaaatggtgatgcttgtttgctgcggacaaccggaagaagcagaattcggccgatatagtaccaaattgcaataagaaaatggtactgcatgattctagttttgtatctctgatatctgatagcaacaatatttgatcatagttttcgtattcgcagcatccatattcacttaaaagttccaagggagcaccgtttccaccgcgaccgattcttgtcttcctcattgcaatatttggattctatgtatgctacatctcctttaaccagataacactagagaatagatctgaggagaacagtggagaagtgcaggcagaaattcattgccgaaagcctcatcttcctcatgaggagctgcgttatgtgcactttccgaaacctgagagttatagcaggtaattttcctctagagtagaattattatctcttagtacgcccctgttatggatgtgcattttctgattcatgttgcttcaaattttccttcttccataggggagagtgttcctgcaatctggttcgatcctttgtgcttgtatctatgcaacggtcgggaagtggatggtttgagactttgctgaacagccaccctaacatcagctcaaatggtgaaatatttaacagggtggatagaagagagaatatctcatctatcttacagacccttgacaaattgtataatttggattggttcaccagtgcagcaaagaatgagtgcacggctgcatttggattgaagtggatgctaaatcaggtatatttcagcttttcttggtccatgtgaatattagagggttagctctctgttacattgaacttcagaaatcgcacacctttctctgaaacttaccatagtccatagttaccgacagtgtgcactagtcctgttcttgggcaatccagttcatatagtctattcgcttgctaaaattttagaggtatagctagaatttttaacagaactacagggtaatatgcttgcaattcccaatgatatgttctggctgctctttgtagttgtacaacacaaactggtcagctatgattattgatgttggcatttgtgtgttcaatctcattcatcaagcattattgcatgggtaaaattatgcctacaacttacaaagttatgcatggctttgactgccatcattgtgttctccaggggtttatggaccatcatgatgatatagctagttatttaaacaagaagggtgtttccgtgatatttctcttcaggagaaatacattgcgcaggcttatctctgttttggctaatgattacgacagagatgcgaagcagctgaatggaacccacaaatcccatgtacactcaaaagaagaggttatatccatgcaacagtttatgtcctctccttactattttcagttcatatttttcacattgaacatggtttcatactaggtgcacttttgatgaaatatgaccatagtatatttgaatgcatatgggaaatattgtatcaatattggaggaatgactatattgcatttggaaggagccattttctctacatataaaagggctcctcctttccgaacttgtacccttatattaggttatattatagaatatagacaactactggacttctggtatagatattttggtgaaacttaaatcctacatatttccattccaagagaaatgtaacatcactatcaatcatgttggcaaggaagaaaaaaaaaatgaaatgcttatatattttttctgagcaggctgagatattagcgaaattcaagccggtgctggatgtgtcaaatctgattccaaacatcagaaatgccgagaaatacatcagagattgcttggaccacttcaacaccacacggcacatgatcctctactacgaggatattgtccgcaacagaaatgtactaaaacatattcaaatgctgtaacgaaggatcaatgataaccctcgctttgctaaaatatcatctctatgaatgcaggcattgttccaggtacaagaattcctcggagttccggtgagaaagctggtcagcaggcaggtgaaaattcacactagtcctcttccaggccttgtcaggaactgggatgatgtgagcaacaaactgaatgggacacagtatgctcattttcttgacggtgcagattatgtcaggtgatctacatggatgtgagcgacaggattttttttttcatatggggttttagttgccatatgattgattcttttggtacaaatgagttggtaaaagaaagggataacgataaatagatcaagatgagagaccttgtgatcaaattgtacatgctttccactactcattaccttcagagctcaaattgcaaatatatgctcaaaattgctgacagttttgtgatggttattttgtgatcaaaggaatacactattttggttcacttggaagaatccgaattaacgaaatttgtagttttgttcacctatcaccatcattatattactcggtctataagccgtagctcaactaataactttgcaaatgaaaggctaaaccacaggagacagcaacagaaatgcagtctcccagttccatttttcaggtttcaacactccagtagcagtgtacactttcgaaatcaaataatgtttcctcgcaaaaaagaaaaagaattgaataatgcatcatgcatgattgccttctagcctaaaagagggaataaaaagcggggaatgtacccaatagttagtacacgaaaaaatggtcgcagatcaacaacggattaataactcccgtaaattcttgtacaagagcaaaaacaccactcaaaatcatgtttacaagttgttacagctacaacatcgttaagggcaccagctaatggtgtgggcatcttgacagtggcagatcattgacgccttcgcttaatcctctcaagggcgccaagctgctcattctcctgggcaccagagctttcctcctccctgttctctgcagctctcttgccgagctctccaaacaccgcagcgggaacactcttctccgcaatttggacatcgtcttcctcctcgtcgctctcatcgggcagctcaatgtcctcattgttagtagcagcagcctgttgttgcctgctgctgctctcagcctgtgcctgcactccagcactgacaaagttcatcatccggttagcaggagcagtagcagtgcttggagctggtggagccgtggaaggtcctggcgctagttgcctttctaggttagccatctcatcctcaggaacaccggctcgtttcagagtgtcaactgcctcatcgaggttcagcctctggtccctctgcatcaagtactctgggagtatgaaatgagtctgcacatgaaacgaaatacatcattttagtttactaactcacaagatgatcattgataataccaaactgcctataaggttggcccttgtgacatacctgactgcggctagcagccacagtacgcttgatgcgaagcatctccctgaatgtatcttcgttaccatgctgaatctcaaattcattccatttattccaaaattcaggatgagagtttggatcagcatagttggatgcgtggacataaatggcacgggcacgatcaatttctccaaggtttctttcaagttctgcaaatttcatgcacattgtcatgacatctctgtctgggagtccagattcaattgcttgctgcagcacaaaggaataaagttagaatcatttacagttgtgcatacctaaagtgtgactcaactaaaatctagaacatactatacagaaaaatagtatctggatttttcataagtatatgggttgttacagcgagtgcagaatgagttctttgattcatacgaacagttagcaaaaaaaaaaaaaaaggcaaggctgttggaatgtaataaaacccacattaattttgtcttaaaacagcaaaatgtaaaactggatctcaaaacaagcacacgatataaccagtattagtaagaaccaagataacacactcacctcatatatctgtcttgttcttggaacaccaaatagctccgcagcccgtgcaatatatatttcgtacatactcatcttttcgctgttaggaacagcccttacagcttcgtcgtatacattcattgcacgtttcgcaaggccatagtcttcctccagcttagcatactgcaaatacaataccttcttttcttgtggaggagcctgatcaaacaaaacaaaatgtaagtactgaagcaatataggaaaaacatcattttcaaaacagcatcgatgcaggaaaaaggaacacgaaataatcaaccaaaggtttggaatctaaacaagcaagcaagcaaatgcaaaatatcgcatgacatgatatcagcaagcagagacaaggttcttaaaggaagaagaaagcaggcgcaacaagaatcgccctgaacttattcgtatgaagcaaggacaaaatttctgattgccagttatacccaaaaagcatttggtaacatgttaactaaaacaagtcccaactccaactagattaaacatgattcaacttagcacattttatccggtgaacaagaacagtacttagggacacatgcattcagtgtttcaaaagttaaatgtagatatattcataactactttcatgattttacaaaattattgtgttgtggagatggtgtctctatccaaactgttactcttttgtgactacagcagcatgccacaaatattgcttacatgcaagcattgcatacaactatatgtaagaaacatgtgggtgaaattctagttacctgtttgacagcttcatcgaacagttctcttgcccgctctaacttgcttctctgataccttcttacaaactttgtgaggtaggtcacccaaatgtctttaacatggggatatttaaaaattttcacaccacgctcatacactttaaacgcatcttcgaaatacttgttttcctgtggaaagaggaaatgtcatgatattagcatatgcacgataaaatagtttactcgaattttggaaatgcggagttaacaaataatcctacctcaagaagatatgcataattgagaactatttggggagtggcaattcgtaaatccaatattctctcataaactgcacgagttgattccaatgttccaagactttcctccaggtccacatagaagctccacagtttcagggatttatgtactttcaattggacaggttcatccccctcagcagcagctgcacaggacatattgcattactgttagaaaatatgaacagtaaaacacacaacaaaaaataagatggtaaatatatatatatatatatacctcgcctcttaacctcaacagagggttctgcagtagcttgcctcatcagctcaatagccttgtcaaaattactgtgcctcagctccatctctgcccactcacaccaaatactggctaagtggtcaactgccttgtagttcacctgtgttgcttttttaaagatctcttcagcactatctagacgattatgtttctcatacatctttgcgaatgccacccatagagtatgtggttttccagctgccttcatagggtctacggttttcacagcttcaacatatgtggctacttgccttgtaggatccttctcaaaaagtttcaccctcctgcaaacataatcgtattgttagccaattccatcaagtatgagaatggaaaacacaaaagggaactgccaacatactagtacattgctaggctgagaaatgaaaacacctgccactagattgatacattccacagtatacatgttttgaattaaaatttaccacagccacttactgcactaaagaatccaaaacttgtcgctggaaagaaatatgtactacaaaaacagtaaattgcaactacaataaaacagtaaaaatacatagaccgtatacttacaaccatatgtaatagtccagtggggtcttgcattagtcatttaatatatcacctaaaatatgagaagggaccaaactttttgcagtaacagtacatttggtttgctggtttaacatgaattatccaaatcaaaattgttctactaggctggaatattgagatgctactaagttaagatgttgatgttgaaaaaataaacagcatgtacatgaagtgaactaaagagcaaattagtgtttactattgtcaaaacacatgaaaaagaataaatcaatgtgatcaatcaagtgagtctcacctgtgccattcctccacattatgcggattctgtcgcagcaggacactgctgaggagctctggccggcgatccaacagccgctcaaaccttgccagcctcaaatcagtatcatcctcatcattcagccagcaatctgcgaggaatttcttcgacagcttgtccatcccattcttcctgcccgcttcctcttccccctcactccccgcaccctcctcctcggctgcctccagctttgccgcaagcatactctgctcgaattgtgtgtacgcctcaaacaccacgctgaattcctgcaccgtcatcaccgaagcaaccccctcttcgaagacatccctcgccttctcatacaaggttcttctgacgtagtaatcggccagggaggtccacagcttgccaacctcatcggtgaacttgcgaatgccgccccgcagtatagcgtccaccttgagccccgcaacctcatcggcatgcttggtgaggatttcgcagagctcaagccagagctggtgctgggtcttacccttgacggagcggaagccgtcatcgttgagcacggacgcgaggcggtcggcggcctcctgccagcggtttgcggagatgaggaaatcgatgaagtcctcagcgtgggaggggtcgtactggaggtatcgtcggaagacgcggagcgaggtctcgacggggcaggccgggagcgaggcgaggcggaggtagagcggccagatgcggtcgtgctgcgtgacggggagcgcgcgcagcgcgcggtcgaaggcgcggcgcgcgcgcgtgagcaggcgctggtcgagcagcgaggtgaggtagagcacccagacgcggggcatcttgtgcatggtggcgagggcgcgctcgaaggtgttgttgagggaggcgtaggcgtggtgggagatggggtgcgggcgcgcgtggtcgaggcgctcgcggaggtaggcgtgccacagcttgtagctccccgggagcgccttgagcgcgcgctcgtagatgacggcgcgcttggcgaacggcgcggcggcgcgggcgacgaggtagcgccaccaccccttgagcttgaacggctcgcgcaggatctcctcctcgtacgccaggtcgtcctccgtcgggtacatctccggcgagatccccagcgcctccgccgccgccgcagacgccgccgccacggccaccggaccccccgcaggcgacggcatctctcgctagggtttagtgctccgccgcggcgaggaggatttgcgccggagagagagagagagatcgagtcgagacggagaggctggcttggcttggcttggccaggccggcgcgtcgttttgttgggccgatgagttggaacccgagtaggcaagggcttgagtggttttggtgggccttcagggattttgggctgaacttttttacggaggaattgggcttatttggtatttgagtaattgggccgagttttgtctgaaccagagcccaaccgtcagtcatctgcttctgctactctactcaaatatttctttccccgattttggtatacatttgtcaatttttttgttaaaaaaactacaattatactgtatttatatttgactacagatatatagatagtcctttttttcctgaacagaaactttaagttttttttcttagagaagaaactaaagataaaatattactatttaattatgtgattacgtgtaagagttatttgctgcaatgcaaatgttgaagtatagtcgtgctacggtttctttatatgccacagaccaggaaaaacttggcaagagaaaatagggtgcttttttggatagatgtcgaatcatgccgcacctgaattaggcagactgactagtgagtagtgactaccatcactgatacaacaaatcttggcgttggacattatccgtacgagttcttctcaacaatattctcccttggtccaaaaaaaccaatctagatggggatgaaataccacctagaacaacgaatctgatattccatccccacttaggttggattttttttagacggagggagtagctgaacaacgaaaatgttagcccctctatttttttgggataataggcagtgatcccagtatatgctgaataaaagaggggcaaaaaccacaatgttaatgagactagatcctaggtggttgcgcgcacgcgaaggaacggacgacctcctacgtgcagcgggagggagggaacggaaggaagaagaacggcttcgtttttaaaatagtagagatatcacgtacaaactgccagtataccactaaggcgacatctaaatacatttcagcatgctcccataaaacttcattgtcaaggacaagaggtttggtatacttcgaagttcgaaagaaaaccaacattgttacattaccggacttctgctaattaaggctcaatcttgcacaacaattcatctatggaaagaaaaaaggagccattagctcataactccagattatttaatcaataatatgaaaactatatgattgatgatgaccaacaaaatcaatggaaagcctctatcagattcagagagctcacatcattcgtgtgcttttcaccttgctcctgaccaatcctccattccaggagtctatcagaattcagagagctcacatcacttttgtgctttcaccttgctctcgaccaaacctccattccaggaggcgcacgtgcatctgcataatctgcatattgccgaaccaactgagcacgatttcaggtgagcttaacagaatctgttcttgaacaagaaaaccaagaaatgtcactgccaaacttgccaggtcctgatgaaggcaacagaggaggaaccctgccttttgcctgtccacacagagatacacacccaaggccgtgattagttgcatttttttttcaaacttctaacttttccatcccatcaaaactttcctacaatcataaacttctaacttttacgtcacatcgtttcaatttcaaccaaacttttaattttggtgtgaactaaacacatcccaaatcgtctctgcttcttgctctccacggagaagggagatcaccggcgcttccacgagttgctcctcgccggctcgccgctggtcgcctcggccgccgccgccgctgcagttcgcgagaagcacttggggtgctagtgtttgggcccaaatggaaacaactgcacgaggcccatgtagtccggcccaatatgtatagccagtataattcgatcctttatatttgtggtcggaggtggtgagattaagctgcaccgccattttagattagtacgttgtcagcatcggtagcgccttcacttttaatacttacccgtgtctccatcgcaaaatataataagttttgattagataagatacatcctaatattataaatctagatagatcgtttatccggattcgtggtattaggatatgttctatctaatcagaacttcttatatattttgggtagaggaagtacttgctctatccactccaaagaaaagcttagggcatgtttactttgataccattttcaaccttaccaaattttggtaaagttgtcaaaaaaaagtggctacatttagtttgctgctaaattttggtaactatacaagaaatcctatcaaaattttagcaatttgccaaaattttagtaactatgccaaaatttggtaagattttttttttcatcaaagtaaacaggcccttaattctagttatagaactggatgggtgcttatcaagttcatagatagaattaaattattattgtttttataataacaggtctactctctccatctcaaaataactcaatttgtgatagtaatgtaacataaactagattcattgttcgagtcacttgggaaggaggaagtatagctcaggaacgggagaaattcttggcgtgcggcagaggaaagctgtcattgccttcgtcgatgatgtgtgctgctaatgtccattgcacaacactgattaatttatcagctcattgacttcaatacattcaagtattcaatcacatcctaaattaatggatacaagggcacgtgtccagctgtcgttggttcaggagctgatggcctggtgctgatcgagacgctagctcagctgcaactgcaagaatgtaaaacaattaattagccaagctgactgtaatcactggttcagaaactgatcctgaagatctattcacatctcaaatactccctccgtcttgagtttttcttgcactgtttgactactcgtcttattaaaaaaattgaaattattatttactagcaaatatgtccgtgcgttgcaacgggtgaaaaaacgtaatgataatatacgtttttcatgcataaccatgtcgataacaatcagaaaattagaactacgaaactttattttctagcgcgttttcttttgtgcttttttctgacatttttccctcacgtggttttttaaaccgtttttattttctggcgcattttttccttttttaatatactgtagaaacttctctttttatagttagattagattagattagagataaagaagatatataaatggactaaaaaacgacgaatataaatttgacttttttcctccgcgcttttttccgtccttttaattttttttctcgtgcatttcttttacgaagggtttttttcaccactttcacatagtgtcaaacctttctagatataataggattcgattttttttaccgcatcacgtataattcctttttctttagaaacagacaattttttcgcccttttttatcgcgtcaacggagtcggaatcgttttgattttttccctttttttggatcggacagatttttttttgcccggtttatttcgcccgatcgattttttttaccgcgtcacatataattccttttactttggatttttttcgccctttttttaccgcgtcgacggagtcggattcgttttgattttttttctccatttactttggaattttttcgccctgttttcaccacgtcgacggagtcggattcgtttttatttttcccctttttggctttttttgtataggacagatttgtttttttttcgccccgtttttttatcggacttttatcttttttttcgcctggtttttttattttttttaccgcgtcacatataattcctttttctttatcggaaagttttttttcgcctttttttaccgcgtcgatggagtcagattcttttcagctttttccttttcttttatcggacaaatttttttttcgcccatttttttttctcctgtttttttcggatcggactatttttttcttttttcgcccggtcgatttttttaccacgatatatataattcctttttctttggaataggacagttttctttttatttttttaaactctttttaccgcgtcgatgtagtcggattcgtttcgatttttttcctttttttgctttcttttttgtcggacagatttgttttttttccacccggtttttttccgcccaggtttttttatcggacttttctttttttttttgctccacgatacatataattcatttttctttggaataggacagttttctttttattttttaaactctttttaccgtgtcgatgtagtcggattcgtttcggtatttttttccttttttttgtcggacatatttgttttttttccgcccggttttttttcgccaggtttttttatcggacttttctttttttttcgctcggtttttttctcccgttttttgacggacgacagaagcacctagagaattttcttttctccaatccaatacagatcggatctcttccagggaaatcagattttttttctccagggaatcggactcttttttttcgctttttttattcattaaacggtttgtctctcggacttttttttccctttttaagggatcgggtgttttttttgccagggacgggtgtttttttcgcccggtttttttttcactttttttttgatcggactttttttttcgtccggtttttttatcggacaaacttggttttttctgcccggttttttttcacccggtttttttgacggacgatggaagcacctcttattttttaagtagtagtagatttattttatgacttactttattatccaaagtattttaagcacaactttttattttttttatatttgcataaattttttaaataagacgagtggtcaaacaatgcaaataaaatctcaaaatcccttatattatgggacggagagagtgtatgtagtactacttaattagtcagataattcagagctgctgctcgaggtcgtcgttgatgtcggtcaggctgatctgcccggccggagagaggtcgtacgtcaccggtgaaacacctgatgacctgaatggtgatgctgctgctgtccagcttctccaacttccgcatccgtgtcatctcgacccatatttgctgtgtgcagcgcattgccaaaaaagaaaaaaaaaacagagagagaccaattgacagatatgtgcagcctgagctgatttgagttctaaactaacaatattcagttcaattcaggggcggatccaacgtgggtgagtcctccctacacccacaagacccatggataccccggagcacctcattcaattttttcgccataaatgataaactaaaggtctctaaatggctggaggttaaagaaactgtgtaattaagccccccccc

SEQ ID NO: 5271 - DNA, 54997 bp, Oryza sativa
gctctagtctccgaccttgtcggctgcggccatagccaccacccacgggacgcgtcgccgccactccgggtcagcacgcggcagcgctgtcgtgagcgcgagtgcgggaggaggcaccggcggcggcggtggcggcgacaacacgagctcggcggctccgcctctcccctctcccttccggcccttacacaccgccgcctcctctcatgtcacccatcacatccgtttcctccctcacctgctctcctctcctctcctctctccacttggcgaggccgccgccaccgcttcagcttcctccgccgctgccgccgctctggcgcccgcccgctgccgctccagcctcccatgctccccgcggccggccgaaggagagaggagaaaaagaaagaaagagagaagggaggaagaagaaagggagatagaggatcccacgcatatttttatttctaatgccacctaagcgccacatcaacgccacgtggaaaagaagaccgagtcaatactgccacgtaggcgccacgtcagcgaaaccgccctccaaaaccgcccagggagtcaaattgcaccggttttaagagtttaggggtcgagatatccggttttgtggtttagggtcatggattagatttcgatcacttttgagggtcatgaagtgaacttattccaattcggattcggcctctcgagcaaatgctattatgtgggccttgtgttgatatgggccggtatctcggcccattaagagcctgtaataaaagtacgaaatgttcttcaaaatgtactgctgtacttttgaatttagtttctctatatactcgtgtaagtcgatcgctctcgttttaatactgatttaattctcgtcccgtttcccctttttttttgcgacaaaaaaaagtctgaaatgtgccgatgtgcttgtgctccacgtgaacagaaccgtgtagtttattttatccttaagagtgtcacttttaaatgtgacaattaactctttgacattggacccacatatcatggaggggaggggccaccgcgcaccgctctcccccttgttgccgcgccgccaccggcctcctcctctccagccaaatcaaaaagagggaggtgaggggagagagtggggcagccgccgcccctggcctcctcccctccaaccagatttgggaaggaagggggagtggggcgctgccaccgacgctccatatgctgccttgctgccaccaacctcccctccttgactccaccagactgtcacccgcgaaagtcgccgccgccggatccaccacacgcttgactcgccgtcaccagatctgccacccgcttgattcgttgccgctggatccgtcggtgaagacggaggaggggggtgtgcaccagtgaggaaggaggaggggtgcacgccggtgggcatctgcagggaaggagaaggagaggggtagggaaggagtgcgtaccgatagggatggagagggagtaaagagttaggtgcggtggagagagctgatcttttaatatggcagtcctcttcaaccgccagtggaaatcgctaaagtgagccgccagcaaaaagatacactttcgttggccagcgaagatccatttttgctggcggtctatagccccattgtcgctggtagttttcacgtatggccgccggagaaaataataaggtgacgccataaaagatcgattttgtagtagcatacgctcctaaagtgttcgactttggcacacgtgaaaaaaatcattaaacatttgttttatacaaaacgccctctacttaattagaaaatatcattaaacaaaagagtgtgtttcattttggaccgtgtaatagacgactaaagttggaaatagaagttgtttaaacttacgaaataattgtatgataacacaatgattatattttctggcccaataagggtgcgattgtttcggctggggcggtggacggtttagtcgcacgcaaaacgagaaatgcgattagtatatgattaattaattattaatatataacttttttatgaataaatttgttggatttttttaacaacttctttatagaaagttttcgcacgaaatataccatttggcagtttgaaaagcgtgctaacagaaaacgaggagaatctaatcctataggctcaaaacgagagcctgtaagaaaaggatagaaccctacacgaaaagtgttcttcaaaatagcttttgaatttgattttttctatcgacgtgtaatgcgtcgcgtacgtctcaaaagtcagactgattttacttgtcgcaaaaagtaattcttatcatgtttcaaggctgtgtgtttagatctaaagtgaatccaaacttcagtccttttccatcacatcaatctgtcatacacacataactttttagtcacatcatctttaatttcaaccaaaatctaaactttgcaccgaaaacacagccttcctctctctctctctctttttctcttgtcgcgtcaaaaagaagtcagaaatgtgcagctgtgctcgtgctccgcgtgaacagaatcgtatggtaggttaatgtctccgtcagcatcatgggatccatgcgatgaaatcggaataaaaaatacgctgctagtaaaatcggttttattttattaggtatgtttaattcatttaaactacgttcagtgtttgggtgttacttttataataattggctgtagctctgatgagcaaaagccgagatgttttatttcattatctaaaaaaagtaaaatctgtttatttcacagagcaattcatcatcgcaaaacttgatcaaatttcagcaaaatatatatgaaatagcagtccaggttaacattttgaaatgccaaaggtaaataaaacgcttctaattaagcattcgatttgggcggcgcgttgcgctccatgaacgccttcatctccttgacgagctcgccggagtcggcgagctccgggaagacgtagaaggagtggatcgccgccgggtactccaccacctgcaccgccttcccattccgccgcagcatcccggcgtaccgccgctgccagtcctgcagcgtgtcgtaccctccgaccaccaccatcgccggcgggaactcctccgccagctcggcgttctcgccggtgacgtgcgccgccgggtggtcgcggtcggcgccctccggcaggaacgccctccagcaccagtccgcgcgcgccatgctcaccaccggccccacgccgtccagcctcagctccgcctccgtccgctcctcgccgccgaagaacggctgcagcaggacgacgccggcgaggcggacgcggcggctcgaggaggtggtggcggcggcccatcggtgcgcgacgtggtgggcgatgttgccgccggcgctgtcgccgacgaggaagcagcgggtgaggtcgacggggacggccgctactacgtcggcggggaggccgacggtggcgaggtggcggagcacgtccacgccgtcgtcgtaggcggcggggtagcggtgctcgggggcgaggcggtagttgacggagacgacgacggcgcggagctcgcggcagagccggcggcacaaggcgtcgtactggctggaggcggcggtgaggagcgcgaagccgccgccgtggaagtagacgacgacggggagcggcggggattccacggcgctgctgctcgcgggggagaacacgcgcgcccacagcccgcgggacgcgtcgacggtgacatcgccggagcggacgccgtgggcgtccgggcgcgccgcggcggcgctctggcggtctgcgagggagaagaggaagcggttgacggtgccgtcgccgcgctgcacgatgtcgacggcggtgacgagggcgaagagctggagccgcaccgtccacggcaacgccggcggctcgggccgccggagctcgtcgccggccgtttcttgctccttctcgtgccccatttcgccggtttctgtgcgagtcatttcagtgtccagaggacactatatataggtgaaccgattaattttttttggaaataaagggggtgtttagtaaagtttcggcgtgtctcatcaggtattatatacggtgtgccataaatgttcggcactaataaaaatactaattacagaatccgccggtaaaccatgagatgaatttattaagcctatttaatctgttattagtaaatatttactgtagcacaacattgtcaaatcatggaacaattaggcttaaaagattcatctcacaaattagtcacaatctatacaattagttattttttagtctatatctaatacctcatgtaggtgtttaaacgttcggtgggatttggggtgggatccacacaggaccaaaattatcccttgatttttacgtgaatattccaatttgatagtagaaatttgaaataccgtgtaactactcgtactacctagaatttaagtccccagcgccgaatttagcctaaattggcattcatgagtcatgaccatatcgtcgaaccaatgaactctagctgcgttcaaatttgacaaattggcacttgatacctctcataatctcatgtacaggtattttaatgcaattccatacgaccatatatagctccgttgcttctgtttgttttgagtataattagtacgtcttcaatttaagttttatagttgaacacattggtactacgtacgtacaacccaatagcttcaatgcgatatgattttgatccaatctcattattgtgtactgctcaactgatgagcacatagccacacgtttgtagcgatttttctttgtttgattgaaggatataattaattaatccagtagccttttgcaatgatgtgtatctgattatctgatacgtacatttgtggttgtggttaacgtctcaagtctctcgcaacgaccatgcttacgttgatggcgatgcatggctgcctattggggactcttgaggaatatcttcttattgttattgtatatatactcacatagttataaaaaagtttaaaaggatgtattaacatgtaatatatcactttataaatatataatttaaaatttaacttgtacatctcgcaactaaaaacaaactaacaaactatagttggatctttttttgctgagatgagctaaagcatcattttttttccttcacttttttcttcataaaaaacaaactaaagatgttactccgataatttccaacgagacatagtccccattggttggcaagagcttagcggcaaaaataattaatgaaatttttttatatatccattacttatcgacttaaaagctaaataaaaaaaaactacattgagaaaactttgaaattaaatttaaaattttatagcgataggtcaaatgatgaggccctcgtcactaagcagtgggctgcttggacgtgatgcattcttccacgaacgccctgatttcaccaacgagcttccggtgatcgtcggcgaggaactccgggaagaagtagaaggagtggatggcctccgggaactccaccacccgcgccgccttccccttccgccgcagcatggcggcgtaccgccggtcccagtcctgcagcgggtcgagccccccgacgaccaccatcgccggcgggaacgcctcgtgcagttcggcgtcgtcgtcgtcgtctccggtgacgacgtgcgccgccgggtggttccggtcggccccctccggcaggaacgccttccacgacaggtccgaccgccgcgtgttcagcaccggcgccacgccgtcgagcgcgcgctcggattccgtccgctcctcgccgctgaagcacggctgtatgagtatcacgccggcgaggtggacgacggggttatcggtcgtcgtcgtcgtcgtcgtcgccgtggccgtccatcgctgggccacgtggtgcgcgatgttgccgccggcgctgtctccgacgacgaagcaggtggagacgtcgaccgggccgacgtggtcggggaggccggtggcgccgaggtagcggaggacggcctccccgtcgtcgtacgcggcgggagcccggtgctcgggggcgaggcggtagtcgacggacacgacgacggcgcagagcgtgcggcagagcgcgtcgtaggcgcgggaggccgcggagaacagcgtgaagccgccgccgtggaagtagacgacgacggggcgcggcgacggcgacggcgagtagaaaacgcgcgcccagaggccgcgcgaagcgtcgacggtgatgtccgtcgagctgacgccggcggcgtccggccgcgggtcggccggcgcccggcggtcgaacagggagaagaggaaacggttgacgctgccgtctcggcgctgcgtcgcgtcaatggcggcctcgaaaacgcagagcctgagcctcaccggccacggcagtgccacccggcggcgccgcccgtgcgcgcccgccatttcttggctactccgacggttctaccttttcgtttgggagactgataaaaaaatgcaggttcagaaacaaaattcagagaagttcaggaattttatctttcagtgtgcagccacaaaattcagaggttcagaaagtgttgtttcagtgttcaagcagccacaaaattcagtggttcaggaagcgtgtctttcagtgagtgttcaggcaggcacaaaattcagagaagtttaggaattccttggtctgaaaacaactttcaaagtgatatgaaattgatattacgattgaggcctggatagaggtgacatggagttatggagatcgccaattctccgtacttgaagataacgcagacgctatctttgcggtctcacgccgtaggattgttgtgagaagggtgcaagcaacacatacgacatgtgactatatgaggtcgcaatttgtttgtacgcttatcagttatcacatctctcttccttttcgcaaggcaaattcaggtgattcttgacttaagtattgaaaacttaatcttttttgctgattcagtaagttcagtgcgtactatagcttagtttactgaacatttagaagcgtctgacatgggattttgaagtttaacaggagcaatatcctgaaaaatcccagatagtattaggctgattttgaattacactaggcctacactgtttgatgaaaaacagagtgtgagtaaggatgggtaagaacaaggattttctacgcctaaatgccatagcacccatcatttacatacgacttaaatacttatagaaaaaatttagtaacattaattacgatgatataaatctatacagaaacatgcaagattatatttgatctacaactagataaaccaaaataataatcgatatcgtacaacgcagataaaatttattatttttgtttttcatgtgtatatcgaatttagacttacatgtttgtagtatcttatattatcgtagtccatcttatcaaattttatgaaatttttatataactatttaaactacatgcatacacctgagtgtagaaaatacattcccgaatgcgtaactattggaggtatgtactcttacgagtcgtcgactcatacataatttctataccaaatgccttttttttattttttatttttgccaaacacggtacaaacatactaatttgtcaaaaaaaaaacaaactctaaaaatgaacctggacacacatatatccagattaatagttaggattggtttatttggacggagggggtaaacacttacatacgtacccacacttactccttactatctccaaggactgcaccggtgtaaacccactctctatccgtatgaacatctccaaagactgatccaacatctttcagtataaagcgggtatgacacctaccattaaaaaaagggtaaaaatagttagctgcaaatacgaacaccctagtaagtctatgacatgttggggtgagcatgttttcaacacatgaaacttagccaagtgatcttacactcgcttcgtatgaaatgccaaaatttcatcgcggtggcaatgcatgatcatacaactttcatcttaattcatacaactttcacatgacacttagctgtgacctcaatttttcatttttgaattaaaaaccgttcaaattcaaatttaaaactttcatatgaaaacttaaaaccttcatactcaaattatacagttttcaacataaaatcatacgaaacttttaactgcggccttaaactttcaccttgaatcacagaaatcccaattcaaaatctcaagtatatgaagtgtacgacgcgtgtacggtacgaagcagatcaaactctcgaatctcaattcaggcggtggcgcgcgccgccctgttgctctggacgaacaccttgatgtcctgcaagaccttgccggcgtcggcgagctccgggaagccgtagaagccatggaaggcgtcggggaactccgccacctccaccgccttccccttccgccgcagcacgtcgacgtaccgccgctgccagtcctgcagcgggtcgaaccctccgatcaccaccatcgccggcgggaacgcctccgccagctcggcgttctcgtcggtgacgtgcgccgccgggtggtcgcggtcggcgcccaccggcaggaacgccttccacgagaagtccgaccgccggaggttcaccaccggcgccacgccgtcgagcgccagctcggagggcgtcctctcctcgccgccgaagtacggctgcacggggatcatcccagcgaggcggaggttcttggccgtgggctgccacgtggccgcccagcggttggccacttggtgcacgatgttgccgccggcgctctccccggcgaggaagcagctggcgaggtcgacggggacgacgtcgccgtcgaggcccgggatgccgttcccgtcgaggaagcggagcgcgtccacgccgtcgtcgtaggcggcggggtagcggtgctcgggcgcgaggcggtagttgacggagacgacgacgacgccaacgtcgccgcacagcctgcggcacacgccgtcgaacggcgccaccgccggcgagaacagcgcgaacccgccgccgtggtagtacaccatcaccggcatcggcgccgccgcctgcgccgccgccgcgggcgcgaacacgcgcgcccagaggccgcgcgcggcgtcgatggtgaagtcgaaggagcggacggcgccggtggcggcgtccggggacgggtcggcgcggacgctcatcaggtgttcgacgaggacggagtagagcgcgcggttgaccgtcccgtcgcgccgctccaccgcgtcgatcgccgccgagagcccgatcagctggagcctcaggcccagcggcataggcggcggcggcggcgggcggcggttgctctcgccgccggcggccacgtccttgcccatcttccctcccattcgcgagcttgacgaacactctcgttttcttctctcgctttttcggtgtggatttgtgagtcgtgatcacgcaacgctgtttccgaaatgggcacgttatcgccgtcccgtaaatgaggagtacagtgattgtactaacgtgtcgctgtcggcgatgggacacgttccaaaaaaaaaatatttttccatccatttcacatgtatcaatacaaaaccaaaaccaaaagaaaatttaaaataatcatcgcttcatcaaatcctaatacagttatttatctactcctaatacatttattctttacttcctccgtcccattttcagtgtagccatgattttttacgtccaactttgatcgtccgtattatttaaattttcttaaaaaaaattgaaaacataagtcacgagtaaagtgctattcatattttatcatcttataactacaaaaatattaattataaaaatttttcaaataaaacggacgatcaaagttaagcgcgaaaacttatggttgcacttaaaatgggacagagggagtatttttcacaaatttcggtgtgctaacggtaaacgggaaagttgaagtttggaattgagaaaaaagaactgaggccttattttgggataaatgggagagaaaaaaaatttgtcctcaaacagtggaagtactagtaagaaattgctttagtagaaaattgaactcggaattgttagaggacagtggctgtttaggtgctgaacctgtccagtcagtcgtggctgcgcctgcgccgcaagttcatcagtcaattgcggcatctggaaatccatggcaagaacagagctaacactgccaaaagcccaaaacacaactagagcataaaacggtggggttcggaggatgaaactccgactcccctttgatctctctctttcagcttattttctgcagttttcttttgttcgtcgttcaggtgcccagacgcaaaattcataccgtttaaattaaagccgtctgatacggatgaaatgatctgttataagaaagaggaaatgcaattttcagtgttattccaagatgagagtagatcactgaacagaagagcagaggaatgaactcaaatatggattctgatttcagaaaccatgagatggctaaaaggattgtgggatgaggtcatatgagtccgtagagggtttaactgaagatctctgaatattaacaggtgagcaggtgactgacaagatgacgccgccggctgttcttttgcgctgtcggtggcgagcaatcattttgtgcattagtttaaagcttgcatgtgaatcattttcatctaatataatacttctccattattcttgggataagataatccactaataaattggtcgttgaggatcgtgcctgcgccgcaagttcatcagtcaattgcccgatcaactgagaaccgcatgatcactttcaaatagcaactttccttacggcaatttaatttgggtgcatctttttttcttactggaggagtcaaaacaaactgaatcaaagttcagtgcaaactttgctgaaaattgaacccaagttcagtgtataatacagagtagcatgatttactgagcatttagaagcatataacattttttttgtgaagtttaacaggagcattcatccagattccagcctgattcattatattgagagtgctcctattgattcattgcgaagagaattaacatttcccaagcagtggcactaggcagttatgaaaccatcaaacatcgtctgccatttacacttttggtcttgccatgatttgaaattttaattctttgaacactacagaccaacaaacgagaggatatcagctgctgctatgaatcaacgcttctctaaactgcttagcacttggtacccctgcaaaggagacgcagtatgcgataggagtggggtccggagtttaaactccgaacctctttggtctccttttttttttcctcaaggtaattttctacaattttttttcatcgttcatgtgatcagacgcaaattgaacctgttaaaattcgtctgatacgggtgaaatgatctaataaaagaatttaataaattgcaatttgcagttatttcaacaaacggaaggaaaaaaatatttgatgattccttttcaaatggatttcgctgctttgcacttggacaacacctccaatctgaacttctctgcaggatgattaaggtctaaggagtaaggaacaacgaaagggtggaaacgagccggctcggctcgcagtggctcgcaacaaacaaggcttggcttggctcgactcagttagggaaacaagtaaaacttgagcacggctcggctcggctcgtttcctggctagcattcatgttgaaacacctcttcatatatattttataattattaaaaaaaagcaagaacaatcatcaacatgtaaaatttaaataagtttcaattcttcaaaatcttaatggtaaatttcaagttgacaaataatatctccataaaaaaaataaaataatcgatataaacacatgatggtctaggctcgcgagccaaaagaagttgctcgcaagccagctcgggctcggctcatttcagcaatgagatgaaaagaaggcttggcttggctcgttttgcttacgagccgagctaagccaaccaaggttgagccaagcccgagctgagctcatgagcctaagctttttttttttccaccactagctaggagtggagcgaccggagcgagcgaggagacggagtttgtgatgggaaaggggttggagtttcaaactccgacagaccgacatcctttggtctccttcttttcagttaacgttctgaattttttttcttcgttcattattttgatcagacgcaaattaaacctgttcaaagccgtacgatctgttaaaacagaaaacctattttgcggtcattccagtcttccagatgaggctaagcaacgaactgccgaactgctaggagttcttattcggaaaaaaaaaaacgaactgcgaggagtgaggaatacaggaatgaactcaaatatcgattctgatttcaggaaccatgagaggactaaagcctaaaggtagggggaagagttcgcatgaatcagtagaggttttaactgaaaatctcagaacataatggccaaatatttaaagtgaaatgctgataagtaccaaaaactacaagtttcagaattttaatttcattgtcaatttgtaattggtagttggaattgaacctgcctcacaggagaagggaatactatgcacaatgatgctatacttttgtaatctttgtacttcattttagatagcgtagcacctaaaaaaatcctccttaatatttatgtgatttttttaaacttttaattcagctagccatcttttttagaggagttggggacctgtcccatcacacgataatttttgttttctcagatggctgagatgtaaataatttccattattaaaagaaattgaaccatccccaataactgaacagtactagacagttctgaaaccatcaaacactatctgtaatttacacttgtcttgtcatcatgccatggtttgaaattttgattccttaaatcctacagaccgacaagcgagagaaaatcatctgctgctacgaaacatgaatcaacacttcgctcttccagtttgatgattctttttcagatggattttcgcagctttgcacttggagtgggggtcggaggactccgatcccctttgatctctttttttttcaggccatgttctgcattttgttcgtcgttcatgtgagcagacgcaaatttatacctgttgaaagccgtctgatacgagcgaaatgatctgctaaagaaaacaatttgctgcatgaactgaagagcagaggaatgaactcaaatatggattttgatttcagaaaccatgagtgggctaaagtgtagggtggtgaggtcaaataaaccattagtgggttggactgaacatagtgaccaaatattatcggttgaaataccgattaatatcggaaattagaaatttcagggtcaatattactgttaatagtaattggtactgttgaacttattagcgtgctccccaataaaatccattagacccctccccctgatgaagcaaatcagattgattggtccacaacaaggaagaaattaaggcctgatttcactaatgatttcgactgcatggacttttgtggaagcacgtgtgtggcggcgttttgcagaaattaaccaatcaagcacttggctagcataattcctttgttgttttcttcctttaggtgatccatcttctttgtaacatttcttatctttcatgtaattcaccaactcttcttataatatatatattttggtaaccctccattgaagctagccttttgcagcctctatgttcatgaatgtacgtacagtaattaacctgtatgagcatcagcatcagatcatcattggaatcaaagcaatattcaagcaacaaaccccaagaaaagcgaagggaatgacaatattatagttgtgcctcagcccctctaagtctaaggtttgcctctcagccaccctaaaatttaaatattaaaatttaattttgaagttgattttagagtttgtcgtagtagtttatttttgacaccggctttcaaattgttaaacatgcatatataaaaaatgtattcacaaactatttttttctttaataaatagttgtaggtgaaatgatggtagtctcactatccctcttgatccaaacaactccagcttgcaaagacattttgccagataattggcatgcatgcagcctaccattttcaatattttaaatagcgggctaagatatttagcggttagcttctaaaactgctatagcgggctaaatggagctataccggctaaattgtacatgaaagcaaatagctagaaccctctcaaacagctatagctgaagaccctgaccatttctcatctctataaatagaagtgcaaatctcgagctcctaatcacaggcagctgcagctagctagctaagcttggataacagtgcaagggcgccggacggctacttggtccatggcgtctctgacgatcgtcgtcgccaccatcttcctgctcagcctcacctcggcgagcgtcgccgtccatggccggagcagcaggaggaggttcgtcaggagctacgacgagccgtgcatggagatgaggctgtacctccacgacatcctctacgactacagcaacagcacctccaactccacggcggcggcggccaccaagccgacggcgctggccaacgccgtgccgtcgaccggcggcaccttcttcggcgaggtggtggtgttcaacgacccggtgacggaggggagggcgctgccgccgtcgctggaggagacggcggtgagggcgcaggggctctacctctacaacagcaaggaggcgttcaacgcgtggctcgccttctccatcgtgttcaactccacggggcgccgcggcacgctcaacctcatgggcgccgacatcatcgccgagaagacgagggacatctccgtcgtgggcggcaccggcgacttcttcatgtcgcgcggcgtcgccaccctccgcaccgacgctttcgagggcttcacctacttcaggctgcagatggacatcaagctctacgagtgctacgtatgatgcatccatccatggtcgtataatatatactccatccgttctaaaatataagtatttttagctatgaacgcttatattttaagacggagggagtaccaaacactattcattattgtcgatgcaaatttcagtgaagatgtgacatctttggtcagggagacaaatgatcagccaattgacaaggtgatctgatgctcctagcttcgtctacctatagatttatttgttgctgctcccatcatcagatcagaccaccagctgtatgagtatatacacagtttgtatgctaaattctttctaaataaacatccttatgcaaatgtgttgataatgaatctatctattatatactaaaagtccattaaactccctataaacactctaaagccaccacgtgagactcctacaaacgctcctagattgccacgtgccgctttaataaatcttacaaattctaagaaaaaagcaaaacatctagccatcaattttcatttaatttggtggatccaccaccaactgcagccgccgccccaccaccttcaatccctgccaccaccaccaccaactgccggctgccgccgccacctcacgccgaccctccgccggtggcctccccaccagatccggccgcggcggcccggatctgggcggtcttcactgtctactgcgcggccctccaccgccgacgggagagggagacgaagatgacgaagccccgccgccgccgtccttgcggccgcgcggctttgccgatggccgcttgggcagcggcgatgcggcggaaggaggaggggggggggggagcaggcggcgccggcggtttccgcctcccgtgtcgcccatgagggaggacgacgcgggagcgggcgacgctttttgaactacgccttcttggtagcatgtttaatcaaaataaaaatcttcttttcattaaacaataaaagttgacaagaacattgtatataaaaaagagagatttaattagattgtttatgagataggattttgtaggattattgcaggaatgactccaattttctcctaaacagttaatttatgccattggaatgattttgaaaataacatattataatagtatatgtcttacgattgcaaattttgttcccatttctacttttagaatttcttatatacaaaacataattgtatctatgaaaataaaaattatagttaattatatacatattattatattatgtttttaaatctggtttggcgcaaattaaattgcatggggaaaaacttgctaatctcatcaatgatttttgactgctcagatttgctaatcttctagacaagctcacctccgggatccggctattatgccgggtttcaggagattaagcgattggctaggcgtagatcacttttcttcctttacgactttaagcactccctcttctatagatacatgtaacatcgatctcattaattcacccactctaatttcttataatattttaatagacatgcgaccagatctgtcagaatttttttttctggtaaccctcccttgaagcctttgcatacctccatactgctcataataacatgttacaataccctgcatcagcatcagaaattcagaatcaagcattcgagcaaacagtccaaagtaaagagaagggaataacaatataaatatataaatataatagagtagcctttgcttatatctcactccctcttgatccaaccaactataggatatgagatttgctccgatccaacaaaaagtactttgagttaccagtacctcacggtaccaaatcattttcgatcattggatctaacagtacccattctgtccagttagattcaacggtcgaaaatgatttgataccgtaaagcaccggtaccttgagatacttgttgttggaccagagcaaatctcagaacctacagcaacacattttgccaggcatgaacatgcatatattattccatttcacacctctataaatagagatgcaaaactcgagctccatcacagctgcagcaaattaagccagcaacacttgctaagtggagtggagtagctagcttctccagctagttagtgaattaagctcattaagctgagttaattgcactaacttactactccaagatagcaatggcgacttggtccaatccctccctgatcgtcgccgccatcttcctcgtcatcagcctcacctcggcgaccgtcgccaatggcggccgtagcggcggcggcaggaggctcgtcaggagctacgacgagccgtgcaagaagatgacgctctacttccacgacatcctctacgactacagcaacagcaccgccaactccacgtcggcggcggccgccaagccgacggcgctggccaccgccgtgtcgccgaacggcaccttcttcggcgaggtggtggtgttcgacgacccgatgacggaggggacgagggcgctgccgccgccgtcgtcgctgagggagacggcggcggcgcgcgcgcagggggtctacctctacgacagcaaggaggtgtacgacgcgtggttcgccttctccgtcgtgttcaactccacggggcgccgcggcacgctcaacctgatgggcgccgacctcatgtcggagaagacgagggacatctccgtcgtcggcggcaccggcgacttcttcatgtcccgcggcgtcgccacgctccgcaccgacgccgtcgagggattggtgtacttcaggctgcagatggacatcaagctctatgaatgctacatctgatcattacatgcatgttttttttaaaaaaacaaattgaatttccatttttttttaaaaaaaggtgaatttccatctcgatatatagttgcttgatttgcgtgacgagttatatgcaccgacgagtgtgcaaaatgtatcccaaacacagttttattttccccctaatttgtgtgtgtagaatgtatcaaactattatcgcacttttatttcattcaataaagactaaccacataatcgtgttttgcgcgactttttatcctgtttaagaacttttgtatgtggtctattagtttaccttagctcttaataaggttttgatataagttaatttatttataaagtatctattatcctagccaacaatagaacttccttcgtcccataatataagggaatttgggtggatgtgacacatcctagtgcctctcgagggtcggcgccgaccctaggtgccacatcggcgcaccagatagaccaagaggccagggtggcagcggggaagatgccagcattcgttgctgcttgcaaaaatagttccacaaaaaaaatgataagtattccacaggttgagtttttatatcttaacaaacatactgtttgagacaccagaatccaacagattaaattctggagctctgtctccctattaaccatctgcagggaagtcttattctaccagtcgtcacaaaagttgatacaagctcgaaagtcgagatcaaacaaaaaaaaaccaaccgatccgtagattcgctacataagtaactatagttgccatgaaagtaaaagaaacacaacagctgatgacatttgcactttgagatcggcaatatcaacatcatgacctccttcaaccaagccccatctatcaacctgggggaattaaacaccataagacaagagaaaagtaaatagccttaataaagatagacaatggttgcagaataacctggtgatcttcttcaagtctgatcaattcaattgcctgctcaattcccagcttccctctgaatattgcgagagggattaccagggaatgggctgctgctgccatagcatcaatagatgccaactcaaagtcggtggtattcttcaaaacagtttctacagcattagctaacccttcatcttgctttccaccaaaaaagcttgtgtatacaacaggcttgaagccaaactcagtgtttacccagtctagtatagggtcaattttctccttctgtctttctgcacacacacacacacacacaagaagcataagaaagacattgctggagggaaatgaagagaagacatcgctaaccaaaatgtatggagttatatgctcacaacactatgaattcatatggacgtcattgcatacacagtcaagaggaaacaacttacgataaactcctacagtcagctcattatcatcaggtgaacggcagaataccaaatcttggtggaatttcttcatcaaattatcaattattttttttcgtgtcaatggaactcgttccagtgcagtgcaagcaagcttcataagaggcattgtaaaaggccggattccatctgcttcctatgatgtcaagaaagtttggtatcagtatatgttacataagaaactagaaaatcaaatacataaagaagagacttgcaaagaagttaaattcaaatataattctgggctgtgtagatgagaagcacatcaagtaaacagaattcgttgtaacatctcctgtcacttgtaaaatagatgatgtttgattgcagcaattcagccatgaacatatgttacagttgaaggcagtaatcaatattaattggatgcacacccgtgatgctaatataaccaaagaacaaacaaaaccgattacttatgacatgacagatcttttaattcacatatgcaatatggaagtatagagcagctgactacttcctaagtttacccaccgcaacatataagtacagacatacatacattttaagggttgccatgtgaatatgtgatgcaaatgcaaaggcgcaattgccttatgaagtttgcttttacttagctgctggaatcaacctgataaatttgaatacagtccatcttgtggtagtactattatagggatgataagataagaaccagacaacaaaataactctaaatgctgcattcttcatatcctactgaaacaataactctataataccagtatccgaattaattaggagtcctggtcatcttctttgctacttcccccgtttcacaatgtaagactttctagcatttcccacattcatatagatgttaatgaatctaggtatgtatatgtgtctggattcattaacatctatatgagtatagacaatgctagaaagtcttacaatatgaaacggaaactattctttaaagctgaacaatatttgtagttattctagctgctctagccgcaacagggagaaagaaaagaaatgtaatgccaaaaccacctctaattgcacgatctaaatcatcgatgccactgccactgaatagtacactatggcaagcgagattcactgattgaatagatttaaattgcacaaaatccttccgcaactcattacagttctgggttaaactgaacttacaagattaagatcgacctaagcgctactagtcacccaatttccatttcgaatcatttgatttaccatcttccatccgaatttgagtaatcttacactacagttgagcagcataaccaatcgagggccaatcaaacagaagatggggatcatgacctggtactcccactcggcggcgatggccatggcgagcgtccgcgactgcagcttgagcggccgcttcgccggcgacttgagggtgcggtagtcgagcatcaccgaccacccgttgccgtcgtcggcgcgccgcacggtggcctcccggtagaaccgcttccccaccaccgaccccgtcatgaacgacatcggcatcgccaccgacgtctcgtcccgcgtcgttaccgccgccgccgccgccggcttcttcaggtagatctcatctccccctcccccgcccgcctcttccctccctcccggagaggaggacgcctccgccgccgtccccagcagccgccacctcccccccgccgccgccgcggatcgctgcaggaggaggcggcggcctgcgagtgtcgccgccatgactggtctcgctccgctgtttgggcctaagctgctgttctagtagaggcaaataagtctgtttcgtctccctcatctcttgctcctgtaaatcgtctccctcaactgcaaaaccggatatagcgccgctcccggaaggctttttttgtcttcggaaagtagtgaaaatcaactccttcgatcgttttggaagtggtttctactgacatgacagtttgaccacggtttaacttgctaagtcagtagatgggatccacgtgtcagcgactttcatgtcacctcatcttcttcatcatctctctctctttcgggctcattcggtttaaaggatttttataggattattgtaggaattcaaacattaggatttttttcctatatgcctcattccttccattcctataaaatcctatcaaatacctaaggattatagccttacaagcttattccatatgattcttattatcatgagataagacctcttagaaaaattcctaagaaataagatgcatctaacatcctaattctttaccttccctgtacctttgatttgggaatcctataaaccgaattagccttccatctgtccccccccccccctctctctatcatcaggctcaataactaggcccatccgcaaaatcggcccgatgtttgaggcccaactaggcccagagaaggttcgagacgcgtggagcagcttcgtctccgcggcgacctaaaatcgcgaggactacgaccaaatcacgcaccttcgctctcttttccattgcagagccctcacgcttccgcaaccaccaccgcgtccgtgatcccatccacctccatcgccgccgccgccgcgtatgcgccgccggtgaccgggatccatggcggagccggacctactcgcgcccttcgccgacctccccttcccccccggcgacgatttccccgacttcccgaccctcggggatgacgccttcgcgctggaggatttcgatctcgacgatctggacttcgacttcgatgtggatctcttcccgccggatgcgccgccgccggtgacgacgtcgtcgtcgtcctcggccgccggatcgccggaagcggggacgtcgtcggccggcgacgggggttccaagaacgaggagtccgcggattcgtcgtcgccgtcgaggagcgggagtgacggcggcggcggcaaggatgggaaggatgatgaggcgaagcggcgcgcgcggctggtgcgcaaccgggagagcgcgcaccagtcgcggcagaggaagaagcagtacgtggaggagctggaggggaaggtgaaggtgatgcaggccaccatcgccgacctcaccgccaggatctcctgcgtcacggccgagaacgccgccctcaagcagcaattgggtggcgccgccggtgctggtgccgccgcgccaccgccgccaatgcccatgtaccctgcggtttacccattgccgatgccatggatccacccagcctacgcaatgcgtggctcgcaggtgccgcttgtgccgataccccggctcaagacgcagcagcctgcgtccacaccggagccaccggccaagaaggcccggaagaccaagaaggttgcaggtgttagcctgcttggattgctgttcttgatgatggtctgcgggtgtttggttcctgcggtaaatcggatgtatggtgcagcgtacactggggaaggcgctgcgattgttccgtcacatcatgggagaattctggctgttgaagggccacaaaatagtgtctcaaatggtgttgatccgaaggtacctcagaatggaagcgaaacgctgccagctttgttatatttgccgaggaatgggaagcatgtgaagatcaatggaaatctggttattaagtccattgttgcgagtgagaaagcctcttcccgtttgtctaactatggcgagaagggttctggaaaccaaggaaaggaggagactagcttagcaatccctggctatgtagctccgttagaagctggagaagtcatggattctgctaaaggaatgaatgaactgatggctctggctcctggagatggaagcatatacagggaggatgatgggatgctgccgcagtggtttagtgaagcaatgtcaggtaagaatgctgcataatgtcgcacgcacaccctatttaatttaaatgaacaatactgtatatgccttgttggtgtttgtaggacaatgtggcacttagtgcgatgaattgtttggagtataacacttactatctgctagagctagcgatcttaatagatgaatgtagtgcttattcagtgctggaagtagaagatatctgcatatattacatgttcttttgccgtggtaaagttgtaaacttattgtgggtttagtatgccactcgggtggatgattaccaatataccatgatacataggaggcgatcatagacttttgggtcagtggttcattgtttagtcaccattgtgaaaagctcaatgttgtagttttttccgttgcggtatgctattggagaaggtaccattgcagcatatataattaactgctcaatgcatatattttgttgactggaatgttatgttctgaattactgctaattctgtatattttatgatatttaatttactattgtacagtatactatttatgtacattagtttgacgagtaaattgcattgccggtacacgaacttgtaaaatgctcgttttggtgcttgaatttgtctggtgcatgcggaggaaggcaaaaaggacacaacatggctaatcttattaatttaggggctcattaggaaattatgtaaacatatatctgagaaggtttgctattagacatacacctcttcaataaaaatagaatggatatagtgatcgtagaaaaagataaaaaaaacaaacaatgatataagggttagaaatatatgaaattcatcactttcatgatgaaggataaagtagagaccacatttataaatattgcatgtcttatgtacactcactacacgtatgcacgtcacatcctaatcaacattagcttcgtaaaattaacattgccaagctattttggtcctcattcgcacgaactagacaagtttgtgtatcgaaacaagcatttcacaagtttatgtactaaattgcacccacctaacaagtttgtgtactaccaatgcaatttactcttagtttgaccttataaacttcctctggacaaaaagtcactgatcgaatgaattgattatatccttagctgcctctgtatagttgaattcaaccttacatgtataaccatcacaagtaggtatttcctttgtttgctgaaattcttccattacacatgtcctgtttatggacatatggcacaattgaataatatactggtttttctaaattgtgtagtgaggtagtacttagatttgtgcatatgtgaagcacttattctcttttttgttgatggattagtagagtgatgaaacatttgtgccttgtgatgtagctttgaccctaaccttttaattcctcggctgatagttgttataagtagtttgatgacttggtccttcatttactgaagttaaccctgtctattgattattttccaggtcccatgttgaactccgggatgtgcactgaagtattccaatttgatttatctccaacaacagctgatgcaaatggcattgtgcctgtctactctgggtcagtgactaacacgtcacaaaattatactgaaaatcttccttctggccctgttcagaaggtgaagaacagaaggatttcgtactcagaagccatccctttacgaggttcgacatccaatgacacggatcatttcaaagcaccccccaagaaccatagtcagagccatgctggtcgtaagccagtttcgtccgttgtagtctctgtcctggctgatccaagggaagcgagcgatagggatggtgaggggaggatctcctcaaattctctgtcccgcatcttcgttgtcgttcttatagatagtgtaaagtatgtaacatactcttgcgtccttcctttcaaaagccatagccctcacttgtaatgtaagcaagttttacaacgtaatctgtaacagaacggatctccaaatgagctgactttattgtgcgatgttgatagacatatagagccttttttttttctttttactggattaccagtttattgacaggaatgagtgttggttccttgtctctgtgcttgtgtttccatgcctttgtgatgcatggtcttgtttggaatgctgggatgtcgaaatttctctgaggttttcgcgttccaaggaggcataattcattgttgcatcaccgcatggctctctggttcttgtagattgctggcagttggcagtaaaaggtagtttctttttattactacaacataacttgcatgtactccttttccttttgttatctgtctttcaggtaggtgatttgcgtattttcttgaaacaagtggcattgttttgttctcatgccatgctactcttagcaggatgtcagggatatcattttcatgtcgatgtttatgatcactaccaattgtttgtttcacagatatgtcctcaccacttacttttgttggcttgtttctgttagtttttgcttgtacatatcgtagacctgttttcattgataggaagcaaaacctacagaaaattgttgcttcataagaggatttaagcattcgcagttttttgtaatcccgagtctgaataaagcaaaggtaacctttctacttccatcatggactcacttgaggtgtggttagagagtcttgaccaatgcaacccaggccctagagctgctgacattatccatcctgtcaagtcctgaatacacttttatctgctccttttcatcagaggccaaaagcctggtttagttcccaactttttcttcaaacttccaacttttccatcatatcaaaactttcctacacacaaactttcaatttttccgtcacatcgttccaatttcaatcaaacttccaattttaacgggtactaaacacacgtattacctacatattttctgtggcttctccaaaaagaggatcatgttgcttgatctgtgtgtagcgtgtgttgctcacttgtgtgtgctattaaagacactaaacaaccattgcggatagcattaagttgtgatttgacattccaactgatgattcattggcgccctcgttacctactggactactgtggatccttcctgtgatcatgtcctggtctttctgatcatgcacacctacttgtcttttgtaccggcttactccgtatgaatggattggtgagatccgttgttgattgggattccatcacctaattcgtacgtagaccactttgatctcgtcagtgagacctttgttgattttgtcagtgtttttgctggatggaacactctgttgtcggtcagattattggaagaaatagcagcgctcctggttcaggctgctgtcatagtgctgcctgaacttgcaacatttaggcccggatgcaaatcgtctgctggaccgcacctgcagtaggtgtcactgacatgtgggtcccacctacttcgggcccacttgtaagtggcacctactgcatatgcagtacagcacaggatctccgcactcttaggccccctttgatttgcaagatagagaaaacataggattggagaaaacacgtgattttaaattttggtttgcgtgatagagaaaacataggattggagaaaacgcgtgatttaaaatggtacccttctctaatcatatagaaatgaaacccatgcaaaaataatagaaggccccttaaatgccataggaaaaatgaagaaaaataataaagaaaaggtgagacctctaggtaattttccgattaaaatgaaatgtacaaatataataatatggaaagttttcttccttttccaagtttaatgtaagaaaaaatattttcactagaatttgaattctatgaaaatcttttgccaatccttagtagcttcagatcaagcaagttttgtttaactataacatttttagaacggaaggcttatcaattgaatgatcaagtaataaataataaatttgggaagcacccgtggtgacttcatgacaaccaaggttcaaatcctgatacacgagtcagggtgtgcatttgcaagtatatgagtgaggtatgcgtgtttgatgatatacacgtgcgtatatgtctaccgtacaataacgataaaaaagagagtaaaggtctgttcactttgatgccaggttgctaaaaaaaatagctatatttagtttgctgtcaaattttaataaatataaaagaaaacctaccaaaattttggtaactatactaaaattttggcattaaggttttttttacatcaaagtgaacatgccctatataacaaaatccttccgcgaaattcagttgaacagcatcgccatctctgcacaaaattcagcgaatcagcgagagaaggaccagttccaactccgaagtttacgcggtccacaaagaccaagtgcaccgaaatatgtccccccatgctgacttcgtgctcttcttttagggcccgtttagttccctaaaattttttctcaaaaacatcacatcgaatctttggacacgtgtatgaagcattaaatatagataaatagaaaaactaattgcacagttatagagaaaatcgcgaggcaaatcttttaagcctaagtagtccgtgattagccataagtgctacagtaacccacatgtgctaatgacggcttaattagtctcaaaagattcgtctcgtggtttccaggcgagttctgaaattagttttttcattcgtgtccgaaaatcccttccgacatccggtcaaacgtttgatgttacacccaaaatttttcttttccccaactaaacacaccctaatacttcgtctgcatcttgagttcaaagctgcctctgtgttagccctttgcttagctactaatcatcccacatatttcaaaccatttaaaatccaaatagtcctaataacctactgcattaacgtcactactagagatagtgagagaagataacaaagtgtgttctcgctgacgaaccaaggtgatttcttctatatatattttgcgtttttatatgattttttaagttcgttgctaggttgcatctgctatttttttgcccccaatttttgatggttctaccaatatccgaagcctcaaaaccctatctttgtcactctcctgcttgattctgcctacgcatccgaatcttggccgctttgtaagctgaatgtcgcctgggttttctcgagcggagtaactgggtttggatctttgttcttcttttggtcgccattttggagttgaatctcttcaccgcgtcggacttcttccctctcctggggattctttgtgccgcaagttcttggtgagccattgtttgagcatttcagggttttctcgtctgcgccttcctttcccccccatttttggtgctcaatcctgcttgaggtttttattttttatttcccctctatttagggttcttgatttccatccaattgttgtttgctgctctttttgaagcgtttcggtgaacagattgttgtcattagcacttcgtttgtaggttcactaagtttcttttttttcttggtttcattttgcaagttgttgctaactgcaagaatctgtaacttaccagaatgcagtgtcactcatccacaaatggtgatgcttgtttgctgcggacaaccggaagaagcagaattcggccgatatagtaccaaattgcaataagaaaatggtactgcatgattctagttttgtatctctgatatctgatagcaacaatatttgatcatagttttcgtattcgcagcatccatattcacttaaaagttccaagggagcaccgtttccaccgcgaccgattcttgtcttcctcattgcaatatttggattctatgtatgctacatctcctttaaccagataacactagagaatagatctgaggagaacagtggagaagtgcaggcagaaattcattgccgaaagcctcatcttcctcatgaggagctgcgttatgtgcactttccgaaacctgagagttatagcaggtaattttcctctagagtagaattattatctcttagtacgcccctgttatggatgtgcattttctgattcatgttgcttcaaattttccttcttccataggggagagtgttcctgcaatctggttcgatcctttgtgcttgtatctatgcaacggtcgggaagtggatggtttgagactttgctgaacagccaccctaacatcagctcaaatggtgaaatatttaacagggtggatagaagagagaatatctcatctatcttacagacccttgacaaattgtataatttggattggttcaccagtgcagcaaagaatgagtgcacggctgcatttggattgaagtggatgctaaatcaggtatatttcagcttttcttggtccatgtgaatattagagggttagctctctgttacattgaacttcagaaatcgcacacctttctctgaaacttaccatagtccatagttaccgacagtgtgcactagtcctgttcttgggcaatccagttcatatagtctattcgcttgctaaaattttagaggtatagctagaatttttaacagaactacagggtaatatgcttgcaattcccaatgatatgttctggctgctctttgtagttgtacaacacaaactggtcagctatgattattgatgttggcatttgtgtgttcaatctcattcatcaagcattattgcatgggtaaaattatgcctacaacttacaaagttatgcatggctttgactgccatcattgtgttctccaggggtttatggaccatcatgatgatatagctagttatttaaacaagaagggtgtttccgtgatatttctcttcaggagaaatacattgcgcaggcttatctctgttttggctaatgattacgacagagatgcgaagcagctgaatggaacccacaaatcccatgtacactcaaaagaagaggttatatccatgcaacagtttatgtcctctccttactattttcagttcatatttttcacattgaacatggtttcatactaggtgcacttttgatgaaatatgaccatagtatatttgaatgcatatgggaaatattgtatcaatattggaggaatgactatattgcatttggaaggagccattttctctacatataaaagggctcctcctttccgaacttgtacccttatattaggttatattatagaatatagacaactactggacttctggtatagatattttggtgaaacttaaatcctacatatttccattccaagagaaatgtaacatcactatcaatcatgttggcaaggaagaaaaaaaaaatgaaatgcttatatattttttctgagcaggctgagatattagcgaaattcaagccggtgctggatgtgtcaaatctgattccaaacatcagaaatgccgagaaatacatcagagattgcttggaccacttcaacaccacacggcacatgatcctctactacgaggatattgtccgcaacagaaatgtactaaaacatattcaaatgctgtaacgaaggatcaatgataaccctcgctttgctaaaatatcatctctatgaatgcaggcattgttccaggtacaagaattcctcggagttccggtgagaaagctggtcagcaggcaggtgaaaattcacactagtcctcttccaggccttgtcaggaactgggatgatgtgagcaacaaactgaatgggacacagtatgctcattttcttgacggtgcagattatgtcaggtgatctacatggatgtgagcgacaggattttttttttcatatggggttttagttgccatatgattgattcttttggtacaaatgagttggtaaaagaaagggataacgataaatagatcaagatgagagaccttgtgatcaaattgtacatgctttccactactcattaccttcagagctcaaattgcaaatatatgctcaaaattgctgacagttttgtgatggttattttgtgatcaaaggaatacactattttggttcacttggaagaatccgaattaacgaaatttgtagttttgttcacctatcaccatcattatattactcggtctataagccgtagctcaactaataactttgcaaatgaaaggctaaaccacaggagacagcaacagaaatgcagtctcccagttccatttttcaggtttcaacactccagtagcagtgtacactttcgaaatcaaataatgtttcctcgcaaaaaagaaaaagaattgaataatgcatcatgcatgattgccttctagcctaaaagagggaataaaaagcggggaatgtacccaatagttagtacacgaaaaaatggtcgcagatcaacaacggattaataactcccgtaaattcttgtacaagagcaaaaacaccactcaaaatcatgtttacaagttgttacagctacaacatcgttaagggcaccagctaatggtgtgggcatcttgacagtggcagatcattgacgccttcgcttaatcctctcaagggcgccaagctgctcattctcctgggcaccagagctttcctcctccctgttctctgcagctctcttgccgagctctccaaacaccgcagcgggaacactcttctccgcaatttggacatcgtcttcctcctcgtcgctctcatcgggcagctcaatgtcctcattgttagtagcagcagcctgttgttgcctgctgctgctctcagcctgtgcctgcactccagcactgacaaagttcatcatccggttagcaggagcagtagcagtgcttggagctggtggagccgtggaaggtcctggcgctagttgcctttctaggttagccatctcatcctcaggaacaccggctcgtttcagagtgtcaactgcctcatcgaggttcagcctctggtccctctgcatcaagtactctgggagtatgaaatgagtctgcacatgaaacgaaatacatcattttagtttactaactcacaagatgatcattgataataccaaactgcctataaggttggcccttgtgacatacctgactgcggctagcagccacagtacgcttgatgcgaagcatctccctgaatgtatcttcgttaccatgctgaatctcaaattcattccatttattccaaaattcaggatgagagtttggatcagcatagttggatgcgtggacataaatggcacgggcacgatcaatttctccaaggtttctttcaagttctgcaaatttcatgcacattgtcatgacatctctgtctgggagtccagattcaattgcttgctgcagcacaaaggaataaagttagaatcatttacagttgtgcatacctaaagtgtgactcaactaaaatctagaacatactatacagaaaaatagtatctggatttttcataagtatatgggttgttacagcgagtgcagaatgagttctttgattcatacgaacagttagcaaaaaaaaaaaaaaaggcaaggctgttggaatgtaataaaacccacattaattttgtcttaaaacagcaaaatgtaaaactggatctcaaaacaagcacacgatataaccagtattagtaagaaccaagataacacactcacctcatatatctgtcttgttcttggaacaccaaatagctccgcagcccgtgcaatatatatttcgtacatactcatcttttcgctgttaggaacagcccttacagcttcgtcgtatacattcattgcacgtttcgcaaggccatagtcttcctccagcttagcatactgcaaatacaataccttcttttcttgtggaggagcctgatcaaacaaaacaaaatgtaagtactgaagcaatataggaaaaacatcattttcaaaacagcatcgatgcaggaaaaaggaacacgaaataatcaaccaaaggtttggaatctaaacaagcaagcaagcaaatgcaaaatatcgcatgacatgatatcagcaagcagagacaaggttcttaaaggaagaagaaagcaggcgcaacaagaatcgccctgaacttattcgtatgaagcaaggacaaaatttctgattgccagttatacccaaaaagcatttggtaacatgttaactaaaacaagtcccaactccaactagattaaacatgattcaacttagcacattttatccggtgaacaagaacagtacttagggacacatgcattcagtgtttcaaaagttaaatgtagatatattcataactactttcatgattttacaaaattattgtgttgtggagatggtgtctctatccaaactgttactcttttgtgactacagcagcatgccacaaatattgcttacatgcaagcattgcatacaactatatgtaagaaacatgtgggtgaaattctagttacctgtttgacagcttcatcgaacagttctcttgcccgctctaacttgcttctctgataccttcttacaaactttgtgaggtaggtcacccaaatgtctttaacatggggatatttaaaaattttcacaccacgctcatacactttaaacgcatcttcgaaatacttgttttcctgtggaaagaggaaatgtcatgatattagcatatgcacgataaaatagtttactcgaattttggaaatgcggagttaacaaataatcctacctcaagaagatatgcataattgagaactatttggggagtggcaattcgtaaatccaatattctctcataaactgcacgagttgattccaatgttccaagactttcctccaggtccacatagaagctccacagtttcagggatttatgtactttcaattggacaggttcatccccctcagcagcagctgcacaggacatattgcattactgttagaaaatatgaacagtaaaacacacaacaaaaaataagatggtaaatatatatatatatatatacctcgcctcttaacctcaacagagggttctgcagtagcttgcctcatcagctcaatagccttgtcaaaattactgtgcctcagctccatctctgcccactcacaccaaatactggctaagtggtcaactgccttgtagttcacctgtgttgcttttttaaagatctcttcagcactatctagacgattatgtttctcatacatctttgcgaatgccacccatagagtatgtggttttccagctgccttcatagggtctacggttttcacagcttcaacatatgtggctacttgccttgtaggatccttctcaaaaagtttcaccctcctgcaaacataatcgtattgttagccaattccatcaagtatgagaatggaaaacacaaaagggaactgccaacatactagtacattgctaggctgagaaatgaaaacacctgccactagattgatacattccacagtatacatgttttgaattaaaatttaccacagccacttactgcactaaagaatccaaaacttgtcgctggaaagaaatatgtactacaaaaacagtaaattgcaactacaataaaacagtaaaaatacatagaccgtatacttacaaccatatgtaatagtccagtggggtcttgcattagtcatttaatatatcacctaaaatatgagaagggaccaaactttttgcagtaacagtacatttggtttgctggtttaacatgaattatccaaatcaaaattgttctactaggctggaatattgagatgctactaagttaagatgttgatgttgaaaaaataaacagcatgtacatgaagtgaactaaagagcaaattagtgtttactattgtcaaaacacatgaaaaagaataaatcaatgtgatcaatcaagtgagtctcacctgtgccattcctccacattatgcggattctgtcgcagcaggacactgctgaggagctctggccggcgatccaacagccgctcaaaccttgccagcctcaaatcagtatcatcctcatcattcagccagcaatctgcgaggaatttcttcgacagcttgtccatcccattcttcctgcccgcttcctcttccccctcactccccgcaccctcctcctcggctgcctccagctttgccgcaagcatactctgctcgaattgtgtgtacgcctcaaacaccacgctgaattcctgcaccgtcatcaccgaagcaaccccctcttcgaagacatccctcgccttctcatacaaggttcttctgacgtagtaatcggccagggaggtccacagcttgccaacctcatcggtgaacttgcgaatgccgccccgcagtatagcgtccaccttgagccccgcaacctcatcggcatgcttggtgaggatttcgcagagctcaagccagagctggtgctgggtcttacccttgacggagcggaagccgtcatcgttgagcacggacgcgaggcggtcggcggcctcctgccagcggtttgcggagatgaggaaatcgatgaagtcctcagcgtgggaggggtcgtactggaggtatcgtcggaagacgcggagcgaggtctcgacggggcagcccgggagcgaggcgaggcggaggtagagcggccagatgcggtcgtgctgcgtgacggggagcgcgcgcagcgcgcggtcgaaggcgcggcgcgcgcgcgtgagcaggcgctggtcgagcagcgaggtgaggtagagcacccagacgcggggcatcttgtgcatggtggcgagggcgcgctcgaaggtgttgttaaggaaggcgtaggcgtggtggaaaatggggtgcgggcgcgcgtggtcaaggcgctcccggaggtaggcgtgccacagcttgtagctccccgggagcgccttgagcgcgcgctcgtagaatgacggcgcgcttggcgaacggcgcggcggcgcgggcgacgaggtagcgccaccaccccttgagcttgaacggctcgcgcaggatctcctcctcgtacgccaggtcgtcctccgtcgggtacatctccggcgagatccccagcgcctccgccgccgccgcagacgccgccgccacggccaccggaccccccgcaggcgacggcatctctcgctagggtttagtgctccgccgcggcgaggaggatttgcgccggagagagagagagagatcgagtcgagacggagaggctggcttggcttggcttggccaggccggcgcgtcgttttgttgggccgatgagttggaacccgagtaggcaagggcttgagtggttttggtgggccttcaaggattttgggctgaacttttttacggaggaattgggcttatttggtatttgagtaattgggccgagttttgtctgaaccagagcccaaccgtcagtcatctgcttctgctactctactcaaatatttctttccccgattttggtatacatttgtcaatttttttgttaaaaaaactacaattatactgtatttatatttgactacagatatatagatagtcctttttttcctgaacagaaactttaagttttttttcttagagaagaaactaaagataaaatattactatttaattatgtgattacgtgtaagagttatttgctgcaatgcaaatgttgaagtatagtcgtgctacggtttctttatatgccacagaccaggaaaaacttggcaagagaaaatagggtgcttttttggatagatgtcgaatcatgccgcacctgaattaggcagactgactagtgagtagtgactaccatcactgatacaacaaatcttggcgttggacattatccgtacgagttcttctcaacaatattctcccttggtccaaaaaaaccaatctagatggggatgaaataccacctagaacaacgaatctgatattccatccccacttaggttggattttttttagacggagggagtagctgaacaacgaaaatgttagcccctctatttttttgggataataggcagtgatcccagtatatgctgaataaaagaggggcaaaaaccacaatgttaatgagactagatcctaggtggttgcgcgcacgcgaaggaacggacgacctcctacgtgcagcgggagggagggaacggaaggaagaagaacggcttcgtttttaaaatagtagagatatcacgtacaaactgccagtataccactaaggcgacatctaaatacatttcagcatgctcccataaaacttcattgtcaaggacaagaggtttggtatacttcgaagttcgaaagaaaaccaacattgttacattaccggacttctgctaattaaggctcaatcttgcacaacaattcatctatggaaagaaaaaaggagccattagctcataactccagattatttaatcaataatatgaaaactatatgattgatgatgaccaacaaaatcaatggaaagcctctatcagattcagagagctcacatcattcgtgtgcttttcaccttgctcctgaccaatcctccattccaggagtctatcagaattcagagagctcacatcacttttgtgctttcaccttgctctcgaccaaacctccattccaggaggcgcacgtgcatctgcataatctgcatattgccgaaccaactgagcacgatttcaggtgagcttaacagaatctgttcttgaacaagaaaaccaagaaatgtcactgccaaacttgccaggtcctgatgaaggcaacagaggaggaaccctgccttttgcctgtccacacagagatacacacccaaggccgtgattagttgcatttttttttcaaacttctaacttttccatcccatcaaaactttcctacaatcataaacttctaacttttacgtcacatcgtttcaatttcaaccaaacttttaattttggtgtgaactaaacacatcccaaatcgtctctgcttcttgctctccacggagaagggagatcaccggcgcttccacgagttgctcctcgccggctcgccgctggtcgcctcggccgccgccgccgctgcagttcgcgagaagcacttggggtgctagtgtttgggcccaaatggaaacaactgcacgaggcccatgtagtccggcccaatatgtatagccagtataattcgatcctttatatttgtggtcggaggtggtgagattaagctgcaccgccattttagattagtacgttgtcagcatcggtagcgccttcacttttaatacttacccgtgtctccatcgcaaaatataataagttttgattagataagatacatcctaatattataaatctagatagatcgtttatccggattcgtggtattaggatatgttctatctaatcagaacttcttatatattttgggtagaggaagtacttgctctatccactccaaagaaaagcttagggcatgtttactttgataccattttcaaccttaccaaattttggtaaagttgtcaaaaaaaagtggctacatttagtttgctgctaaattttggtaactatacaagaaatcctatcaaaattttagcaatttgccaaaattttagtaactatgccaaaatttggtaagattttttttttcatcaaagtaaacaggcccttaattctagttatagaactggatgggtgcttatcaagttcatagatagaattaaattattattgtttttataataacaggtctactctctccatctcaaaataactcaatttgtgatagtaatgtaacataaactagattcattgttcgagtcacttggaaggagaaagtatagctcaggaacggaagaaattcttggcgtgcggcagaggaaagctgtcattgccttcgtcgatgatgtgtgctgctaatgtccattgcacaacactgattaatttatcagctcattgacttcaatacattcaagtattcaatcacatcctaaattaatggatacaagggcacgtgtccagctgtcgttggttcaggagctgatggcctggtgctgatcgagacgctagctcagctgcaactgcaagaatgtaaaacaattaattagccaagctgactgtaatcactggttcagaaactgatcctgaagatctattcacatctcaaatactccctccgtcttgagtttttcttgcactgtttgactactcgtcttattaaaaaaattgaaattattatttactagcaaatatgtccgtgcgttgcaacgggtgaaaaaacgtaatgataatatacgtttttcatgcataaccatgtcgataacaatcagaaaattagaactacgaaactttattttctagcgcgttttcttttgtgcttttttctgacatttttccctcacgtggttttttaaaccgtttttattttctggcgcattttttccttttttaatatactgtagaaacttctctttttatagttagattagattagattagagataaagaagatatataaatggactaaaaaacgacgaatataaatttgacttttttcctccgcgcttttttccgtccttttaattttttttctcgtgcatttcttttacgaagggtttttttcaccactttcacatagtgtcaaacctttctagatataataggattcgattttttttaccgcatcacgtataattcctttttctttagaaacagacaattttttcgcccttttttatcgcgtcaacgaagtcggaatcgttttgattttttccctttttttggatcggccagatttttttttgcccggtttatttcgcccgatcgattttttttaccgcgtcacatataattccttttactttggatttttttcgccctttttttaccgcgtcgacggagtcggattcgttttgattttttttctccatttactttggaattttttcgccctgttttcaccacgtcgacggagtcggattcgtttttatttttcccctttttggctttttttgtataggacagatttgtttttttttcgccccgtttttttatcggacttttatcttttttttcgcctggtttttttattttttttaccgcgtcacatataattcctttttctttatcggaaagttttttttcgcctttttttaccgcgtcgatggagtcagattcttttcagctttttccttttcttttatcggacaaatttttttttcgcccatttttttttctcctgtttttttcggatcggactatttttttcttttttcgcccggtcgatttttttaccacgatatatataattcctttttctttggaataggacagttttctttttatttttttaaactctttttaccgcgtcgatgtagtcggattcgtttcgatttttttcctttttttgctttcttttttgtcggacatatttgttttttttccgcccggttttttttcgccaggtttttttatcggacttttctttttttttcgctcggtttttttctcccgttttttgacggacgacagaagcacctagagaattttcttttctccaatccaatacagatcggatctcttccagggaaatcagattttttttctccagggaatcggactcttttttttcgctttttttattcattaaacggtttgtctctcggacttttttttccctttttaagggatcgggtgttttttttgccagggacgggtgtttttttcgcccggtttttttttcactttttttttgatcggactttttttttcgtccggtttttttatcggacaaacttggttttttctgcccggttttttttcacccggtttttttgacggacgatggaagcacctcttattttttaagtagtagtagatttattttatgacttactttattatccaaagtattttaagcacaactttttattttttttatatttgcataaattttttaaataagacgagtggtcaaacaatgcaaataaaatctcaaaatcccttatattatgggacggagagagtgtatgtagtactacttaattagtcagataattcagagctgctgctcgaggtcgtcgttgatgtcggtcaggctgatctgcccggccggagagaggtcgtacgtcaccggtgaaacacctgatgacctgaatggtgatgctgctgctgtccagcttctccaacttccgcatccgtgtcatctcgacccatatttgctgtgtgcagcgcattgccaaaaaagaaaaaaaaaacagagagagaccaattgacagatatgtgcagcctgagctgatttgagttctaaactaacaatattcagttcaattcaggggcggatccaacgtgggtgagtcctccctacacccacaagacccatggataccccggagcacctcattcaattttttcgccataaatgataaactaaaggtctctaaatggctggaggttaaagaaactgtgtaattaagcccccccccccccccccccccgcccctggttcaattcaatctcttattcgaaaaaatattcagttcaatcagatggttttattttgtgagttgtgctagctacctcattgcggttgatctcctcgagtcgtcaatagtgagtactcgtgacggtttagtactgatcaatggtcgaagacttgaattttacaacttaatttaagttaattttagaggtttattgttgtactccatttttagtattgtcttttaaatcacgaataattaatacatgagtaaaaattgtaccgtgatttttttcttcatttatatttctatagcttattagctatagctgaaccaatcagagcataagacacactccctccatttactatcgatgtattaatcaaatgatataaattaattagttactccctccatttcattttaggttataagacgttttggtcaaagtcaaactactctaagtttgactaattttttttaaaagtaataatatgtttaacccaagaaaaatatattatgaaagtttattcaattatagatttaatgaaactatgctgatattataaatattactatttgtttatacagaattagtcaaactcaaaatagtttaactttgaacaaagtcaaaacgtctaacctgaaactgagggagtagttttctagaaaatgggataaacccagcctcttcatccaatcggatgtagaatttttttgagaattaatatcatttttatggaaaatcgcaaaagtagtggtcaaccggggaaaatcgcgaaagtaggtccctgtcgaacgggtgcagttcgatagggcgcctatcgaacggccagagcgcgactggcgaggagatcggaaggctgccgttcgacaggtcctgtcgaacagcccctgttcgacaggcagggctgtcgaactgcccctgttcgacaggatatccgtcgaactggcgcagttcgacagggtcgtgttctccatttatttgtaataataattttttttaataatatgtaatttattttagtgtgtaagaaaggaaaatatttttgtaatgttatatgtatatgatttagggttttgataatgtttggtcagaaattgtagtatttatttgttggttaaaatatttgaattatttagtttcattatttttatatttgaatgataatttgtcatgattcattcgaagggtatgctactgagtaattatccgaagaagtttatgaaatagtactgatagtactaagttaatcgtaaagtgtttctcaaatagtacggacagaacataaatgactaaaagtttaatacaaatatataagtcaaggacgatcagtgcccttcgcacgcttgctaggtcctcccttcttcctacgcctaatctgctcagtaggatatgtcaaattatcaggggggtgcctatctctagctgcctgctgtggtgtcacgtctggcccctgaccggcctccgtctcctgcgtcggctgtgtgacctgaggtgctgcgtgccagtaatccatccctacttctccctggggaggatcagtggaaaagaagtcctcaatgaatgctgtgcgaggggagtaagcaggcattccgtgatgcgtcgacgccgaaccgtactcatcgtctgtttgcacaagagggagaaaccaaaaaatatggcgtagttagtaacgatacatataattagaaactaaagcgtgttattgtttaaaatgacttacatgtgtgcggtgtgtggccctgctctggcgcacgcggagtgatatgaagtccccatgctgatgtgttcaacacgttgtcccccgttggcatgtaagggaagtgtgccgacccagatactccctgcgtggggtgaacataaggcagagtttgacccctcactggccacacggcatttatgacaaatttatcgtgcactggatctaccccaaacatattatacaaccaccctaacacgtcgttcaaacccatatgctccggtgcattcagactagtatcatggaaggcatatacagtcaaatccaccccgctatcacatatttgtataggagcatcgccataatacagacgaatgggcatatcacctaacatcctgataaaacatgacaaatagtctcacgtttaatcatttaatcattcgataattaccctattacaacttatactacattgccgtgtactaatttacaactattagtaacaaacaactagtttaataatccaaataaaatataacacctttgtacctattttaacacacaacatatcaataatatgtactaactaagaactaatttaaccatacaattacttaaatacctctaccaacatttagcaataacaaatatgtgctaaccatacatactaacatcgaacaatgcgaaacaattaacaactcttaaaccaattttttattaaactttcatatgcattgtacttagggattactaatgtataccttaacttcactgctggagggcgtcgccaaccctttcctcccggccggcgcctcctcggcctcctctccggcctgctatcccctcccctcgctccctccggcgctcacggcgacgatgtggcgactctcggcggcggctggcgatgtggtcctcaaacaaatcgaacaagcatcgcggcctgggtggacggggctttaaaccggcctgtcgaatgcccattgttcgacagggtcggtggagggccctgtcgaacgcccccggttcgacaggcctcgcggcgccgggtgatgggccctgtcgaactccctccgttcgacaggtgagcttgtcgaactccagccgttcgatagggatttgtcgactgcccgtcgttcgataggtgccctatcgaactgcacccgttcgacagggagctactttcgcaattttccccggttggccactacttttgcgattttccataaaaataatattaattctcaaaaaaattctcggatgtacaccaccaaagataattagttagttattgatactttcatgcaaacaaattaaacctaccaaatattatatagctctaccttgtcctctctcctactagttcgtaaaatcgtactaccgttctggggtcttgagaaaagaccaccatagaagtttctcattttgaatgggatagatgattttaaaggtgcaaattgcacagtgaggactgattcatcaacctaccacctacctgtgtcacatatttatcattttctcattcaaaccactcatactattttgtcatgcgaaatcccagaataaagtttacatcttaggtggtgtttggtcggagggactaaagtggggctaaactttagtccctctcacagaaacataaggggctaaactttagtccctccaaccaaacaccaccttattcctgtcttatgctaatttctggattttagtgagattgaagatgtaccgctaatttctgtcttatactccatccgttcccgattgtttgatgttttaccccctaacatttatgcatgaataattaacgttttgacgtattgcttgtataagtgccactacttaattctatgcttaaaatatttcctgtgtggcttactccctccgtaaaaaaagaaaacataacttaaaaatgaaatgtgacacagtcaactacaacgaatctgacacatcatatcctaggttatcttttttttttaaaaaaatggagggagtacttggttggtgccatttgtgctaattccctgattaaaatgaccacatacaaccaataccaataataatttaggataatttattaattttcacctttagctgatgtagctcaccaattatagaacgatcaacatattggacagaggaagtaaaacatatattcggaagcacattcatagggatataaatatgttgttgcgtgtgtgcgtataagtctaccatgtaatcgaaaaaaataaagaaatactgtattacgtgtgtagtgcatgtgagtttacggtgtaataaaaaaattccatcttaaaaaaagaaaaaaaatgcaaaacgctgcataataaaactagtactactagtactccataaactaaagatgtggacatcacggagaggtgggtcccacggttcaatcagggaggccaacacgcacatggccacatgggccatggccgctggtgttagctcacggcactcgtctgcgcgcaacacgtgtccccttcccccccgcctatctgttgcttggcggtctccatgtgggccccgcgcccttcctttccgtgtctcggataagtgggcccacgtcactcgtcccaccaccacctctaacccacacagggccccacgcagactagacaaaaccatagttattgagaccggactggtaatcgaaccggtgaggctgtcggttcaatggttcactggttcaaccggttggatcggtggtctaatccggttcaataaatactaaatacattgatcattcagtgtaaacacaaagagccaagtagtctggtggtggaggagtttaactaactcccacgtggtcgtgggttcgaatcccacccacgccaaccaccaccaggccggttcaaagcggttttataccccggtttaatagcggtttttaagcaaaaccgggcggtctaaccggtttatagccggatcgattgcatgccggtcttttacctggaccggaccggtggggctctggttctggttttttccggtccgaccgccggtccggtccggtcttaataactgtggacaaaacacaaacaagcaagcactgtagaagctaatatcttgggccggccaactgctcaaaagaaaagaaaaagaaaaaaaaaagaaaaactgatattggtagtcaaagtttattgttcatgctgtcttattcataattggtgctattacgagagaagatttgcaagtgttcgcccatttgcacggatgctttggacagtttgtctgacgaaaaacagctgctgcagctttgcctgttttgcgagcagagctttctatggagtattatccatcacattcatatatactcctctgctactccctccgtcccaaaaaaagacaaaccctggtttccgtgtccaatgtttgaccattcgtcttatttaaaaaaattatgaaaaaaattaaaaagataagtcgcatataaagtattcatcatgttttatcatctaacaacaataaaaatactaattataaaaaaatttcatataagacggacagttaaacgttggcacgtaaacccgtggtttgccttttttttttgggacggagggagtatgctgcatttctctctgcattatgtgtgtgttccctgatttccatgtcggaaatgccagtgacacttgcattcatctgccatcggtttttggaacaaccattgctgtctgtctgaaaaatgcagatgcagagcttatcctgaacgaaacgacgcagcagtttttgggtttccagccgctgtttcatcaagtggccgagcaagcagaagcagcggtttgtgaatgaaatccacgcgccactcatattcatggctgatcctgaactgaattcaatgtgtcccacagcttagcactagcttatcatgcaccgatcgatccagtcagtggcggagccaacgatgtcatcaaacccaaacgataatatgtatttcttacttattagtaatggcggagccacgttcaactcaagtggtgcacacgaatcccagatccaaaatttcttacttaagaacactaaaatgtgcagtgctacattgattttttttctaggcttttaatgatgagaaaattccctatctagcatcagaaaaaaaattgctcttccctctatagcacccaactttcaaaagttccctatctatgcaccatcaaaatttttgttccctatctaacacttccgttactcccgttagcctccaccgtcaaaacaatcatggacccaccctcaggaatttttttcgtcgctctttctctaggacagagcgcgagcgcgacctgctttccccaacccgcgtgcgcctctcagcaaaaccctagatcgccgtcgcccccatggatggagaccccccgggcggcgaggacggcgaatcagccgtgcagcgaggatggcgaccccctgggcggccattggcgccggcgggctcccccggacggccagcgccggcggcacgggaggccatccctaggcctgctcggccggctaatcccaggcgggcgcaggacaggcagctcatggccacggcggcacatgcaggcagctcccaggcgggcacggacagcaaccccctagatggtgcgggcaaacagtccggcatggcgatgaacacaacctttttcttgcttttgccctggatgtgaatttggatgatttggatggttatggttatctatggatgtgaatttggatgctctctaaaatttatttggttcattattgtgttgcaaacatgctgttgttgcagacatgctgtcaaatttctctaaaaattttagatatagaaaggttaaaaaactgtgaacaaaatgaaaaaaagacgtacagacatctggacactaaatgaaaaaaaataaagaacaaaaaaaaattgtgaacagagagagggaaaaaatgtataaaatacagaagggcaaaaccgtctttcctcatgcaacttaacaccgtcaccctcaaaactaacggaagtgttagatggggaacaaaaattttgatggtgcatagatagggaacttttgaagtttgggtgctatagagggaagagcaatttttcttgatgctagatagggaattttctctttaatgatagtgcaccacctctgtttggacgctagcttcgcccctgctcattagtaacattttacaagtattttcgataattaacaatggtgatctcactaagatatctgaactgtaaaaggctttagttagttagttttagttagtaatctgttcttgtcccactacaggcgctgaagcttttggttaccatccagactttgagtggactaagtaggtcggatgcgattaacaatttactaattggatatctgaagagagcgatcatgagtgagcatatcgcggtgcagtgcagtttgcatctttgttcaggtcgctgtccatcgattttaatttcgcacaagtcaaacccttttaaaacaatgcagcatagtgatcgccgaaagagagccatgctgcctttactgccaagttaattatgatatattattagcactagagttcatgccagttgacttgaggttgtcagattttaatcgatttggtgctgatttgtggcacggatcatcgcagcaagtcaaagcaaaaatcgaaaagtaagtttaaaaaattttcaaagttcagtagagtaatgggtgggctaggatcacaggggacacataatcgcgtgggaaaatccttgaatattcggcgcgaaataagggatccatcgatcagtagacgcatgatcttcatgagcttgctttgaagcaactggatgctgcccaaaagcaacatttccggtgcatgatctccagttaatttgatgcatgggtttcttgatctgacagtgtttttttcataaaaaaattggaagagaactggatctgatgatatgtgtccctatcttgagatgacgtgtatgtgtctgtcaatttcttgaaacaattttttttttgccttttttacattcacagaggcattgacttggtgtgtacaattagctgcatctgaaaagagggggaagaaatgtgtgaaaatctttttttttatctacctgatagttacacttgcgttgctgtctgaattgataattgcctaaaagtcaggtcatgtgtgctgaaactgttagatggatctccctccccttgagcccaacggctcaagggggccttgacccgcgccctgatcgggggcgcccagcccaatggctggtgggcccccgtcacactgtgccatataaagaggggtggaggacgggacggcataacgacacaaggaacgaggttcgtcgccgccgccgccactccacccaaaaaccctaaccgatcgagggggcgcagccagtgacgggaagactccaccgccgcgccacgacctcgccgggatcccctacgaccaccactgccgcgcagcaccgtcgccgtcacgaccgccatcgccgccgccgcccacgtcaagcagagcgacgacaacgacgatggctgggacttcctcttcatccaacgcgtcaaccggtcacatccctaaaccctttcccttattctctattgttgttcaatcatccatcgcaaatagaaccacccgactagatctaaacctaggtgatccaatagacaacactaacaatggtatcagagcaatcctagcgtttagattggttggggaaagaaatccaaaagaaaggcaaagaaaagcaaacgatccaacggatcgaaaagatcgaaaccctaaccctaatcttacctcgtcgccggccgtcgttgacgccggccacggagggggagaggggcaaagaggcaccgccgaggagccactcgacagccgcgtgcgcacccgcgggtgcacgcgcgcgccggcgagggggcccgcggcggcgccaccatctccgtcgtcgccggtctctcactcttcactcgcgtggaggggtgagacggtggggggggagaagagaaaagaatagagggcgtggcggcgcgagggcgtcggccatggcgcggcggcgcgaaggctgccggcgtcggcgacgccgctcggcacggcgcacgcccgcaagagaaaggagagggcgccgcggcacaaccgctcgacggcggcgcactcacccttgagtgagtgcgcgcatcggcgaaggggagtgcgatggcgccgccgtgtcgccatgccgccgccggcgctgtgctagggtttcggcgacggcgacgccgctccgtgcaaccgcaagagaaagaagagaagaggagctagggtttcggcgccggcggccgggggcggttttgtttgcccgatccgcccgcgcgaccgtccgatcgaaaccctagcgatcggacggccgacggcggccggaccgaaatcggcccatgtgggagcgcacggcgagccactttcccggcccaggcccaggttgcggcctggggaaaggggagggggcgcccgcccgcgcgcaaggcggccgtgggccaactggcaaaggccgaaaaagttcattttaggtccctcggggccgaatcaaaagaaaggaagtttaataaaagtccctcggccgaaggaagcattttcaatatgtttaatgattgtgtttatttctaagcaatttgaaccaacgtgaaaattgtttagagaatagataaatgtgagaaatgcttctgaacatgtattttgtattttttcatgcaaattacaatagaattttgaattgtcttacatgttttatctctgtttaaatttgaaccaacgggagaattttacagagcgtaaacaacagagttttgttacaatttatatgaattgtatatagatcttccgctgcaaatagatgaaattgatgaaaattagtgtttctaaaattaaatttcgaaccaacgggagattttaattttaggaacattaattatgtgctatgatgttgtaatttttctgaccaacgttgataattgcaatgttatagttatggctttatgtgttatgtctattttctgcccaacggtgatgtagacttaatacataataattttaatgttaattttgttctcacaatacatgattatcttaggtggctactccttgatgggttacattaaagatattccgaccctgaaaggagataactacgaagaatggaaaagagaactcgaccttgcttttatcttgggagaggtggactgggtgttgactaccccatgtcctatagaacctgctgaaattttcagaggtgaaaaagagtcagatgctgaatggcaaaagagagagagggacaatgcttccctcatcatgtcgtatgacattgagcatgcgaaatggtcttcagccaacaagaattgtttggctgcggtaaagaacacgattgagccaaccatattgggctcaatcccagagtatgacactgtctctaagtacctcgaaagtataaagagccagtttagtggttcttcaaagttttatacgacacagctgataaagcagcttgttacagagaggtaccatggaggtggtgtaaaataccacattcttaggatgagcaatatggcttccaaattgaagcaaaaagatttgggcatctcagatgactttctggtccatctggttttgtcctcattgccaaagaactttgacaaccttgttgtcaactacaaaataagtacagagaattggaatattgaagagctcatctctaattgtgtgcaagaggaggaaagacacaaagagaccaatggtgactccattaaccttgtcaaagataacaaggaaaagagccacaggtcaccctcctcaaaagaaaaacagcctcagcatctgcctcagaaacaacagtttacagttgagacaagatcagtgtctacactgcaagaagacaagacattccaagaaagatcatcttgacttcctgacagtgatcatggcaaagaaaggtgagaacattattacatttgtaaagaatctcattatgattggttattctagatccacatggtggattgattctggagcaactattcatgtgtgtaattgtttaaagggattccgttcaatgaggactacgcaaagaagtgaaagatccattagagttgccaatggagttgaagcaaaagttgaggctgttggagatcttcgcctagaactcgcgaatggcttcacacttttacttccagacgtttttatgtcccttctttgcaaagaaacttgataataagtgtatccaaattggattttgatagatatgattgccattttggaaatggcaaatgtgaactatggtataataatgaatgtattggtcttgtgttgcaagatcagctttatttctttctgagaatgtgaatgttgtgtcctcgttgacaaaagaaaagaaagcgaacttctgatgtctcatcgaaattatggcactgttgtttatgccatatttcgagggggagaattgagagactggttaagaatgtagttcttcctccattggagttctcagttttagaacgatgcatacaatgtatagaatgcatcggtgcccaaaacaccatatgagctatggatcctccgtgtgtgggggagtcctgcaaaggataaagtatttaacccaaaacagtaagctgccattttattggctaattctgaaagatcaaagggtcatcgtttctactgtccaaacagttatacaaagtttgtagaaacaagacacgtcgtcttcttggaagacgaaatgattagggggagctcggtaattcgagaaattgatcttgaggagaggcgggtgtctgtacccgctccgtcgactcaggaacctttctaatgttgtgccagcaatgcatgacgttgcggtaccaacacctgttgttatctctcctgtggcaacaatgaatgaaagtgaagaacctattctacaggattcaacagaaattattgccacatcagaggaggagctgcaccagcctcaaacatataatgtgccagaataggaggcccctagaaggcctgaaagagtcgcatatcgaggatgatcccatctcatatgaagaggccatgagaagccatgaaagatgaaatgaaatcaatgaaattaaatgatgtctgggatttagaagaaattcctaaaggagccaaaacagtaggctgtaaatgggtctacaaaaccaaatatgactccagagggaatatagaaaagtttaaagtgcgacttgtggcaaaaaggcttcacgcaacaagaagggattgattacaatgagacattttctccagtctcttgtaaagattccttcaggattataatggcactagtggcacattatgatttggaattacatcagatggatgtaaaaacagaatttctaaatggtgatttggaggaaaaagtatacatggcgcaaccgaaaggttttgtcatgaaaggaaacgaaaatatgggatgccgtataaagagatccatttatgggttaaagaaaagcttcgagacaatgctacttgaagtttgatggaacaataaagaaatttgggttttcaagagaatgtagaggacaactgtattgattcaaagttaagaatgggagactcattttcctaattctgtatgtagatgacgttctactggctagtagtgatgtcaatctactgcaggaaataaagaaattcttgtcctcaaactttgacatgaaagacctcggtgaggcttcatatgttttgggcatagagattcaccgaaatagaacaaagtatgcattgggattttctcaaaaggcatatatatagaaaaggtgttgaagaaattcaatatgtacagatgcagtgctacacctgctcctatagtcaaaggcgaaaagtatggggcatcgcaatgtcccagaaatcagtatgagctcaataaaatgaaaacaaagccatatgcgtcagctgtaggaagcctacagtacgcgcaagtgtgcacacgacctgacttggcatttgttaccgggttatttggcagatttcaaagtaatccaggcctagagcactggaaattggtatagaaagtcttgcgtgattgcaaggaacaaaaggcctcatcatgtcttacagaaaagcagaatcgctccagatagtggggtattcggattctgactttgcaaaagataatacaaagttaacatcgggatacatgtttaccctggcagtaggagctatttcatggaaaagctcaaaacagacgaccactgcagggtctaccatgtatgccgagtttatagcatgccatgaggctacggggcaggtgaactggctaatgaagttcatacccggttttaaaggtggttgatagtattgagaaaccactaaagttatactgcgataaagaacccacagtaatgtactctcacaacaattagtcaagtggtgctgccaaacacattgacataaagtactatgttgtgaaagacaaagtctgggatcaaacaatcagtcttgagcacataagaacagaaaggatgctcgcggatccgctcatgaaaggcctacctcccaacatgttcaaggaacatgtagcatgcatgggttttaagggaagccttatgaatcctggactatagggcccaaaagttaaagtatctgtttctgaatagagatgtgtatagtggctgtcgaatccatcggtaattaaccgtgacgatgaaacatgctctatatgtaaatctgtgatggaatagaaaaagctaaaggaaatagtgagatcaagggggagaatgttagatggatctccctccccttgagcccaatggctcaagggggccttgacccgcgccctgatcgggggcgcccagcccaatggctggtgggcccccgtcacactgtgccatataaagaggggtggaggacgggacggcat

SEQ ID NO: 5272 - DNA, 43628 bp, Oryza sativa
gagaaagatagtaaccatcaacagtagaggtgacttcaatccctagaaagtagctgagtggtcccaaatcagacatcataaactgttcgctgagtttccctttcacgaaagcaatgtactccaaatcatcccctgtaatcaacatgtcatccacatagagtaacaacaaagtacgaccacgggaggaagtatgaatgaatagtgctgggtcatgatcgctaggagaaaacccagctgcaagtaccactgagctgaagcgtgcaaaccaagcacgaggggcctgcttgagaccataaagtgcacgccgaaggcgaaatacatgtcctggtggagcttccacacctggtggtggatgcatatatacctcctcatgaagatcaccatgaagaaaagcattcttgacatccatttgtgagatagtccaagaacgggtagctgccacggcaattaaagtacgcaccgtagtcatatgagcaacaggagcaaatgtctcatcatagtctcgaccatgagcttgctggaaacctcgcgcaacaaggcgagccttgtatctctcaacttgaccatctgatttggtcttaactttataaacccacttacaggtgattggaacagcatgagatggcaacgggacaacatcccacgtgttggtacgctctagtgcagcaagctcctctgacatagccaatttccaatgaggtaaaacaattgcctcctgataagtagatggctcaaacacaaccccaacaacaaaatcatctctattaggtgcacgaagagcatcacgagcacgcaagttgtacctcggagcaggagatgaatcatcaacggaacatgttggatcctcaagggtaggttgggagggttgtgattcgttaggaattttgggtctacgactgtagtggaaaggaaaagtgtctaatgttatagtggaaggaacatgtggaggtgatgaggaagctgggatgtgtgatggtggaggcgatacaggtgagggtgaaggggaaggtggtggaggtggtacatatgttggtgaaggtacagaaggaggtataggcgatggtgatggggttattggtgatgaaggtaaagactctggtgaaggaataggtggaaggtaaaggaaggagatggaattttctggagaagaaggctgattagtagaagaatagaagaagggtttgttctcatcaaaagtaacatctcgggagatacgaattcgacgtgcagaaggatcataacagcgatagcctttatgctcaagactatatccaagaaaaacacactcaactgattgggctgtcaacttggtgcgctcacgtggggctagtaaaacatagcaagtacaaccaaaaactcgaaggtgatcatagtggggaggagagccaaacaacacttctccaggggacctgccttgcaaagaagaagatggttgcatgttgatgagatatacagctgtagaaatagcctctgcccagaaatgagctggaacaaatgatgcaatgagaagagttctagcagtctcaatgatgtggcgatgtttacgctcagcaacaccattttgagcatgagcaccaggacaagaaagttgaggaagagtgccctgagataccaaaaattcacgaaaagcatttgacatatactctcctccggagtctgagcggaaaatacgaattgcactagagaactgagtatgaatcatctgggcaaaagactgatatatagaaattagctgagaccgatgcttcatgaaatagatccatgtatatctagaataatcatcaacaaaaataacatagtagttgtggcctccttttgaaggaaagggggactttccccaaacatcagagtgaaccaaatcaaaaggtcgactcgacctggaggtactggaaggatatggaagctgtacttgcttaccaagtttacaacctttgcaaacaaaggtagtgtcaacagggacggaaccaagaacgccttgattgataagagttgctaggcgagagccacacaagtgacccaaacgatggtgccactgtgggaaggatttacaagctgtagagcacataggagaatagacagaaggtgtgttagtggaggatgaaggcaaactcaagctatcaaggatataaagcccacaggatcttttctgacgatgtccggtgccaatgacagctcctgtgtggcgatcttgcacaaagcatgaagtatcatcaaatccaacgaaacaatttgtatctgtgagttgacctacagaaatgaggttcatggatagttttggaacaagtgacacattaggtactgtaaactgaggagaagagatagacccctgatgagtaaccttacacaatgttccattagctgtatgaacggtggcaccatttttaaccagacggcatgatgtgagccatgaatcatcaaatgacatatgaaaggaggctcctgagtccaaaatccatggttgggaggcaattggggtaacagttgatatagatgaacatgaggcaataccagcacatggatagggaccaagaattccatctgacaccatgatatatcaaaacaattgtataaaccaaagatcactagcaactcagctacttgagtctgatcttttatctgatagcagagagcctcctcctctgattttctggaagcagaaagcagaagcggcagcaccgcagcaggcaatgggaggaacagggcctcgacctgtgcagcaagccagcaacgatgtagatggtcaagcgcgcagacagcggcggacggagagttggacgacgtccacgcgcggctgcgcaactgcaggcccacgcgggtaagggcaaagtcgcggcggcggcgacggcgacggcggtcaacgacaaatcgcgctggggtccgatagcccacgaggcgacggtgaaaaggacagtggagcagtggataaatatgaattggaggaggttgcttagcagtgaaacgccggcggcacgccgccgcgccggccggcgatggggaattggcagctagggttcagaccattgctctgataccatcttaactaacttgcaacctaacaatagtattagcaatagagaagtatatacaagatacaagatccaatggactggacatccgatgggctggacatgggccaactatacagtacattagcttgtatatatatttaacaacacacactgacaatcagtggggctcattggtgccaagtactcctacttgaaaagtgattttgctcttcaccagacatcttgttggtacaaattgatcttgtgctgtgctttgcttaagagccttttttaagtacatctaaagacatccgagtgatagaaaccacacatgtcaggagcttattactcacaataccatcatatggtttcttgttcttttttttttcttctgaattctgtttttttgttggttgtgttcagttcaacgagaatgtatcctatgcacataagtttcaggtacacactctgtgcacaccaactaacaaatatcacaaaaagaatcttaaaaaaatgtatatgtacttctaatagtgttacacctatatacatagtctcaacttcagattcattatattttagctgtaacaaaatgatgaaaatctagtagttttagagtgtaaatttgtcagaagatcatcttttttgttgctctacgtataatagaatctgatgataagactttatatataagtgtagcactattagaagtatatgtacaaacttttttagctttcttggtaatatttgttagttagtgaacacgaagtttgtgtgtgcaggatatgtcccctagttcaacactccaaccaaggcagcttgtaagcaggtcaatggcaataagttcatggtggtgactggtgattagtaggatatgattagttgaagtcttggagaggaactgaaaaataacttattgatgtgtccccagcgcaagttcatatgagctgtgtactgtatccccttcaacgctgcagtaagatatccatattattacgtgatcatcttcagtagacagccaagaacgaacgtgtgcctctctgtgagatgactgatgaggtatctccacaacctcctaactgcaagaatttcttagattaatgttaagttgttaaaactagcttgttaggtttgtactgagatttctcaaatatcaaattgtgctatcatcagatcttctgtcaaaacattgattgatagtgtacttgaggctgtagtcttatgatttattgattaatagctgcttaattcatttttggtatagtagtacaatgactctgattatgtccaatatatgtatcatctactccgactttaataagtcaactactacgttgccactggattcagctgatgaggttacgcataactgatcgtgcatatccatgacatgatttgaaatgtaggtttaagaaagtgatctgtcgaatatctaatacttgaattttagttttatgttacatttttggggtcaaaaacagatgtcattttttggactaaagaaaacaccagttttagccttttttttagtttcagatacttgtcatttcagctttctaagactatgtttttgaccatcttgtccactttagttgccaattgtcttcttttgcctacgtttaactagtcaaaacatctaaatgtaaatagaggattgaacttttctagatttcctttgttataaacagggaattttttagataatagagataacttccagtctctgcatcaactatggatacgcacggccatgtatttaagggatgtggggtaggaagaatgtgtggatgagttctaggaaggtgcatgagagtaatttcatttgccataaaaaagggcacagtgacattcatgtgtaactattttttatgcttctatgatgctttgagcaaagaaccacttgcagtaagtaagagactgagatagtgagatgtgcgaatggtatcaagcttgcttcctggcatggactgtctacttaattagccactaattttatactgtcaaaacaaaaccagcaaatggagctttccacacaggtgatgacacatactgaagtggttgcaaatcaaagtaggaggagctcatgtaatccagaaggattgcatggttcaactgcaaagtggatttcttgcaatggcatgaaagtacccctgatggtccatgttaccccatgttcctcttatctttattatatccttacctcaactaccttttgttttccctcatccaagtgcttgcttctcttgcaagttctttaagtagaaacatattgtagttgcaagcaatttgatgcatcagttgtgggcaatctagaggatcacagagatatgctagtaaaaacgatacgaaagcgaaaagagaagaagatcatcattatagggtttccaaaaggcattgaagaacaatatatgtccttagtcagaggtatcaacaaacttcagttacaaaaacatatgaaggtatgagtacaaatgctcacccttttggaggctagatcattgatgcataactgcattagagttcacaagtcatgagttctctatctgcatagagcttggaatcagagctcacacctggaaaacccaacagtgatattattttagtaggggctaaatcttggatagtgccaagctcacatcttaggcttagttggaccaagactcaatgtagactactctggtagagacagaacagtttctcatggaatttttttgtggatattgctgccacattttttgctgtaatcactcctgtcattttaatacttgcatctctttattcctcaactgaattgtccctatgatctggtcttttctttctatgggcaattcctaagtggacctccagaaagggcaggcaaatcgagctccaatttgatcaagaaagatagtggggtgatgaaagcaatgcattgctaccctttattcttcacccatttcttgtttaaaacaaggtgatggcagtatggcactatttgcttggcctgtttgggatttggtgaatgtgaatattgccacagtgtcccatgctattgggtggcaacaatcactagcttttcatttgtttcagttacccgtgaaacctcatggtaaattaataaatagcatctggtactagttgtcaagcagaagaatgattaaggaaactgtcaagtagtatgagtgctgaataattaggggactgatgatgctggtgagggacccaaacctgaaattaagcaggtggcaaccctagtcccaacatgcatataatactaattccaaccttttttctttatgtgagttgtgcagaggagaggacagcagaattggacagttccattgaagctagctgcttgtttcttctttttgtttggaggtgaagcagcctcaatcatcccaatgtagaggcactgctccaaccaagtgttgttcaaagaatgtggtatatcagcagttcaagcacattggtagcagggtttgtatgtgcaaatctgtacaaacaaagagaattattctagaacatgtgtgtggggaaatttctggccactgtagttttcagcttgtgaaatgtagacctgcctcctcttcggagataaatggttgatttcattgggggagaaaactccctcctcttttgatagggcatattttgttttgtcaggataagattctgagcgacaattactctattaatatttcattttttatgtggtccaaaattatgaccagaagaaagtttttttttgtaatacaaatttaataacatcaattttatgtcacaaacattatgtattaatggagtaattattagtcaaaaccttgtcctaacaaaataaaatatgccctataaaaagaggagggagtataggtggctaatccaaagacacccaataagtggaatgtactaccttcacacataaaaatcaacagggcagtttgcttcctctagagtgtctcatcagatgcttagattttcttacccatcataatctttaagtgacataatttccagaacataaagttcttaagaagacctctctaatccttagaacttgaatttttgactccatgaaaaggagtctaaatccttgactaatagttcctataaatgttatattcatattcggtgcgctctttccatgtatccgaaagttttgtaagtttgacacattcatagtgctgaaaaaggctacctagcatgggtcggggggatacaattccaccttcttttttttccccgaacacgcgaaagatgtgcgcgtcactataggaatacaattccacttgccattgcaacatattttggcaccattttatgcagacatgagtgctgcacctgtttagcttgtgactgaatgcaaggtgtgccactgtaaatcatcatcttatgataggtaaacttacacattgaaattgatattaagccacggttattttcaattaattcttttagatgatggaggctttcagaattcaaccatttacaccaagttgacacaaaagcaccgagcacattctaattaattttatgctcattcaatttagagcagcaaatttgtgtaaaatttagtattaaaccttacattttattacctcaatcccatgtacaaatctcaggcaggaggagaaaccttttgaggcttggtttagttatcaactttttcttcaaactttcaacttttccatcacatcaagactttcctacacacacaaactttcaacttttctatcacatcgttccaatttcaatcaaacttctaattttagtgtgaactaaacacaccctctgagtatgataccgacgaccaggaaacagtccagatcagaggggcaaatgcaaaccaatcagaaataattctgaaccccacaggctcaagtcaacatgctttagctaaggagatgagatgaatcgcagcagcagagggaggaggaaaggggggagtactaagcaagcagcattgatgcctccattactcccctgtttaatactctcttcttgggaggttggaggagatcacaggacagcctgtgcctgtgcctgtgctgctgtggcatttcttcagagaagactgtgagatatcaccacaaataaaattcccactactgtagtatgaaaactttgggacacattcagatacattccgatgaaaccagaagtagtttctctcaattttatcacatcaaataccgatcgtgctagagtataagtgaattgtccgtcttaagctttgggttaaactggttggtacatgtaactcaatagatcaaacgaagcatgctaattctagtagagaacttcccttcagaaaatgttgtggcaaaagttttataatgggagaaactgtatattgtgtgacagtttagttagtacagttgctctttttccccggatgagtgagtgatgactagcaagtaacaaggcctgtttagttcgcgaaaagaaaatttttgggtatcacatcgaacgtttgaccggatgttagagggggttttcggacacgaataaaaaaactaatttcataactcgcttggaaaccgcgagacgaatcttttgagcctaattcctccgccgttagcacatgtaggttactgtaacacttatagctatcatggattaattaggctcaaaagattcgtcttgcgatttcctccttaactgtgcaattaattttttaatttatctatatttaatactctatgcatgtgtccaaagattcgatgtgatgtttttgggaaaaagtttgtggaaactaaacggggcccaagtaagatggcaacaaaaacaggaataaaagaaatggtgaccaaggcagtgtggaacaccccggggcttttaactatttgccactcttacgagtggtgcttaacgatttgccactagactcatatgtcaaaaacacatgagggcccacatgtcattgacagggtgtggcaaatcattaattgccatgtcataagagtggcaaatagttaaatttcccggaacaccccaaccccacttccctcaccattccattcaccaaagcacagcagcacacaccaaggaaggcctagaaaagagaaaggcaaagaggaccaaaagaaaagaaaagaaagaaagaaaaaacttgaaaaaaaaaagctcaaaagaaagcaagagagaaagcaaccaggcaggcagaggcagaggcagaggcagaggcagtagccctcccttttttttttctctcttctcttctcttctcccaattcacacaagattcactcaccagctgtgccctcccattcccctctgatccaagcctttcactcaaagcttccagcttttccaattgcttggccacttcaagaatcaaggaatatgttcttgttcttggggttcctctgatccgactctccatcttccagcttccaggcttctctctcgttctgtgccatttttgctctgcctgagctctgtgcttgttgcattggtcactccaagaaaaggattttgaaggctggttttattgttcttctgttcctgggatccgaattgcaggcgagctcgctgttcgtgtggaggtttctttctttcattcattcgcttgaagaattcggcaaagccatgcgagcaattcgggatgatttctcggggcctttggaacgcgtgatgattctttgacccaccattgcttcggttttttttttctgggagaattctgcaatttcgcgagtttggtcgttgagctcgagccgtggtggtgttcttgatccggtccatgggtctctgtcatggcaagccgagccaaatcccggagcccgaggcggaggaggcggcggcggcggccggtgtagccgtcgccggcgccgcctcgccgggtccggctgcggcggcggcggcggcggcggcggcgaagccgggcacgccgaagcagccgaagttcccgttctacctgccgagcccgctgccggcgtcgagctacaagagctcgccggcgaactcgagcgtggcgtcgacgccggcgcgcggcggggttgaagcggccgttccccccgccgtcgccggcgaagcacatccgcgcgctcctggcgcggcggcacgggtcggtgaagcccaacgaggcgcccatcccggagggcggcgagaccgaggtcggcctcgacaagggcttcggcttctccaagcacttcttcgccaagtacgagctcggcgacgaggtcggccgcggccacttcggctacacctgctccgccaaggccaagaagggcgaccacaagggccacgacgtcgccgtcaaggtcatccccaaagccaaggtcggattcccgccattgccacgcctcaatcgcttctttcttcttcttgaaatggaacacatgcctctgcatttgaccaaaataattttccctgcgtgaattaatcaactgcttctgctcagttttgtcgttaagatccaatcatttctgacgtgcagatttaacttatggcattcggattctccattattttctttttaatcgagttttctttttttttttgttgcggggttcttttaatcaagttcactttgatgcaactctgattttgcatcttagctccatttggtagtatttggtagaacgttggttgattcaagcacgaggatattggaaaaaaggagccacctttagccggcacttcgttttcgttttagctcccggggtgctcgtgattattgttgggaggtaacctcgccgctttgagaccattcgtgccaagatatgtcattgccaatgccatgtccatccatctggacgtggactgcctcctgcagcattgattggcttcatgccatgctcatggtttcaacgcttgtcgagttcttggtgccaccaccatcttttgtcctcacgcttccatcatcggggtcggggagggtaaatggagcagatgaccctctttggatagatctgcaggtcaaaaaggggagcagagtttgctgctgaagctgcacagcttgatgcttcaattctgtggaaagagtttgctcataatgcgcctcctctgcaattgtatgaaagggtcattcaatttaaggccctgtagatgcggccagtccagtgcttttatgagcaaagctggcaatccttctgttgccaatgcaagggggtaatgcccccaccctcctcttggcttctcacattccatgtgctcgtgttcttcctcggtcaattgcagtcaattgttagaatgtcagcaatgctgcgtttcttggttttattctttccagaaaaataagattgagctcaaagacagttgcaagagtgttgttcttgttggatttctaatggagcactccacttgtcactttgatactggagtatatgttcatttcattatagaatggtggtgtagctttggttgaatcttctagtgttattcgtgtcctgagggcattaattccagcaataggcatttcatttcttttcacccataattgatcacttattgtctgtctagtgcactgttgtacaacattgaaccgaacagtagttggttgttggcttgctcgcataggtgtcataattcgcgcttcgagatctacatatgttgcccattaccatgataaatggaagttgagctggcattgttgtagttgcatgcttttatttacttactagtaagtaatataattgattgatcttatagatatagttcattatgtaaaagaattatcatattttgcttgtgggttgtttactcatttgcaaatttcattactcttttacacttggtagctgtttactgcaatgccagttcatgctgctttctactcttaccaaattaagtctctgggcagatgacgactgctattgccattgaagatgtcagaagagaagtcagaatattgagttcgctgacaggacacagtaacctagtgcagttctatgatgctttcgaggatgaagataatgtgtatatagttatggagtaagtgtgcacttattccatacagtgctctcctttaacttctttttttgccgggtcgtctcctttaacttctgtcttcatttgttgctgtcatgcatgcgattcttgtcttgtatacattagaaggttcagagatgaaaaaaaaatgttatttcatcttggtggaatgtttggctttgttcctgtcattaatgtttgtgaaactaccctgatacatgagaatccaagcattgatatataaatagatcattttctgtcagcaaggatttgtactttcaatctcaataacatattcccatcatgccgttgttactataaaaaatataaaatttcgtgcatgatgttgatcagagctcctctatgatcagttgtttataattcaagataacatatcccagtcaaattaaaaatccaagatactcataaaaaatggtgctttcctgcaacttgcatcacttgattacatttaacttaatgtgattgccttttctgtttcaggctatgtaaaggaggtgaactactggataggattttggcaaggtagagtcatgatatttattttgtaaacaatgcttgtaactaattctgctagatttgagttataacttactttctttcttcacagaggtggaaaatactctgaggaagatgcaaaggttgttatggtgcaaattttgagtgttgtgtcattttgccatctccaaggtgttgtccatcgtgatctgaaaccagaggtaggcttgctgccaaacaattaatagccaatgttaagaagttcatgttacaacctaaaaattgttaatgttgaatatgggctctaactgacataagacattttctcttctattgttatttctgtaaattttctgaattttttttacccaaagtctactattgagtctagcagtcagcagaccaaatgcattattttgtaaataaccatatttgttgttcccctttccagaattttcttttcacctcaaaggatgaaaactctgccttgaaggtcatagactttggcttgtctgactttgtgaagccaggttagatttacagagtccagttttgattcttctttagtatttatccttgccaaaccaaatttaaatgtgttgagatatcatatcattgctatattctgcagatgaaagacttaatgacattgtcggaagtgcatattatgttgctcctgaggtgcttcatcgatcttatggcactgaggcagatatgtggagcattggagtgattgcctacattttgctttgtgggagccgtcctttctgggcacgcaccgaatcaggaatatttcgagctgtgctgaaggcagaaccaagttttgatgaggctccatggcctactctcactgccgaagcaaaagactttgtaaaacgactgcttaataaggattaccgcaagaggatgactgctgcacaagctctcagtaagcatcagatttgtttgtcagtgtaatattgtggcactcgctttttatcgaatgatggttaattgctcacttgcatcatgatatctgcaggtcatccgtggatccgaaattctcaacaagtgaaaatacctttagatatgataatctacaagcttatgcgagcttatatcagttcgtcttccttgcggaagtccgctttgagggtatgcataaacctttgtgttgttcttatctggtctgtaaatgactattcttgctgcttatattttttttcattttttacatgtgtcaagttatccatgtacgagcaatatattgcttttggttgtgcagtttaagtaggcttataccgatatgtcttgactctgatgacatcaccaactagccattttaagcaatgtccatacattttgcaggccctagctaagacattgacggcaaatcaactgttctatctaagagagcaatttgaattgttgggtccaaacaagaatggttatatctccttgcaaaatttgaaaacggtaggtattctcacctttgttacttgatctaatttatagcatgcaattgctgaataagtaaatgttcctacaggccttggtaaagaattctacagatgcaatgaaggattctagggttattgactttgttaacacggtaagactctttcatagaacattctcttgtgttagtatatcggactgagataaacactgacctgctcaagccatggtactaggtgtgcactcttcagtacagaaaattggattttgaagagttcgctgcttctgccgtcagcgtttatcagatggaagctttggaaacatgggagcagcacgcacggcgtgcatacgagctattcgataaggagggcaaccgacctattgtaattgaggagcttgcatcggtatgatttgagctgaagtaactttttcgcatgattattaaacatttctaactgttatatttttcatctcttaggaacttggacttggtccatcagtccctcttcatgttgtactccaagattggatcagacacgccgatgggaagcttagtttccttggattcattaaacttttgcacggagtttcttcgcgatcgatcccgaaagcctaagataaaatcattcttgcatcaaccaatgaggtcaaattgatggctaagccaaattctctggatggtgttcgttgtgttgcgcggtttgaggtggttggagaggatgtcttgaaaatcagacaaaaaaaagaaagtgacagtttgtgtaagaggtgaaaatgttcttgctgctactacttctacccctccccttcgccacgtcggattgatgttgtactgaagctgtgtagacgatgtacagatgatgaggataggaaaaagaatatggaagggttgaaaagatttgagactggtgtttgtcaaagtcttgcattgtagtagtgcatcttttgtctcaaataagacatttaacgtctcaccccttggtctctcattgtgttattatgccagtatgcgacagccctgaggttacagattcaactgtgtgctgttcatttctctgtacttgttgttgcaattgcttctactgcagccttctggtaccaatgcaacaatctctgctcctcactgtccattgatgatgggagaatctgcatttttactgcaaggctgcatctacccaagcatatgcatatattcatggcgatatgcatatatcaccaatgaccttggccgatccgcagaagccggggatctaaaccatttccattctctaaaattcagagtatcaccagaattctgaagaagtgatctctccaaatgtaataagatgccctggaagagggctattcaggatcaagacaaccacttccttttttcagggtctcaccccttgttcagcaatcagtagtatcactgtctgttcaagtgttcatagcaaaagaaaaggcatcacacagtgacattgctgatattggtgtgtgcaatgcaatgctgttaatgccgcgttgtcgctgtctgtgcaagaatgcaaaagcactggatctggggtgcccgtacggcaaagcaaatccggtcaaattctgatgaaggagtccggcaagatgggacccactgacagtcaggaagggacccaacatggttgaaataattgaaatgctattgaagttctaaatttgaccaccgataaattttaaattatagtgtttaaacgaataaaaactgcgtgctcatatttaacatgcaatgcactttcataacatgtaagaggtaaaattttggatacgaacaatatccggtgacaattatttagggatagagggagtaatcatattatgatattatggtattgcatgttcttagatggataatatatttgtgagcaattttatatgtcgaaagatgtttgatgatcgtgaaaggaatgcaaaatgtgtgaagatttttggcatggtgtgccacgtgacatgccaaagttcaggtttttcaggctgtatggtcctcggtttggacctgtttggctgcatttggatggatagtgtaaaaccatgagcacaggttcagtttagtagagtgactttatgtgcttgtttttactgtcacaaggttcctcgagcaacacacagtaaagtaatggtaaaaatttactacttattgtacttgcttctgctgtgatatgaacaaagaaggttattaaaaaaatgggaaagaaaaaggaggcctcttctcaaaggtcgcaaagaagcagaagaaatggctcaagcttctgaactctgaagtctcctgcactttgtatgcagttaagtataacactgaaagtttcttaaaagacttgagagttgcaccaaaagctcgaatcatggcaaatgatgtgagctttgtttaaagtctgaagaaatcttttgtgatgtttaatgttaaaattcgaacactggagggtcataaaagacagacaacagttagagtttcgaagcaagatcagatatgttattaacacctcaaaagatgcatgatttttgtgagtggactcaaaagctgcatgatggcatgcatacattgttcagtctacttcagaaagaaaaataaattacgttcattggaagttcaaatcgaagtccattcaaaccaaacatgccggacataataataatgtctgaatcgttgaatgttaaacacaatagattagagaaaaaaagcaacattcgttactgtaaaaactactactaggaataaaatattttaacatggatactcactaaaaatttacaattaatgtggagatgcggggtatcgatccccgtacctctcgcatgctaagcgagcgctctaccatctgagctacatccccaatttgacatttttctatcatatattttacttatcagttaaaacatgaaatggcatcgtttcatatgaatttgacacccttagcgtatattgcgggtcttattcgagcagaaatttctttagaaatcattcaacttgggaaatcctccttgatgtcaggttcagttctaccggtaacacagacagtagacacctaattttcccgtgtgattatctagttcaagactaatcctccgttcctccttgatgggatgaagctcctgcttcgccaaataatagtaataaaaagatctgcatatcttaatgtggccttaggctgagtttgaaggagcatttgggctgaaagtttctttaatttaccatgttcacgctttcaaaactgttaaacggtatatttcgtataaaaaaattttatatagaagtttcttaaaaaaatattaatttattattaagtttaaaataattaatactcaaattaccatgtgctaatggtttatctcgttttacatgccgctaagttgctaagcccaaatgctcttccaaactcagcctacgccaagcaaaatttaaggcccgttagccagtaaaagagcgagattacagtcctattgggcccaactcactcgcatgggccgaaatccagcctatccatagtctggatttcactcaatggaggcccaacaaaacaaggcctcgcaaacaattaacagcccaataaggcccatataatcagatcccttacttaaccttctcctctaatctcaagaaaaaccagaataaacatttcccccaccaccttcgcctcctcctctcccatggcgatcccctaccggatcaccgccggcggcggcggcggcaggcagcggatggcgctgccgctgccgccgaagggcgccctgctggccgccgtgacgacggcgtcggtgctgtccatcctgtgcgtgctgtccttcaccgactcgctgtcctacctcgggttccaggtcaggggcgtcgacaagagggagagcagccgcagctacctctactggggcgccgccatcgactgccccggcaagcactgcgcctcctgcgccggcctcggccaccaggagtccagcctccgctgcgccctcgaggaggccctgtttcttgacaggtaaccatggtttggcacgtgtatagattttgattcgtacctgcattgatctgtctgggctgttaatccgtaatattcccacttaggaggatggaaattgttgcaaagagccaaagaatgtaatgtgggatgatgtgatataataatgtggatatgtatgaattagtttttgttgttgtggcagaatatttgtgatgccttcaaggttgtgccttaattcagtgcacaatacaagggggattattaatcaaagcgatgcgacttccaataaaaggtttggcttcttgttaaccacctacttctatgtgattatatatcttcctgtatcattctgttttcctgaaatcgtgctagaattgaaactcaccaactcaatgttttggcagtggcaggtgggaaacaagttcatgtgcgatggaatctttgtatgacatagacctcatatcaagaactgttcctgttgttttggacaatccacaatcatggtatgctatagtatcaagaagtacgaagctaggagaggaaggagatgtagcacatgcacaaggagttagcagacaagaactcaaagaaaacacactttactcaaaggcattcctcataaaccgcaccgcaagtcctcttgcttggtaagaatgctagctcttaaagaatagccttaagccttcaagatcacaccgaattgaacctatacaccatgactagaattctggtatagaccttaatcatcattacagttcaggtttatggagtgcaaggatcggaccaagcgtagctctgtgatgttaccatacaattttctgccatctatgccagcaagaaaactgagggatgcagcaaacaaggtatatttccataagtttgcctccttgctcaatttaattgaaattggttgctccaatcggctgaaaatgatatcttgttttgcaccagattgcttagcaccaagttaataatattgttcatttctgtttatatcgaattgctcatggaaatttgccgagtagaactatataacataaaattcaaaatcctaagaatgtggctttagtgtgcctaatgttagttccccacttaaaaggactaacattgatgtcccactgtaaataaatctcgtagctgtcatttttgtcagcattgcgtgcgacataagatgtgtagcactgtagcagcgggcatctgcttgttgaaagttaaaattcaccggcaaatggtgaattattgcctcatgctgccatgggattatgttttattactccactccttcattgagaatttcatgtttgtcatggttgttctggaataccgtgggccatggtaccactctatttaccctatgtgcctatgtaattgttcatatgctagctttgcatctaaaaaagagctttgggacctattgaggttattggattactttccgaaaagattttttggtaggacaaaattgcaaagcttttgtctttctaggtttggtcaggcagaacatcataatatatcctgtatataaatcatttgtactgtactactgtttgtttatgttaagtgacatccacgtattagtacagcatagtatgttactctgctttctcccatctaaatcagtgtgctttctttagattaaagtgatacttggtgactacgatgctattcatgtaagacggggtgatctactgaagaataggaaagatcgatttggtgttgagcgaagccttcatcctcatctggacagagatacccatcctgagaacatcaaaagaagaattgcaaagtggattccgcgaggccgtactcttttcattgcttcaaatgaaaggacaccaggcttcttttcacctctatcagacaggtaatcaacacattgtgtcagctgctcttcttgactcaccagcattaggatctcaggcacgatttacatttgcatttggtttctgcaatcaatttagatgtgactttagcgattcgtgttctcatggatttaccacggcacatggtttgtcttcttctgttatcaattacttcctccgtttcacaatgtaagtcattctagcatttcccacattcatattgatgttaataaacctagatagatatatatgtttagattcattaacatcaatatgaatgtggaaaatgctagaataacttacattgtgaaacggagggaatacttcaaaaacatcccattcttaagaaactcgactagttgctgcagtactaatgcactttgtcattctggaatatttattttgtttggtatattcattttttttatttatcacaccatggcttaccaatagaaaaaaacaaataatatgtacatgaccagcagtgcaatgtcataccattgaatgcttataatttcatgacacaagctggctaagatttctattcgttttctttggcgtggatacagatacaagttagcatactcatcaaacttcagcagcatattggagccagtaatcgataacaactatcagctgttcatggtcgaaaggttaatcatgcaaggagcaaggaagtttgtgaagaccatgaaagaattcgataatgacctttctctttgcgatgaccctaaaaagaacaccaaagtctgggaagaagcagtttatacagatggctgatggttcgtatttgaccgtatttgaccttccattgcatatgaagtacagctcgcaaactatcactaatggttttgcatagataatagtataatactgtcatatgaatatatatgattaaaaagttttacttctgatctgaagttacactcaagctaggacactcaagtcaaccgacagaacaaggggaagcatgcatgtttcctttcttcagacaagagatgttcaatttgttcctctctcttttttctttgatacacctgggaagagactatatatgctggtgtgtgatgtaacttcatcgtggttttgatttaaaccaaattgtagtgtatatgtaataggcaattacctatcagctaatggtgaatacatctgtaattaatttgtcaatctggaaattgattcctttttggagaaaatctggaagttggattatgtttaacctcttgcagatgaaaaggcaaatatacataccatctacagtgcacgcttgttgcagatgtactgcatgtcagtacagcagaaatatgcaaggtacagcagaaatgtgcaaccgtaggtgtatatttgcatgcaaaagttttttttttttgccaaatgcaatgcacatacatgtgataattaaacaggtgcatgattaaggtgcaaaaacttagatgccttggacttcattagtaccatttaacatccacttagctagctaattaagctagttcctcatctgatcatcactcttcaccagcatgaaaggtgatcagtactctctcacatgatgcatggcatgcatgatgcatggcaagatcaaaataagcaagaacaaaacaagagctacctaagtgcaattaagcactagcagtagcagctagctactaattgatttgattgatcctaattacctcctagctagctactcctaccttaacgctaatcaactcttgtcatctcatctcaaagactaattaacaaactaattaacacctgcacccttgcgcaaatcaatcgtcgtcgtcgtcgtcatcctcctcaagaaatcaagcagcagcatgagctgagctgatcgatcgagctagctcatcatcatcctctcttctctatatgtacacgagatcgagcaagcatggcggctgcaaagctcgctcacacctcgcttccctggtcatggacgccgtcgtcgtcgtcccggtgcgcccgcttcttcctgccgtgcagcgacacgccgaacagcttcaccgtgtcgccgccgtcggttgctggagtcttgggcggcggcggcggcggcgagtgatcgggggagtcgagctccatcagcctgcaggaggcggcggctggaaggtggtgttgcgccgccgccatggccgtcgacgagggggtggtggtggtggtggtgaccggcgcgacgtggttctggaggaagtagatgatgtcgttgtagagcttcttcatgtgcgccagctccgacagcagcagcgagttgcgccgccgcagctgccggttgtcctccgacagcgccgccaggaagtccccgccttcgccgccgtctccggcgacagtacagtgcgccgtcgtggcgggctcttcttggattagatggtggtggtggtacgccggcggcggcggcggcagcgagaagggattgaggtggtggtggtggtggtagggttggtgcggcatcggcggcggcggcggctgcgacgacttccgccggtgaatctcggcgaggaggtgcttggctcccttcctgaagaactcgttggcgaactcccacctgtcagctactatcttcctgaaaccctgcaattaacatcatcataagttcataacaccaattaattaatgcccaaagttaaacatacatacttagtattagctattagggaaaggattatgaacactcgagaggatatctcctaatcgtttgcatgtcatctaaatggttataaaattttagaaaaaaaatcaacaagatgattaatatgtgattgtattagtagctaataactaaaaaaactaagcaatcacacaaccaatggagctagcaatcacaaaaaaaagagagagagagagagaaaagaagaattggcaaatggcaaaatatactactacctccataaaaaaaagataggcagagatgaaatctttgtaaaatgaaggcagtactatgtaggagtatatggtaactgatgttcaatattgttgctagtcatgtcaagtggtgctaatatgaatggtggagtatatacttggcacagaataccaaggtacatatatgcatctctgtttattgtgtcaaacttttcccaatgattgggagtggatagtgcactgctaattctctaaagatgaggaggatagaacaaactataaatacatgtaaatggattattcatggagctagaattaactactactacggcgactacgtactaataaatactaatccactgcttactgtgcttgcacatttaatttgtgcactttgattttggtcaagactcaagaggcaaagggaagattagaggaagtactagcgaagtacattaattagggaaggtagaacagtggtgctggagcaagtagggtaagaagtgaatgtacaacacagtcatcaacttatagtggttcagaagaagaaagagaagatcagcaaacagtcagcacgtactctcatgctgctcctcacttcaccattgagagaaactaattaatgtgcatcagataatgttcagtaaaagaggcacaaaaaaaatttaaatctccctcatgttaaccaggctaaacagacaagaaaaacagtagatgagattaatcatcagcacgaattaatatacccccagctctactctatcttttcatcagaagcaagaaatatatttttgaaaaaaacaagcaaaagagattaatcagctcgttggaaggtcgcactcaaacagcaatgcctttccagcgtgcaacaaaaatctggtacaaaacaaaagatcgatgaacaaaaacttttccaaaaccctgtcacattctaggaaacaagcttgctaaccaccacatacacaccaaatcacccatcaaaacaacaagaacattaaaccatagtccatgcatgccagcatcccccatgcactgactgaccaaacctctacatcaaattaaaaccaaagcaagaaactatagcagctagaaaaccaactgatatatgtatgtatagctagctatagatcgattcaagaacaagcaaagaaatcaagacactacaagaacccgcaattttcttggcggccaaaaaaaacagccgccaagttcatatatattattggcggttctaaccagctaccaagcatatacatgtttttttggcggctatgcacaaccaccgtcatgtttttgaccgacatgaaaattacggattcttatagagcaacaatatatatgtggcaaaaatgtgcaatggtagcagcagcttacataggtgttgagctgcctgacgaagctggagaagttgttgtgcttgaagtagttggggaggaggtcgcgggcgaactccggcggccgccacacgacgaaggtggtgtcgtcctcgccccacgacacgatgtggtcggtgcaggggtcgtccaccagctggtacgtcttcgtcaggaacggcgccggcaccggcttccccgccgccgcgccgccgccgccgtgcggccccatctccatcgacaccaccatctccccgcacctctccaccaagaaagccatagctagaagaggaggaagaagaaggggagaggagaaaggctgcagtgtctcactgtctcgcactcacacagagagtgagacagagagagacgcacacgcacacaccacgaaccccgcgcttcaaatattctcgtgtgggctcacgtactctctctcagctcagctgcctggacctctctctcatgagctctagggggagtgtagtagagaagagagtggtggtggtgtgtgtctgttgcatctctctctctctctctctcatgattatagatgcatgtgcatggaaatctgtgcaaggagcagtgggtgcagggtgtgtgagggcggttcaaagtgctatggtggtatagcttagcttattagggcctgtttagttcgcgaaatggaaatttttgggtgtcatatcggatgtttgaccgaatgtcagaaggggttttcggacacgaatgaaaaaactaatttcaaaactcgtatggaaaccgcgagatgaatcttgtgagcctaattaatccgtcattagcacatgtgggttactgtagcacttatggctaatcatggactaattagactcaaaagattcgtctcgcgatttccctcctaactgtgcaattagattttcttttaatttatatttaattttccatgcgtacgttcaaagatttgacgtgatgtttctgggaaaaatttttggggaactaaacggggccttagcttaggtgttggggagaaggacgcagctggagtaggagcgaggagcttcttttggcacttagcattgtggtaatcccatgcttaattggccgtttagggcatggtcatggggttgagttagtacgtgttgagttaagagggggagagagagattgagtgttaaaagaaaaacaatatttgaagggagagacattcctctaaatattgagttactacctctgtccaaaaatatagtaacttttgagtatgaatctggacatactccaaatatatagtaactctggagtaatatttaaagggagagacattcctccaaatatttaagaagaaattataagcgtgttggggattgaacacatgtcctcgagattgaaaccatacatcccttgccactgcactatcaagtgcatctctgagaaattgagtgttgtttggagaagagagacctcgattaaaccatgtgatttctaactaatgaacatcatggatcaatttgtagtgtgctttcgttagttcaaaggtgaagaaggagagcataatttgggtcttagcaggagcaaagcggttaacggagtttctaccttaagcaccctaacctaacattatatttactttcacacttgtaattaaataaactttttttctactgtattcaatgaaattagcacgtctggtgtccgttcatgaaaaaaaatagttcgatggaggtaatctttgggcagctgttttttttcctttttttaaaaaaaacaaaccatataccatatgtcatatgaaatatgaagtatacggatttgctaaatgatatttgataaaacaataatttgtggccaattcctgcaacttcttgactgtcggatctgattcatgattcgagttccaatgacattcctgctcgatccatctccggtgaacttccgcgagctcataaatctagtggattgcggagttagggttcaatgttgggctagggatgttgtacactcaaaatgcaaccatttggtatctgttaaaagtatgaagatggggcatgttgatccctaccaaaggagcccatatattgcaccttttgatccattggtgtgatcttcttccccctccagttacaccgtctctttggtccctaccatttcgatcctaattatatttccaccgcaattgtacattactttttctacatacgcaggggcagagctatgtatagctaggagggtgcccacgaacccggttaaaaaaatagctatagtttatatattttcaccatatatataccccgtcagtttaaacttagtcacccatatcaagctaaattcgattcaaaccagagtaaattaagcaagtggaacccctttattatgttgtagctccgccaacatacacactatatatactgttatctcttacccgataatattttatttatgagtgattttacggtcctcgctaagatacatattagaggtataaagcactgaaaggtactacttccgtttcaggttataagactttttagcattgcccacattcatataggtgttaatgaatctagacaagaaatatatatctcgccacggtatatcatcatacaattaatttctccttgctcatattggccaactcagtgttgtgtacgtgacaactgacaacctctcatttggtgtgtttaacttgcttttgttcatactagctatttttttccaaatattgagaatatagtacttcttagttattgctacccttttacagtgaaactccaccacagatatatagctaatattgttctcttcaatcatgatcgaattagcatatatagtattggtgacacaagcagacaatacagatatttgcatggtgggagaataatcaataaaatagaatgtagcatggacaagatgttgacagatctagtgctgtgtagctttatctgtttctttttaatgaaagaaagcatgaaaggaatatcctgtgtatatactgatgataattaatatacatatataccataacaaaaggtaactaatcaattacaaagttattactattgattacaagtgggaggtaagttaagctagtgatacatttctttataaatcgattgcaaattttcaatacaacaaagcctgcatctggctagatatagctcaagctagctttgaacatcagaataggtccaaaattgaagtcaccgtgggtgtacatgcacgaatacgtacggcgacgatttgacaggaaggagcagagatagaatcatagaaagaacaagagaccaactcgatcgcacgggcatacactcctgcatgcagatcacaaagctatcaccataaacaaaagaaatggaaaaggaaaggagagaaaaagcagagatgcagatgcagagcacgcaacacatgcaaagaaagaagaagagatcgaggcctatccgatccggccgtgcaggtgatgcagtggattcactgcagagaaaggaagagaagagagagagagagagagagagaggcagctagcacatgtaattgtgctaggctgcacggccggtatcctcatggtatttagtgaccaaattgttctctctatccctagctggtagtagtggcatgcaggggaagtgcatgcacacatccatgtacagatgtctagttgtaaacaaccaaagatacttttgtgcctgcctgccttgcccctgcctcctgctggtgacttgcaagtttcaaggcaggcccgtgacttccatggagcagcgaaagcacagaaagtaaatactctactcactccatcactctttttaccgttcaaaattggtcccataataacttcttcatctttgactaattataattattcttttattaaacttctctacttacttactcgtttctaaccaatcataacttaataataactatattttgagacgataaaaatgctacagaaatacttgtattttaagacggagagagtgcttatagttattctttactcgtttctaaccaatcataacttaacaataactatattttaagacaataaaattactacagtttgagacggagagtacttacggttattcttcacttggtggtgagtggtgggtgcagccatgcagagccactggtagctagggatccacttttgatgcaacatcattttctattgccctttcctctgccattggcctgctgcatgggtgtgatgcaaggctgctgcttccattaatatcatatcaatgtgcaagaaaacaaacattcccccccaacttttcaaccagcattgaaagaaacaaaacaaagttttttttttcactccttcctctttggtcccagctgtgtgtagcaccatgtacacactatactgaatactgatgcagtagctatagtcactagtcagcatgcagatgcagtagctaggatcaagtacttcaagttcaaatgcacttgtaacttgtgtaaagattacatataggagtatacaaacttagctagttcctccaccaccactctccattttccttttgcctttccatgttcctagcaataaagcaggagtaatagcttaatttggctcagtcaaactaggctttgtgacccatccttttcccagggctgcccctgcaggtgatagatggatatgtgcaggaagatagcttagggttttggcatgcaagtactccctccgtcccataaaggtgacgtttttgactttttatttgcaacgtttgaccattcgttttatttgaaaaattagtgcaaatataaaaaaagataagtcatatgtaaagtacttttgataataaagcaaatgacaaacaaaataaataataattccaattttttttgaataagacgaatgatcaaacattgacaaacaaaaactcaaaaagacaagtaatatgggacggaggtagtacccaagaagatgccacaacctgcaagcaacatttgcatatgcatcaatgcaggtgggcagctatatatgtggcctagtgcagtacacactgctggtattgtccctaggtgtgtgcatatatgcaacagctacagtttacatagcttgtggaccaaaatgcaacaagaaaagaaaaaaagacaagggaagaaaaataaatcatagcatataaaactagcaagaagccagttatcttacaagctataggactgaggcctatagatgtgcaaaattgaagcttgcatacatatatacatgtgtgcaaaagtcttttgcttcattgtgcagtgtggattggctggggagtttgaatattatggaagattctgttccacatatgacaagttgctttaatatgatatgttttgtagtagacattttatgagtacatcacatgacctttctccatctccacatgtggcccactgcatttgtggccaggtctagatctatctttgactgccaaaaatatgcataaaataatgagagaaattaaaaaaatgatggagatcatcaaatatcatatgatatatatgtacgtgatatggaagtgtggctagtgaaagacatgaagcaagaaaagaatgtcatgttcttctctagatcaggcccacattatctgatgatgatgacacgatgcatgcatgctagatgccgttaaaaaccagttctctagacatgttgtgtgctccacacagtgtgcctctcatttcgagattcctctgaaatcactactaattctttatcatatcatgcattgcatgcaagagctagatactgtggcgcttatatacatgtatctatgtgcatacaatttgctgcatgcgacaccactgttgtttgcatgtcgaagaacacctctgttttcgtgcaatgaactgattgatactcaggagtagtttgctaattagctaggggagatgcagaggtgactagaataaggaagatatactcactagaagatggcatactgtgcaaaagatgtagctgtttgtttgtctacgagtagtagatcaggtaggacaatgcagcatgcatagaggtcatgtgaagagaggagaccaccaccaattaccaaaacgtgtatatgcctgatcacttctctcagctccatagctaggctccatagaaaacagctgcatcttggactttaccatggttgccactcacatacctgcaaataaccttgtggaggattagacaattaattagagatgcacttgattaaagagagatctagatgtttatgttgtcctggctagctaccttagttctttacattattaaacttgaaggccactacatatgtgcagtacagtgatggtacatagatcttagccaatgcatgtagctagctaggtccacagctagtacacatttccaggtttcttattaggcatgtatgtatgtatgtttgtccctttggatgtaccctagtactacactactgaatatctagaactagagcttagctggggagatggatggagagaaagacacaagatcttttgctgtggttgcattataaaaagaggcttgattcttcttttaccacctctatgcttaagagctttttgtgttaggaaaaagtaaaagggagaaaaagaccactccaaagagggggagttgctagacaaaggaagcttttcagagaacatttccttcttttttttccccttcagatagagagtgagaggagagggaggaggaggggtcagaagtctcagagcattaagggaaaaactgattaaagtctgtgcacatataaaggagctgtaaagatgtgaatttaccacagctagctcctctacagcctcctgctggcttttgtcagactcttacacatgtgcatatgcacatctctttccccctcatgtccctgccatgggtggtgcaggagtatgtggtgcctctgagcactagatttagatgtttctaccttgacaaactaagccttgatcttgtgtccatgcatatcatgtagaagagccttctagatgaaacaactagctagttctacacccttcatgcatcatctaaatacatgcacattgaaagacagcttatatacttgaaaagagaaacaaatgtagatatggaatcaaattaatcatcaatgcaatcaagaatcaagagagcattcataagccctaacatacaaccccatcattttgtttatacataaatacttattcatacaacttattaatgataataattattataaataaaacttttatatgcgtgttcttaactattcaaaagcaaatgctgtaaaataaaatacgacgacaaaaccatggagacaactccaaaattaggttttaaaatttatattcaagcgaaacgacaaggctcatttggtttgcacaaaagtttagtaaggttgatttcggcaacaaaccaaacaaactctaaaagtccttttggcctatgaggttttcattcaatcccctccatatataccaagttttgcctgatcctctgaacatgtcatttaattttaagctctacatgcatggttgccaacccagtacccagaaattttgcttctgtctatctctcagcttgaccttctgacctgttgctcagctgcgatggaggagcgctagctagctagcaagctggcagcatggaaacatcatttcgggatggtgtcagctaccaggtcatacggctttgacgacgcacgcatgcaggcttgcagttgcacggctgcacgggccaaggtgcatatggctgctgatacatcagcgcagcaagcagcgctagaacaatcaagctagctatccagagccagccatcgatcgatcgcccccctgccgctgcctctgcagccggcccgtgcatgcatgcgtgctagctatagctgcgcgacaagcaacctaaacgacctagcgaagctaagcagcatgcagcctcagtaaatgttcttgccttactactagtaaatgttcttgcctctgcctgggcgttgcaatatctatagctagccaccagcattgcaggacggccggccggctggctggccggcatgcacgcgtccgtccaacctcgtgcactgcacacgtgactggatcggacgactcacatccgtgaagcttccaatatatctctcctcctctctttctctctctctctcacacacacatttaaacttgagcttgtgcaacctagctaccaatctgcagcatttcatggcctgtgtgtggctggggtgcagtactgcagtgtctattgccatcctctttctctctctctatctctctctgaagtctgaacatactatgacctcttctttctgagagggtcacaagctagttgccactgcctggtcttctgttgcttcacatggtgtcacatgcaccgatgcctcctctattcttccatttctcttctctttctttgattgacagataacagtttcatatgtttgcttgtgtgttatatatgtgtgtgtctactattttggccgatctgggtctgcatccattgcaaaaactacacaacagtgtctcttttttttactgcacctatggcgacatgcgttgcaaatttgcaatgtactacagcattagagagctaggggtagccatatgcatatatggatctttccctgcctctttgaacagaatctaatcatgctattgccttggcattggctactttctaaccttttcccctagaggaatcacagtctgctggtcaaaaaagttacaagagccagagagtaaactatatatataatagtattagtttctagttgcaagcaggacatgcatcaaacacagtactactgatagctcctatgcaagctcggctttaaggacgcctaccagtcactgccagtcaaacaaacatggacttaactctatggtttgagaaaaataatcatctgataataattgagtttcattagcttatagttaatgacatgataaaatatatacctggctagcttcatgtgtatatgcttcagttctagcaaaatggcaagtgatatcctatctgaaacagggtcattcagatgatggcagaaataattttcaagcactcctactaatttgttcatgacatcatgtgttacacatcacaaaagggaagtcaataaaaatgctgcacttgctatgagatgtgagtatgtgactttgtggtggaggttctgtgacataaatgagggcctgaacagctctcagatgttccaggctttcctgcttatgcaagtagtactaaggaaatttaaaatcgcaacatcttctgctggtcccaaaggatgcaacagaatttactgcaagctgaattccagcctgattcgtcagctcatagctgcacatgtgtgtgtacctcacaatgtcaatgcatgtgtctgtctcctttaagcatacagttccaggttcatgtcatcttgatgcatgtttatgcatgcagaatgtagtgccggacatatgcttgatttgctagactattttgattttgcgattaagttattctaagcatgtaaagtccaaatcatatccgtgagcagcaatgcgcaagtgcaaccatatacatatttgctgatagcctgatactactcctaatgatgatttgaggttatcatagataggcctggtgcatttccaactgatcaatttgtatagcaaaagcaatgccaactaatagatcatatggcttgatcgactcgatctgcatatgtggagcacgtgatagccaatactcctatatatacgcaaggtcaatggatgagatcaagaactgaaatgataacccagaaaaaggcccaaaagagtggttttgtgttgctaagaacaaagctacatgagttcttgtacttctttagtaatccatggcgtacttcctatcaatttcttcaactcctaattaattgatatgatgcttcaatgtctacattttccctcccagccatagaaattgtttccaagaattaacaacaatagaaacagtcctgatttattatctgaaaaggcacccaaagggcaatactggaaatatgccaatatttggcagcaggaacactaacatgggatgctagcttctgtagagcaaaaaagagaagtggctcaggccagtagagaagtgcatagctgcatatgcagggaattaaccaagtgatggaggaatgttgcaagcaatgattgtcctagcaagctcctttggcacacatgtctcgctagattctgatgcaaagatttagatctccaacagataaaagcaggcagtagtagtgaaagagggcagggggggaaaaggaagaaaagctaaatgggaatcattaaaagttgccagctttcagaaccctgtgggtccagtttggatcaaggagaatcacaaggcccaaagagccctccctccaaagatgaggagttttctaaaagcctgtgtgagctccatattgtaacttatctaccaaaagaatgttgtgttaagacatgcatggtagagaaagatgaaggctgtctttatagggaaaaggagtactgccggtactgtattgctacacacttttttaccatggacagcaggaatcctaagtagaaggatcgaatttacttgtagctacacagtgaaacaaccggctactgattgcctactcaaaattcgctttaggtcaaacagataggacagacaatgaagaacaactagaaaaccttcagaaagcaggctgctaagcattccacatttcctccctacacgtgtattaattagtgtgtatgctcgtgtatgatatgaacaagatttctgctgtatcaagacaacaatggacatctcctggtcactctacgttgtacatacatgcatagaggatgcagatttgtactgtagagaattcagatacgtacatacctggcacagtgcagtcagtcgtcgatccagggagatggaagaagccaaggacataagatccaagcagaactggtagattcctctagctcggacgtcctctcctcgtcttggcctgaaccatcatcagcaagcaagattagacgaccggctctgaagcctgaacgtgaagctagtggtaaacaaaacaaacaacaggatagcctggccggcactgcaaccgtctcgtcaagccgaccggtggacagggcgcctgcaaccggtcatgtgcgccgcgcaggacatctggccatgcatcccatcgtcgatgcctccgaccgacgatcgagccgttgcaacgaagagttgacggtgtacggcgaaattagcttgagcccggccggcctcaaactgaagtggagccttcagaaatgaaggagagaaaccaatcatcacaggcatgcagcaacgtacgattcgtcgtcgtcaatggaggttcaggcgtgtcgccggagctgggagggacaagatggcaaggccggcaggtacagccacagccacacccacaggcaggctagccgggatgccggccggcaagatcgatcggctccagctagtttagctcccaggccagtcaaggtagaggcagctcaaagtgtagtcatctcttgatcgttgattgctccagtcctatcccatgctcctccttgagctcccaatcattgagctctcggatcctctctgctcttctctgatctggtgtcgttccagtttccaaacatgttgcagaatgaagaacactgaacaacaagattataaggtaggtaagtagttgatcatttcaggtttccagagatgataaagcaatcagggatgcatgcacactgatgctgattgtacaaactccaagcaagtcaggcccaggtccaggtccaggtccattaggtttctgttcatttgaagttggtctcaatcagtttcagacaatgttgctgtaaagataatctctcgaactccaaggctatatcattgctggccatactgatagaggttgtgttacctgaaaggttgtcagaggacacaaaccaactgtcacgccgaccatctttcgtcctgggaatgcgaggctaccattaactccccaatgatgtcatttctctgagcaaataaatggtacctcatgtatctccaggaggaccagaatagcagcaagaactgcaggaaagaatgaaacaaagccaagaggatgagccaatctcaaattattacatgatactttcagcaagataagcatactaaacttcaagttaattgatgaatattattacaggattctactggttctcacaaagaccattgaatagtaagatctatagcttcggtcacttcttagaacaggaaaaacaacagtactagctaacgttcagcaaactaactgtacatttgtttgatggaggacgcatgacaaatgcaagtgcgatcataatgaaaggaaatgatatgtgaacagaagtagaccatcatatttggcatcctcattgtgttctctagttcttaagactcagtgtccgttgccgttctgtatgaatcactctgagaacgatgttttctcttactctttctcttgcttcttttttcaggatttttccttcaaagtttctttcatcagcttccttcctccctttctttttccagatcaggattttcaaaatgatagggaactggcatagcttgcttcttcagcttggtgctcttatgctgctgcatccttgagggccgggatacgtagaccccgtcattcttgcactagtatgtccaatgaccaggctggaagcacttctgacattgggtatgtgcagcaagagatgaagttgctgaaacttttggtttcacatccaatattgcagctttctctgtactaatcaggtacatctctcacttagccttcttcctctcctgccagcggcttggtccctcttccttctgcccataggtacattacgggcagcagatgtggcagcatgtttagcttgagacctgttcaaccctttagctgctgataatgcggctgtctttatacggtctactgcagctcgggatttatcatcgtttctggacatcttgattcacccaaattagggcagataatattgcgaggaacctcaccatcctgaaaggaagaaaaaaactatattggttagttatgagcaagggataatttcatctatagtaaacaaaacctaaaacatctggctaggtaattcactaacatggtcacatgaatgcagacataaacttttctgtttactcaggcttaacaccattaagccctgtaaagcacttacaaatggtactgctcataaacaacaaatcaaccatatgtattttacagttaagccttcgtgtatttagaacttgttgttgtacaattaaatcgatgaagattctatcatggcgtatacatttcaatcatatagaaccttaaagatatattttaagccaaagtaaggcagcggaaatgcaaaattgtatcaaatgctacacttctacataaatgtccgttccacgaacaaaacctctaatagaagaacatgccagttgcatactctcacagtactacacaatcagcatccaacgtaaccatcataagattgtgagaatacataggaaaccacctcttgagaatggttgtcagaatctagcaacatatacagctgctattcatagatataaatatacaaatcacaaatgattgatctgaatgacgtttaccgaaactacaacagcacaactcgaccacaagaagcatgcgaaattctcttgcagcaaggatgattagtactaattagtaacttggtgtgcatagcactagcaaggaagattagtactaatcagtaacttggtgtgcatagcatggcgtaaaggtgaacattctaaatttgcagggacctcgttaatttaaactagaggtttccactacatccatctcgtgttgcttaaaatctataaaaatactccctcctttcatattataagtagctttgacttttttttcttagtttaaagtttgatcaagtttatagaaaaaaattacttcctccgtttcacaatgtaagtcattctaacattttccacattcatattaatgttaatgaatctagatatatatatatgtctatattcattaacatcaatatgaatgtgggaaatgctagaatgacttacattgtgaaacggagcgagtagcaacaactataacaccaaattattttcatcaaatctaacattgaatatattttgataatttatttattttgtgttgaaaatgctattgtattttcctataaacttaatcaaatttaaacaagtttgactagtaaaaaagtcaaagcgacttataatatggatcagaggaagtaactcataaactcaattggacccatactttgtactgctagagaatactacccccaaaatcaactagattgcgccaaaacaatacagcaacgaaatgagcaagccaccccccgccacaaccaacccattctcttccattgcctcgacaccaaatcgcccctccaactgaccgctccaagccccccacgaaacccctcagaccaacccacctcgtcgactacctacagcaaatgcgactcctcccccacaacgactactcgccggatcccggaggcatcctcccaggaaggaagcgacgatacaggaaggggggggagtgggaggaggaagatcgattaccagttggatcggagcctcggagccggaggagatcgccggtgaaggagagcttcgcgcgcgctaggtttggcggtgggggagagcgcgtggggggaggcgagaggagaggccgtggacttcggccgcataacatgggaaatgatgggccatagactaggcctgtttgattggaccaaatttcggcccattgacgcatacccgatgtttccaactttgtgatatttacgcatactctgtttattttggaaaaaaaaaagtcatataccctccctatgtttccaactttgtgatatttgccctctttttgttggaaaaagaagtccatacactcctaacacctttagataagagtccgtctaagaacatccccagcagatatgccatccgaacatccatccagaaaatagcggttgagaggagaaaaacgacctcctgcagaaactccatcccaccctccaacattagcgcatcatctatccgggagagaaaaatgccagatttggcgttcctctctcctcacgccatcccgcaactgctagcatccagacccagttcccgtcccccatctggatcaatgccccatccaccgccgtcgtcgcaaagtcgtggagtcgtggaaagaggatggagaaggagaagcataccagatctggaaggagagcaccgccagcgacagccgtttgcgcccgctgccgtcgccttgcgcccacccgcggaccgtcgcctgccgcctccgcccctcgcccgtctgcccctgtcctatctgcgcctgccgcctgcctcctccccgcccatccgtgccccccgccgacgcctccgcccatccgaaccccccggacgccgccgcccctcgctagccccccggctgccgcctaccgcctccgcccctgtcccatccgcgcccgccgcctgcctcctccccgcccatccgtgccccccgtcgacgcctccgcccatccgaacccccccccccggacgccgtcgcccctctctcgccccccggccaccgcctaccgcctccgccctgtcccatccgcgcccgccgcctacctcctccccgcccatccgtgcccaccgccgctgcctcctcccatccgcgtcccccgctcgccgcccgcccagctgccactcctcgcttgccccccggccgccgccgcacatccgcgcttgccagctgccccatccaccctgccacaaaagagaaggaaaggagtagagaagagcagagagaaaagaataagaaaagtgtgaaaatgaggaaggtagcagttgaacacatcacattgaaaaaaaactcactcaatataaatatatcaattaagaaattaccaattaaaattatatccattaaaatttacttatttcgaaagattattgtgataaataacatcattatcattaaaattttagtgatccaaaatatagcccttaaaaaataatacaaatgtaaggtatgttagaaaatattactaaaatacagttaggtgtgatatggatgatctgttggagtaagaatggatatggaggaggaatcttcatatggaggaggaatcttttttggatggtcatccatatgggtatatggaggatcaaatttggatgagctgttgaggatgctctaataccataacttcgaaccgggatatccaacccttcaaacgtatacaatcctccaaactttgcaataattgaatggttttggatggtgattttgcgtaagcttaaaaaagcggttttgaaaagctagtatcacatatttacatatcatcaatcattggtcatcaatttatactctctagtgacgtcgtactaatattatatcgatattcatttgcgagagctaaaaaaaggttaaaaaaagaagatttaaatagagattttaacatatcccttcttcctataaagttatcccccactaagtgcaattaagatcctaaagctcaaacctcaatgatccacgtcatcattaatttacagcccttggattggtatattagattgcatctgcaccgttggatgcaatctgcctcaatctgcctcggggtcgaacacacctcaatgaacccaggaggcccaagtcgtgaggcccaggatgcccaagtaagtccaatgagggattttagggttcagtatgtctcatctcctcctgacttcctgagcggagcagcggcggcgtagtacggcggaccctagcgctcgcccaccacgtcgcgatcacgcgcaggtggtggtggggacagggcgctcggttgcaggaggcggcgatggcgcgcaggtggtggtagggaccgcgggaggtagcgatggggagccgtgtagcgatgcggcgatgggggagaagcgtctggactcggcaaccagcgatgcggtgatggggagaagcgtctggactcggaaaccctagcgccatccatccgatgggaagaagcatcaggaaccctggcgccatccatggtgaaatcaaccgccccctccccatcctcttggctagcagaaacggtaatcaccatgcttcttcccattccccgcccttaatgatgtgcatttacattagaaacggccaaaatcattatggtactggaggcacgatggttaatacgatttacgtgcctcttgcaatttcacttcgtaagcctcttccaaaccttttgataatcctcttgcaatccccagtcctaccagacgtctcctcaaacatgtgcctctccatcagacatcatccatccatccgcaagcctcagtccatacctccctcgacatcatcacttcatcctgcaagcatattctccaattcggacatgattgcgatcacggcatgataggttagttgtggatcaactttgtcagatcattgtatgtaggcttcgttactaattttgtatgtctgaattgagttggttctttgccctaagtactgattttagtttctgaaaaaaaatatgtctgaattgagttggttctttgccctgagtactgattttaatatctgaaaaaaaaatgtgtgaatttattctatttgataagcctgaatttgacatcaattttgtccatattctatttgagcaaacattatgatttcaaccaggcaagatcactatgaaagctttgtaaattggattctctacacctaaagaaataatccctatcctatgcactgattgttgttcgagttatttaagaaaaataaactgatatttgcagtggatacttatatgtcctatgtgattttagtttctgaaaaaaaaagtgtgagaatttattctatttgataagcctgaatttgacatcaattttgtccatattctatttgagcaaacattatgatttcaacactgatttttgttccagttttttaagaaaaaataaactgatatttgcagtggatacttatatgtcctatcactttaatgcatttgagcagttggtgaggagccagaggattgctacatagatgtcctgacatagcgagaagctactaacctgctcggtatgtcttctgttgagctcaccccatgctattcatgtttcctgttaaaatgtgaaaaaaaatcatttaaaaaacatatgttaaatgttatcaaaatttttgaaactgtgcacatccatagttcatgttatgatgcgtttttgtcacgaaaaaggtgttaaaatgaaagcttttggatgctttagtgagtcagttcagtatgtgtaaatttcacatgatttttctcagaataatatttgagcatacattgtggattttgcacatgcaggagacctatgcactgggtactgttttagtttcttaaaaaaatagaacctgcagcttatactgtttttcaaactatgcacattcatagttcatgttatgatgcatttttgtcgcaaaaagtgtgataaaatgaaagcttttggttggtttagtgattcagttcagtatgtgtgaatttcacatgaattttgccaggttatattatatttgagcatacattgtggtttttgcacatgttggagacctatgcattgagtactgttttagtttcttaaaaaaaatggtgcctgcagcttatacttctttcacctaccctttattaatagatacaagaacatttgtttcaccacttgaggagaagcctgacaattgtcataaaagcagataaacttgctcggtatgtgtgctgttcaactcatcctatatttttcatattattttgtacatctcttttctgatttcatattccagttacatcttatgcgtatactcctacatttagcaaatataataaagttacatccgatatttgtaaatatatgatcagatgctttgttcattaaaactaaaaaacaaaaggttcagcccatggatgctgggcaaagtacttcatgttttccagtaggacgtcgccggtcaagacgtccactggcacatattttggtccctcaccctgatcatgctactgctgctgaatcacgacgaaaacgtaaactcatattggatgcccatagaggtagaggttggttccccaatttaccccttcaaattttttagtaatgtaaaatttatcgttgcctacctaccttagttacccggttatagcctatctaattttgtacccacattcccttcacaacatatagcatcatcttcagaacaacggtccttgcatcgagagttgaacagaactgaaataggctcttcatctgcatctactcctccattggctaatgaacaacgaattattggaatatcctctcattcccagtcagctgagagtaataattcttcatctgtgtctacatcaaaccaagtatttcgccatcgccgtatgttatcatatcctttatacgtaaaatttgacatatgccaaccttacatcttatatataacagtatctgccatcttccattgatatactttgttaggaacaatctatgctccacttaatcttggcagcccccagcattcttgcatccattgtggtgctttattttggtatgaagaacgagcacgaaaagaaaggcacacgaggaacccaacatataatttatgttgcaggggggaaggatatcactgccatcttataatccacctccagaacccatattgaatttgttaacttctgcgagctccctttcaaatcatttcttgcagcatattcgtcgatacaattccatgtttgctatga

SEQ ID NO: 5273 - DNA, 64684 bp, Oryza sativa
cgttcagcagcttcttaggtaatctgtgatgaataaaaaaagttaaggaattagtacgccaaagggaaaaatgtaagatggatctccctcacctgaagccaatggctaagggggccttaaccccgccctgatcgggggcgccaaccccaatggctggtgggcccccgtcacactgtgccatataaagaggggtggaggacgggacggcataacgacacaaggaacgaggttagtcgccgccgccgccactccaccccaaaaaccctaaccgatcgagggggcgcagccagtgacgggaagactccaccgccgcgccacgacctcgccgggatcccctacgaccaccactgccgcgcagcaccgtcgccgtcacgaccgccatcgccgccgccgcccacgtcaagcagagcgacgacaacgacgatggctgggacttcctcttcatccaacgcgtcaaccggtcacatccctaaaccctttcccttattctctattgttgttcaatcatccatcgcaaatagaaccacccgactagatctaaacctaggtgatccaatagacaacactaacagaaactaggcccgtttggttgttctcgagctcacaaattagtactatttctttaaaaataacttttttttaattataaaacaacatatcaactttgtagtgggtactttattgatgccttcaaaattatcataaacttagagtaatccatcattaaaaaaaattaatcgtttcggctataactaagcttatcatcaatgagaaaatgattcatgggtaaaaattttatatatgtattcttaccaattttatataaaactaatacgaagtaatacacaacggtaaaaatcagctctaaaaattaaatttaacaaaggatggcgtgtgttacatatttcgcttttttaacttccactcctattattttttgtgcgctacccaaacagttaaacgatattttttttttgcaaaatttgatagcaacgctgtgtctgaaaaatcatattaaccattttcttaatttttagctaataattactaattactaagtaatacttcctctgtttcacaatgtaagactttctagcactgcccacattcatttagatgttaatgaatctagacatatgtatgtgtttggattcattaacatctatatgcatgtgagcagtgctaaaaagtcttacattgtgaaacgaagggagtagtaatttgttaatcctctgtttcatttttgcttagggatagatttgcaattaaaaatactccctccattctgtaatataagaaacaaccacttttcttagatgttccatgataaaaggcatacaattaattatggtatcttttccattaaattattaccttttaaatcctccactcccatgttatctaattctattgaatgcatgtattatattattaggatgattcaaactataagataataataattatttcttgatttttgagttaaggatggttgtgccttatattttaaaatggagggagtagttggaccagatgagaagtattaccaggtctgaggcctgtggtgcgcagatctttttctccagggagccgtaggcgaatgttccatctctcctctcctcttctcctctttattactgcacgcagagagctccagctcgcgctgctccgaccaccgccgcgccgctcgccgcctccgccaccgcctccgccggcaaaccaccccctcgccatggcctccccctgcgagcaccacgtcccgtacaccctcctgggcgcgctcctcagcggcggcggcccccacgccgccgcgtgcggcggcgccgccttcctccgcgactacgcggagcggggcaccaacgcgctgctgtgggcggccctcctcgccgtcacgtggctgctcgtcctccgcctcgccgcgctgctccgcctctgggccctcggcgcccgcctccccggcccgcccgccttccccgccgaccctggcctcgccgccggtgacatcaccggtaggtttccgtcgtcctcctcctccttcctcccttctcttccctgttcgtgcgagtagcggttggtttggtggtagttccggtgggtacggatgcggagctactgtggaattggatttggcgcgagttcggcgccttcgcagggtagaattattgggcatatggccttctctttttatgcttgctcgggtttccgtgggaactgttcgattgggaggaacgttgccgcagtttgattcgagattcagcaactcatcatcctccagttgctacgcgagcgacctgagtacggtgatttgggaatctgttcttattttgattaattgatgtgggatttgatttagttgggcgctgatctgggtggagttcgattagaatgtcaaatcggctgatttggactgtgtcgaattatttgatctgttttacgacagattcgtgcccaaatttgtagcttcagtggctgtaagcctgtaatatttccgttcctctttgaggaagtggaacctgctggtatgaggtaggggaagacaaaaaaaaaagaagctagtgattgaggtatgaactgtttttggcggatctgttttccagcaactgagcgtgacctataaattgttgcttaatttgttttgccgtttagattctagagtactttttactttttatgtgaggttgtttttgctgaattttcatattttgtaagtcagcaagggaactgaattattaccaagttgaccttgatttgggatatatttccaaaggattggacggtgtagagatctgctacgtattactttgaggtttgtctgattatatgaatatagtagaattcccaggagaattgaattaatactctgtttcctgagaaaaaaaaacacatttctcatgggctcatggcaatcggatcaaatcaaatctgtcatcagtgtatgctgatcttcatgtcaattgtctagatctaatcctccgctcttcaatacatcttggctattggtgctagagaacaatatcggtgcatcatgtaccctatcaaaaacacctgcaaatggtcattaaaaagtgtgaggtaatttgaaaacaatgatactgcatggatctacgctgccacagtttctaaattagtttaacacagggcagaaaattgaatagacagattttagtaaacaataatatagtaccatcctctttttttttcaattatcctctttcagttgattttgcttctttatttcaccttccatgacaaagttcgattttaaactatgtataatgaattgtggtctggtatatccattgtgcctgaatgttttcagtttttctttaaaataaacatttacaccttattttgaatacgatgtacatgaaggtaggatgaaccgtcctaccctgacctgcgccaaactatgatttaggaaatattggacaaaaattgctgaaataacctatctggatgaaaaaaaacatctcccttatatgaataagttgttcattacgattttgccagatgaggattgagttactaacagaattcgctgtgcataaggtaggtgttttgcatataaatataggaatagataggcatcacacgagtattttactaactttaatacggataacttttttttttttgcagggaaatacggataactttttgataccatgctgtcctatgtttgtggcatcatattgtatttctcatttttcctgtttagtcaaatgagcatgtgcgtagactggcctagctcaactctgtagtctttagggcccgattatacaatgctctagcacatggtgcatcaaatactctacataacagatagtcggttgtacattgttacgcataaaaattctggaaagaaatagctaatgcagattttgagcagattcataattgcgatctaccagtatttgttgagtaaaacactaaaactgtggatggtttgatttctgatcatattcccctgaactgctgtatttcaccactgatcatatgttcctttcaactgcattattaaacaggctacctatcgaagttacatggcagttatggcccagttgttcgactgtggctcggaccctctcaactgcttgtctcagttaaagattctagggtaattaaagagttgctaacaaaggctgaagataagttgccgttgactgggaagacatataatttggcttgtggaaaacttggtctgttcatttcctcgttcgagaaggtttgtgtctcaaatgtgataaaataccatatgcagtctgctgtattaatttgtctcgtttgccttgcatatttttggtgatagttatcattcagatggcacatacaattgctgattcatctccgctattcttttaatgcttttctcctgcattttcaggtcaaaagtaggagggaatcactgaagtcattcctggatgaaaaacttagtgttggtactggtggaagttccttcaagatcattcaaattgtccttgatagagttgactccattatggccagggattttctggactgcagatatttttcccaacacatggcatttaacattgttggctcggctctttttggtgatgctttctttgattggtctgatgcttctgcctatgaggagctgatgatgacggttgcaaaggatgcttgtttctgggcttcttatgcagttcccccattttggaaacctgattataggaggtacagaacactatgtgctcgattgaagctattaacacaaggcatcgttgcaaaatcaagaaaccaaaatggtgtacttagccttattgatctgagttcctgtcagagaagtgaaaggatgataaaagatccatgcagaggcttttctctgcttgatggtgtgatttcaagtcgttgtctcaacgaggcagctgaagggcctctcagctcagaagaagaaatatgtggtaacattatgggtttaatgttgcatggaatttccacgtgtgctaacctaattggcaacatcctaacaaggcttgccttgtacccaaacttgcaatgccaggtacacattatttgctttatttctctgttgcaaacaatcctggttgctctttatgtgatgattggtgcttgttactgcttttttgtttcaataggtagttcctttacctaaacagatctctcccagttatatatatgttacaatgttgcatattgtccagtattgctccttgttctttgcttatgcaatatatttctgcccttcatgtagtatcatgatagtctcaagttattctggttttgttatagcattcctttgttaatttgacaaggctgaacttgtttcttcatttatcttcgttgacatggaaactgcttctttcaggcggttgcattgtatttatgctgtttctctgacttacatgtgctgttttcctacagctgcattcggagatagtttcaggtcacagtgaatcatctgagcttaagatagatgatgtgcttaggatgaaattcctacttgctactgtatgtgaatctgctcgacttttgcctgctggacctcttctccagagatgttctttgcaacaaggtatacatatcttttcaataaaacttaaaaagtaccgatcaatgaaaaatgaaaaaatattaatagtgtacatagcaccacgtttcataccctgtatttcttgaggccatttttattaatatataaattttcttatatgtcctgaaatgtcatccatatcatattatcatatgattttaaatggagatgtcttttcttcatcctgatcttgctgtactgtattgagattatgctttggttctgaggttccttaatatatccattatccagttgtaggagaaatcaggtgtacttttatttcatttatttttagctcttgtgtgaagtgtgagctctagaccttttggattacctgctgtacattattgatctccttacaatttccttgagtgcagatgttaatcttaattccagcatcacaataccagctggagcaatattggttattcctttgcatctcgtgcaaatggaagcttctacatggggaaatgatgcttgccagttcaaccctaatcgtttcctcaaaaaggaaattaattttgaaggtctctccctctgctcccttcattttcctttccgcttgttcatttgtgcattatctcaatatgttttcttcttttacttgttttactgcagagatattagcggcagcacataaaggctcaaatgggatcaacctcttcactgacgagtgtgataagactgaatcattccttccatttggctctgggagtcgagcatgtgttgggcagaagtttgcggttcttgggatcgcaatgttgattgcttctctgcttcgcagttacgaggttagatgtgataattttttctgtatcttggcatggccatgtgaagagacacggccacgaactctgttatttattaccctaaaaaaactgttatttatttctattcactatgagctcagcgagtttctttagaacaattcctgactaaattatggttacaccccccttgagttataaaatttggcccttattaaggttgtattctaaacttgtgatgttgcttggaattcgaacctgcaggtacaacctcatccagctttatcccaagaaatggaatcattagttgacagcaacagccttcaccatattccgaacccaaagatcatcctcaagaaaaggagcatctgaagcagcaccttgacaaattaaagcttgacgcatttacccttgattacaatatatgttttttactggtggcatgccaggatatggtctctgttttttttcagaagcaatatggtctccaagcttgctttctttccatcgcagaaaccgcgacgtggatggttttttcctccagatttttaacggccccagtgagcttttctagacctagtttccattaattagcgttttgaggcacttgtgggcggttaaatcacaggaggtgtgtaccgatgtgcataaaccaatagtagcttcttcttttttcttttttttttccggttggtgttttcttctccttctggaggaatgtaatgttttatgatgcactgtatggctgtatcgtgcgcgggagcgcagaatctgttactgagtttagtgtaccatgtacctatatatatggtcacattgtattattgttgattgtttcttccaccgtaactggtgaagtttctcaaaaagaacattggaatttgtattgcctggtttgtggacaaaacatcaacaaaaaaaagagagaagaaaaaacctggtgactttgagtagtacgttatcgaattatgatattttaccatcgtcgtcgtctcatagtagtataccgtagtggtagtatactactagtagtgtgagtgtgtattattttacagagagtccgtgcttggattgcataggcgctgtttttggcttcgtctcgagctgcattgcctgcatcctcttcaaatcttcagagatgagagaggcaacggcgcagagcagccaagcatggacggagccagtcggtggtgtatacgtccaagtgtccaagccgaaagctgcctcaccatctccctatactgctttgattttttgtttttggttaattgtttgtttttgggatgcaagtcatgcaacctgcactgtggcagtggcagtggctagcaggcgagtgtgccgctagcgcgcacttcccacttaactatctctattagttaacattaataacagtaattaggaatttttttaaagattttatcttttttttagatttttttattaacagattgacaaaaatttaaactaaatttgaaacttttgatttaagattcaaattttaaagtcaaattttgaaaacttttaactcagatttgaaactttcaacttgacaagttgatattcgaaaactttaaagtccaggtttgaaaattttgaaaactttcagcttaagatttgaaaatttttaactcgagattcgaaaactttcaactcgagatttgaaaactttcaagttcagatttgaaaattttgaaaactttcaacttgagatttaaaaatttttaactcgaggtttgaaaactttcaactcgagatttgaaaactttcaagaccaaatctgaaaatttttaagttaagatttaaaaattactagtaaactaattatgattttttctcctacccgtgcgacatcgaactgtgaaaaaaaaaggaagaaacatggcggtagcaaatgggggatttacaattatgacactgcaaacattaactgcgccaaaaaaaaaagagaaaaagaaacacgtgtgtgggccggaagtacgcgttgacggcgcatacgcgggaattaggaattctgctggcggtccggcctgcacggtgagttaccacgttggctgttgatcgagagattctccggtcagaattttctctgagaaaaagaaatctgaggatgcccggcccaatatatggggcccaaaacaagcgagcttttatgggccgtgacgagtagccatcggcccatctccgctttcccttgttgaggtcaggaggccgtggcccgtgtgtgcgacatggtcgcacttccagccccatcttttgcttatcagccaaaatttaaatttttaacatttaatttagagttggttttgggatttttttcacctaagtttattttttagcctctacttttggatcgttaagaatacgtatataaaagttgtattcacaaattattttttttatgtaaatatatgaataagccaaacgatgaagcctctcccctcgcccatctcccgacggtcgtctcctccttcctcttaggctcgtcggtcgccaatccccccatctcccgccgcgcgcccgccgccgctccgcccgtcaccaccctgcccggcgtctaccacgctaagatttccgaactacggtatggtacgccgccgctcgcctgtggttactctactcatcttctcgctttcatatactattgtcggttatttttgagtatcctttctcctgcctcctccgaggagaaagtgtgctatttccaggggcagattgtcggatcggcggcgactattggaaccaagaaaatttgggaatatttgggagcccttgggcatatcattattctagtcggactctcaatgctcatgtcccccccacaaaagggcagccgaacctttgtcatgaacaacaaacacgagcattgggtttcttggcttcctaggcgcataaagggctcttaacttcgttgctgcataaaagagtcaggtcgtaagctttgggctttcaacatagcagcttcgctgcagaaggcaagtcagattccacatggagatagataatggacacacctttgtaagttcttggtttcaattataagtactacatccgttttttaatagatgacgccgttaactttttctcacatgtttgaccattcgtcttattaaaaaattttatgcaaatgtataagatataaatcacacttaaagtactatgagtgataaaacaacccataataaaataaattataattacgtaaattttttgaataagacgaacggtcaaacatgtaagaaaaagtcaacggcgttatctattaaaaaacagagggagtattctttagagttttaatgcttcaagccactaacatattttgtgtaatctaattattgtagcaagcggaggagggcgataggctcagcaatctacctgacgatattttgttggatatcttggcgagactcaacattagtacggttgcaaagacaagcgccctgtcaacgcggtggaggcacctaccttggtagttaactaagctggatttggatgttgcagaattcctacatgccccagcgttcagtagcataacgactgtgcacatggatcaagctatgtcagctctcaccaaagcagctacgagtttgctatctgtgccacagagagacacctccatcagaaacctatgcctcaaactctacatgatgggcagccactcaagcaatataggatcagtattaagtcaagcaattgaagctgggatagtaaaagaattggaccttgctgttttgcacgagaagagacatatagattgcaatgacgatgatatgcttcatcaagccagagctgtgaaggtctttgctggtgcttttcctcgtgtgatttgttgcatcacaaggctctctctgtacaatgtgcacctcgatggagacattcatcgtattcttttcgattgttgcactcagttggactatctgaatctcgagcattgcgatgatgggagccgcgatgtttggaagataaatgcgccaaattcaaagctccggcatttggagcttgcagtgtgcttctttgggaggctcgatttagtctgcctcccaaaactcgagtacatttactgggaaatttggttcactccttatgcccccttgtcattcggctcagtcccaagccttagggaattacgtctcgcatgtcctgcccaatctgacttccaaggcttgaagttaagcaaagttttacaaggtgtcccgaacttgcatactttgacaatagatttccaaggagaaaaggtaattgcataatcatttgttatgatctgcttttctattattggtacaactgttacgttgcggcatgttactcagaatgaggatctagcactaaaatgctgtgatagtttcagctggctcagttcaaccacttaggtgtatttaccttcaatttaaaaatgagaaaacctgtgaggtggtcaagtgtgcaaccacaccctcctaaattttggtttaacccctcttttgcttgtaattgcccgcaaggattttattatttaggagtaatcttgtttgtgcaatggattcatatatatttggcaatcactcacgtgcttcatttctgccttttgttttttcagttatggatgcaacctgaacaaaaacagctctgccctgcattcaacaatctaaagaagttatctattctttgcattcatgttgaatttgacctgttatggactataaacctccttgaagctgcaccatccgttgagctcctttgtattgatgtaagtttcctttttttttaatagagcgcaacaatagcatatgacagtaactgcaactggactatcattatgtgcacaaattaacataaccaagtgctcatactaaatgtagacctgggaacatgtatgcttggtaaacaaagaggatgaagatggaagaaagcttgttcatggagaaacaacacatccttcatgggagatatctgagttcactggcaccagaaattggcaattgaaagaactccagttcactggctttaggccactcaagcaacaattggtctttttaaaggccatcatggagcaagctcgcaacctgcagactgttattctgaaagaggaagaaccatgcgaggactgtgaggcattaggcacgcctctttcttgtataaaagatcatgacttcccaaagtcgaaggatgagcaagacaatgtagtcgagcagctcagagagaagatttcttcggattcgcaaataattttccagtgtttgtaacatccccttcccaaattattttcctatagttttggaaaatgaatatatcctatgtacatccccgtgtacttgctacttgcaacggaggagttgtttgtcactgaataaatatctggaatttctattttagcttcatcctgatatccaaatacgtgtggaagtagttcaatgccatacgtactggtagcattaagaagaaccattgtaaatctaaccaaagatattactacctccgtcccaaaataagtgcagctgtaaatattcgtgctcaacgtttgaccgtccgtcttatttaaaaaatttgtgaaaaatttgaaaacatttagtcacacataaagtactattcatgttttatcatctaatagcaataaaaatactaatcataaaaaattttgagtaaggtgtattggcgatccttaaacttgtagggttatatcatatagttccctaaactctcaaaatgcatatccagatcctagaacttgtcaaagtgtatcatctgggtcccaaattaactcatcccctctaggatcctacgtgacgctgatgtggcaatgccacatggacgtgacgtgtccttttctctttttttcttcttttctttttagttttcttctcattcttttttttccttttttctgtacggtccacagcgaaaggagaagaaaggggaaaaaaaagaggaaaaaaagaaaaagaaaaaaattaaatgggtcccatttgtcaatcaaaataatgccatgtcatgtccgtgtggcatgccacatcaacgccacgtaggatcctgaaggggttgtggcgatttgggacctagatgacacaatatgacaagttctgggatttagatatgtattttgagagtttagggatctagatgacacaaccctacaagtttaagaaccgaccgtacactttactcaaaaattttcagataagatgaacagtcaaacgttgaacgtgaatagtgcaaaactatacttattttgggacggagggagtaacagataaaaataatcattacgtttatgttgccaatgaatctctctctagtcacttttcatcggcaaacataaaatgcctaccaacaagattagctaaaaagaaaatagacggtgtactacaacagcacataccactaggaatgggctgggtgtgaatctatcctaaaattactgctccttttgctacgaaaaaccccacaagttgagcccgtgggtcggtgtgcctgatgtcccacatcttgtcacgccctttcgatctcctgggtgcgcacatatgcgaattctccgcccaattccgcatcttccccgacgctctaacgccgccacctgatctcctgccccgatgcaccgcctcatctcttctccctctctcatggcatctgcagcggctagctggtggtcaccattgcttgctcgaggaggacctgtccgtcgtgtttccggtgtgttttcttgtcactcgacgatttcaatcctgactgatggtaccatcttatttattttagatgttgactaggtaggtgtctgtgcgttgcaacgggtaaaaaatatacaccaatttaaaatcacaaagtaaaatgatgttgaataattaaatttgttaggatgaaaaccttattattgcacgaacaataatttcatcacatccttataagttttcacaggttagtaatacaaacagccaaaaaattcaagaatagaatggcacaataggtctcttagggcacgttcaacggttgagcccgccatggactcttgaataggctatgtcagagaaaaacaatagttctacaaaggctggctttccgatcgtctctccactaatatgcagtaattaaatttttgtagcaatggtgtcgtgattttctgcattttggatctaaatacgtgacttttcttgaagatggactatacaacggccattggttatctcgtctgctcgtgtttttctcattgtgagccgatgtcaggccgattgcatgcaaaacatcgatgcatctccattcttttttctctctcttccacatcatcaaatctgcttccatggcaataaagagagcccactaattaatacctttgtacatgccctagtacctcctggccctcttccatagatcctgcacgcacaaataaatgaagaataactgtgcagtaatgcaggaagtaaattaagctgaatcaagttgtatagatgagataggtttatttaaaccatcaagattaatatttgtagcatcatggttgcatgatcttccaaattcaacctgtagcttcgatcgaaaccaaacctgtacaaatggtcttcccagttaaagaaatttcaggctgtgctacttatttcaaactgaaaatttccaacctttgaaaaatatactaatttaaatgagacaaccgatttaagtggttcatagctagaaacaccataccttgatttttcctaataattatgtaatagactaatagttaacagattgagccacaaaactctattgtaataaattgctagattccccaaatttaatcactaagtgcattagttacttgtaacggactcaatttcaggggaaaaatttttacgaaatattttagttgcactcttctcaattcttcttttgaagtgatcttgccttctcttaatttcttttaacttggatttagactttatttgcaaagttaatcgcgctcttttaaattttgcaaaacatttctattattttctttaatctctaactttggctctagattatttttcctttgaatccattcccgaacatctccaacaaatactatttcaattcccactcaaccatctctagagtacaggaaaagttgatacctttcctttggacccccaaatatttcccctttgaaatctcgttcatctaaattatccattcaagattttaaagtctactatttagcttgggccaataattcccgattgacccgactctttgttatattccattaaccattttatccttgggactaaaccagtataatttcctttttgctggaatttattctagatcaaacccttgatctagacctatctttagaaatccttgttctctttcatacaacaccttccacaaactcctctagatgttccacttcttctatctataaattaaaccgccagtttgattcccaaggtttgattctttctagcacaagaataatatttccagaataattgttcttgtgctaacaaaccttttcaatccctcctattcaaaaggtccaaaactcctttaaaacctatttaaaaccctcccgtcaaaattcccttagttttcaattccttaaattctatttaaatttcttgtccaaaattcaaaaggttcacaaatatcttcctttataatttttcccctttgaattctagtcaaattcaaaaagtccacaaacatttcttcctatagatttcatctcctttgaattccattcaaaatcctctacacaaaaattccaaaggtttctattcaaatcgggctgaaattcctttttcttctcccctcagcccatctccctcctcagcccaagcgacccagccccagctgagccgcctccttcctcttccctgtgggcctgccgccgccgccgtctgcaaccacagcgtcgtcgccgtctcgccccttccagatgtgccgccgccgacgccgtgctcctcttctccacgccaccgtcaccgtggccaagtcgccgactgccttcgcaaccgtcattcgccaccgcctctcaccgcctatataagaagacgaaccccctccattttccacacaccaatcgagctcttcgagctctgcctctctctctctctcctgccatgtccggctgccacctaccgtcggccgatctccctcaccggaattccactaattaaatccttgcgccatcgggtttgcctcgacgaggtgaactcattttcctagtttccccttcctttacccttccgaaaccaaccaccacagccacctcctcttgttgccagagctatactcttgcctgcgccgttccggccatctccttcactccctttgccaaccaccgacttccccggatgcgcatcgttcgggaacaccatcctctaccggcgcagtcatatcttagccaccacagcatcggcgcccttcctctcctcctctcggttccctggctaacagagaggaagaaaacgaagcaaggagagaagaaccggaggaagaagagacatatgacatgtgggccccacttctataaagtaaatctttttcctttaatttccatttcaatcttcaagcacccatgtctctccaaccacagatcccatcccagtgagaccttgacctaaattcttctaatttcaaactcttttgttttgatatcaaattcctattttaaaattttatttaaatttctttatttgaatacctttttaatttaaacctatttgatttatcttaaatacctttaattttaaatttcttattttatttaaaaaccttttccttatttatttatttatttatttactttctaattttaaattattttaattaacctttaaaaattattttacatccctttaattttaaatttcttgttttatttaaaaaccttttttaaattttaattatcctttagtttctttaaatacccttttctttaccattttaaattttatttatttaatctatttaaaacccctttttaatttaaattcctttgatttatttaaataccctttttatttctaaatcattcccataccatcccttagccactaaaaatccgccgatagaactttacgccttccatggagacgttcgtgtggtctcaaaccccgacgtcaaaccgttggtcgtaaatcctggcataacctaatcctaaggtcgaagtgttgctcttcgcaccctacgcctcaacgcgtacagtggtcagagcctcactactccctcgacctctacagcatgccacacactagctttcggattctgtgcgatccaagccgctctgctgccactcacggctgtagggtaacactttccacccacaaacctacataaaccctcccaactctctagtcgttgtgccacttgattgtagcatcgactagatgggccgatatttagccgttatgccttaacatcggctaaccactccaaatatctagccgttgtgctgcgttactctaggaccgactagaaaaccaaatccaccaaataaaccctacctatccattctatcctttctttgtttttatttgattcccaacctatagaaaccaaaaacctctcttttgttttcaaattaaaatttattttgaactcattcctttttcctctcgcctcgctccaattttatttattccttggctttatcatttctttgtagcaatttgcttataggctttatttgttatcttttcgtattcgtacattagaccgtacagtaagttttatcagtaacttggataaggaaatccgtctctttgatggtgtcatcagtgagtcacgtggtttaaagaggtcggtggttgctgtaaggagggattctttcatagatttgaagttcgaagtgggcgcgtttccatccagtttcgaccagcattatgtttccttcaaggagaaaatccatggctatgatactcaagaaataaagactgattttgcgttaatctcagtaaaggtgacttggtcggctttgctttctggactagagtgatacctctgtttctgtaacagagtgggccaagagtggctaaaaacctgcggcttactaaacctaggtgcggcaaacttggatagtaaagtattgtaataaatctgtcattgtaattaagccctccgtccctgaaaaaaagtacttttagtaatgcatctgaataagtgtttgttgagatgcatagtcggtcaatctctccgtccctgaaaaactgaacaagaacttttagacatgcataattagtttcgtctctgtattattacttcagcactaggggttgtattaattatatggaggaatcttcaaggcacaaccgtagagtggcttctctgtgatttctgcatttctgaatcgtatgttttgtggttatagttatggttttggtactagtgcatacacgtaagttctcattttatcacaacttttgcgacactatggatgtgcaaagtttcaaaaattttcagaacatttgtgccattttcacatatgactagcttattaagtcgcgcgttcgcgcgactataacctttctttctatttaaatgtgtggatacgttgtttaattagtttaaataagtgtctgtgaaacatactttgcaataattgcagctataagggaacaaatttatcttgatctttttcatgaatagcattattataaaaataaattacttacatttatgaatgtgtcatttgtaatattgcaagtagacttgtaatatgaaatgtcagcccttctttcggcttaacaaaatagtaacatgtactctgtaatggctagggttaaaaacttaaggtttctattcatcttcgccattgtttcgctctcactatgtgtgcaatcataagctctctttctgttgcgcctatcatctaggcaccatattcgctgatgcactaccccatcctcctcttatgcatttcattcatcctcttgtttagcaaatttaatttaattttaaagtaaattgcgttgacggtacaataacttggcaggtgggtgcgattaggtgtaaaaacttgaaaatacactgtccagcgtagcggtacaataacttggctaggtgggtgcgcccatagtgcataagttgccacgtaaacaaaaattgccatgttaccattccaccttatcacaattgccgcatcggctttgacacgaaagacctatctcattttatagaaaaccacttaatatcatttcttgacgtacacatatctcctttcatctttcttaacgtgatcttgaggtggttgcgctggtggcggtggcgacgcagcggcggtgttcaagccctaaaccagtaaccaaaccaattcaagtgtcgacgtgatcgctgcaagctttgggatggctccgactcggcgagtttttggagcatctgctccttgttttggtaaatcacttgctgatggttgtagatttctatttcttgttcaattgatggatggtcgcaaagacatcagccaacactgagaagtggcacttcgtcagtcccaaaatagctcaccagatttgctaacccctgcaacccttgcagcttgttcttcagaataagctcctagaaaaagcaaaaatcagatacaagataaaataaaagtgcaggtaatttgtcgtagcttcaaagtcatgctagtgctagtacagatgaggccgctgcaacagctgatttgagtcccaccgagggcacgaccaccatcgcttgctctgaaaccttatgagtgatgatcgtcgccgccaactgcgagcccaaaccgtcgcggactatagtagtgtggagattatgggtaacccatatctacacggagacggtatttggattgggtaccggatacctaatgtagatagaatatcttatttgtatcttgggtttgtttcttaacttgtgtatcaaggaaacaccctgaaatttagtcggttacgactgtatcttacctatattttcatattccgttagggatatagattatcttttgtaacccggactccttcccatatataaggggggtccgggcgcctctaggggcagttgttgatttttcccgaatcatacaattaataatacactcggcggattcatccccggacaggagtagggtattacttcttttttaagaaggcctgaacctgtataaatcttttgtctccgaacccatacactttccaagcttgatagccacccccttttattattgccgaaatctagtttcgacagttggcgcgccaggtaggggttgcgtcaagcttttcgccgatcagtgcaatgggtcccgtcaccggcatcgacgacctcgtcttcccacccgggcaggcgtttcggttcggcagcctcgacttcatcaccagcaacttcggcaagatttctctccttgactcggaatcgaaccagtcgggagagaaccggatctcagtcccgtttggattcccaaacgcggctgaaacctacttcaagaccatctcactcgagtcggcttcaaaccactcggccgagatcgcatcttctccaacgacaccagatcaagatgatggggcttacccaccagtcctgatgaagctccccgacgatttagcggccgtcttcaccacaacagcgtcttcatcccgtaggcctaggcggaagtcagcttcaacaccgatttcgcctagcttcagggaagtcggcgtcatcctccaaccactcggcacggtttcgacggatcagctagatgactacaacagctctcccaccgtcgactcgcgccccaccgacatcgtggagtacgatgagtttagctctcgctaccacgacccagatctcgacgacttcgacggaagcctagatgacaactacacccctctctactttggcgttttcatggccaataacgagacggaggagcaacgccaagcccgggagactgaagaacgtcgccgactggaggaggagcgtcaagcacaagaacaagaacggctacggcgtgagcagcaggaccgtgagcggatcgccaaggaagctgaagatcgacgtcagcgagctttggaagcagggcgccgagcgcgtgatctcatcggccaacaagacgtcgaagggacgccggttttccgcacccctcagcagaatgcggttgccgcgatcaccctactcgacaccctcctcaaccaaaacgagctcaatcgatccgaccacgtcgtcaacatcttgaaccagaccaagaccatgattgcggcctcggttccagttaactctgaaagcgtccacacgccgactggtagccgagttccacacttccggtctcaagactaccgtcatccaagcctcagcatcaccggcgcaggatccaatcgcaggagcaggggtcacgacgagcggtctgttcactcacctcccgaccttcatagggagcgccgagtggaacggcctcgctcaccacctcgtcgccgccccatcgatcttcgcgatacaatcatacagcgccgagcagctcgaggctaccatcactcgctggaccgccacgacgacgaccttgacggagtagcagccttcaccgacgacctgcgtcgagtggattggccagccggcttcaaaccgactggaatcgagaagtacgacggtaccactaacccagaatcgtggcttaccgtctacggtctcgcaatccgcgcagcaggaggtgacaataaggccatggcgaactatttaccagtggctttagcggattccgcccgatcttggctccatggactgccccgtggtacgatcggatcttgggccgaattacgcgaccacttcatcgccaacttccaaggcaccttcgagcgtcccggcacacaatatgatctctacaacgtcattcagaaatccggagaatcccttcgggagtatatccgacgattttctgaacaacgtaacaagatctccgacatctccgacgacgtcatcatcgccgcattcaccaaagggattcgccacgaagaattggtcggcaaatttgggcgcaaacctcccagaacagtcaagctcatgttcgaaaaagccaacgagtacgccaaagccgaagacgccgttaccgcatcgaagcagtcgggtcccagttggaagccgaaaaatacgccggctacgggaggaggtggaagtaacaatcataaggaccgcaagcgtaagcctgaggaacttgttgcaaccgccgctcattcttctcgacagcgttcgcgcgtcaacaccttcgacaagatcatgaactcccaatgcccgcatcatccaaactccaaccacgtggccaaagagtgcttcatctacaagcagttcgcggagcagtacaccaagtctactcggaagaactccgacgaggaacaaagcacgtcaaggaagaaggacgacggcgacaccccggctggatttcaagaccaccgcaaggagctcaaccatattttcggcggccccatggcttatgagtctaaacggaagcaaaagttgactgaacgggagatcaacgctgttcaacccgacacgccccagtatcttcgatggtcagagattgcaatcaagtttgaccgctcggatcatcctgaccgagtggtccacccggggcggtaccccctggtactagacccagtggtccgtaacgtcaagcttcgcagaaccctcattgatggcggcagtgcactcaatatcctcttcgccaaaaccttggatgatatgcagatccctcgctccgagctgaaaccaagcaatgcgccttttcacggagtaatcccaggattatctgcaactccactcggccagatcactcttccggtcacttttggcactcgggaaaacttccgcacagagaatatcagctttgaagttgccgatttcgagacagcataccacgccatactcggacgcccggcgttagccaagttcatggccgtcccgcactacacgtacatgatgatgaagatgcctggtccccgaggagtcctatccctacggagcgacattaagcaagccgtcacatgcgacaaggagagttgcgacatggcccaaactcgcgagatggcgtctgcccgagaggaaatccgactggctgcaaccacggtgagcgaaggagaagtgcccaccgccaagatttcaaaaagtggggaaaccgaagccaagactaaaaagattcccttagatccttctgatcctaccaaaactgctgtaataggcgccgagttagattgtaaataggaaagcgcgctcatcacctttcttcaaaataataaagatatctttgcgtggaaaccttcggatatgcccggtattcccagagaggtgattgagcactccttacatgtcaaagaagacgccaagcctattaaacaacgactccgtcgatttgcacaagacaggaaggacgcgatcaaggaggaattaaccaagctgttagcagcaggcttcatcaaagaagtccttcatcccgactggctggcaaacccggttctagttcggaagaaaacagggcaatggcgcatgtgtgttgattacactgatctcaacaaatcatgccctaaagatccttgcgggttgcctcgcattgaccaggtagttgactcaaccgctggctgcgagcttctcagttttctggattgctactcggggtatcatcagatccgactgaaggaatccgactgcttgaaaacttcattcatcacgccttttggggcatactgctacgtcaccatgccgtttggattaaaaaatgcaggagcaacttatcaacgtatgattcagagatgcttctcaacacaaatcggccgcaacgttgaagcctatgtggatgatgtagtcgtcaagaccaagcaaaaggatgatctgatctcggatctagaagaaacctttgcgagcatccgtgctttcaggatgaaattaaaccctgaaaagtgcaccttcggagtaccgtcagggaagctgcttggctttatggtgtctcataggggcatccaagccaacccggagaaagttactgctatcctcaacatgaaaccgccaagcacccagaaagatgttcagaagctgactggatgcatggcggcgctcagccgattcgtttcaagacttggcgagcgggggatgcccttcttcaagctactgaagaaaacagataatttccaatggggacccgaagcacagaaggccttcgaagatttcaaacaactcctcaccaagccaccggtcttagcttcaccacacccgcaggagccgttgttgctgtatgtatcagccacctcccaggtcgtgagcacagtcttggttgtcgagcgtgaggaagaaggccatgtccagaaagttcagcgaccaatctacttcgtcagcgaggtcctcgccgactccaaaacaaggtatcctcaggttcagaagctgttatatggtattttaattactaccaggaagctgtctcattattttcaaggtcactcggtaacggtggtcacatcatttccactcggcgatgtactgcacaaccgcgaagcaaatgggcggattgctaagtgggctttggagttgatgtctttggacatatcattcaagccccgcacttcaatcaagtctcaagcgctagctgattttgtcgccgagtggaccgagtgccaagaggatacccccgcggagaaaatagagcactggaccatgcatttcgacgggtcaaaaaggctttcgggcactggagctggagtggttttaatttccccgactggagaaagactaagttatgtgctttggatacatttttcggcgtcccacaacgtcgccgagtatgaagccctccttcatgggctacggattgcaatttccctagggataaagcgtttaatagttcgaggcgattcacagctggttgttaaccaagttatgaaagagtggtcctgcattgacgacaacatgatggcatatcgacaagaggtacgcaaactggaggataagttcgatggactcgagctcagtcatgttcttcgacacaacaatgaagccgccgacagacttgccaattttggatccaaacgtgaggcggcgccctcagacgttttcgtcgaacacctttatacaccgaccgtgcctcataaagatactactcaagatgcggacactcatgacatagccatggttgaagccgactggcgagagcccttcatacgatttttaacttctcaagagctccctcaagataaagatgaagccgagcggatttcaaggcggagcaaactttatgttatgcacgaatctgagttatacaagaaaagcccttcaggaattctgcaacgctgcgtatctttagaggaagggagacaattgctgaaagacatacattctgggatatgcggaaaccacgctgctgcgcgcaccattgtcggcaaagcttaccggcagggttttttctggcctactgcagtatccgacgctgacaaaattgtgcgcacatgtgaaggttgccaatttttcgccagacaaattcatctaccagctcaagagttgcaaactatcccgctgtcttggccgtttgcggtttgggggctcgatatggtcggcccgtttaaaaaggcagtcggcggttacacgcatctctttgtggccattgataaattttccaagtggattgaagctaagcctgttgtcacgattacagcagataatgctcgtgatttcttcatcaacattgtgcacagattcggagtacccaatcgcatcatcaccgataatggcacacaattcaccggcggagttttcaaagacttttgtgaagactttggaatcaagatttgctacgcctcagtggcacaccccatgagcaatggacaggtggagcgagccaatggcatgatacttcaagggattaaagcacgtgtttttgaccggctaaaaccctatgccggcaaatgggtgcaacaattgccatcagtactttggtctttgcgaactacacccagtcgggccacaggccagtcaccttttttccttgtctatggggcagaagcaatgttgccgagtgaggttgaatttgagtctttgtgctttcgaaatttccgtgaagaacgctacgaagaggaccgagtggatgacttgcaccgattggaagaagcccgcgaagcagctttaattcagtcagctcggtacttacaagggttgcgacgttatcataatcgcaatgttcgatctcgtgcctttctagtcggcgacctggttttacggaaaatccaagccacacgagatcggcacaagttatctcctctatgggaagggccattcattatctctgaagttacccggccaggttcatatcgactcaagcgcgaagacggcactctcgttgacaactcttggaacattgaacatcttcgtcgtttctacgcttaacttcatcattgtatttccctattttgactgtcaacatcaagttttcttcttgccgttgtcagtcgggggctatcatcataataatggagtatgattttttatcaattcagtttgcttacttggtttatcattgccttgtttggtttttctacttagtttgcgaggactgaaagtttttaatagcttctttgggttttaggctcaaccaagcttagcaaaaacttttaagaaatcaaaaacttcgcaagaatcatcaagcacagcataaatacaccagtattgtacaaattgagcctccatgtattacatccaaactcaatcagagtcagtcctttcgtcatcagagtcatcattactcggctggaggtcgttgttgcgaaattgttccacaacatcactcgcaattttgtcagccgcagtttgcgcactactgataagatctagggcagcttcttcacttgtcccgtctgcaaacccatcaatggtgtcgacttcaattctcgggtacaaggattttgtcatcgccaaggccatgccagctcccatgcttccagccttcttgatattcttgaaatatacttccggagcaacactcagcttgtcaaatatttcggttgcgtcgagtgtactcggaccaccattattgaggaacatggcttggataattggtgcagcggcattggcgacgtcatcccttgctccttcaagcctcttgatcttaccaactaggacgtcaaactgagcttgagacttgattttccggtctacaaaacacatttataatcagaatctactgcatttaaaagaggaaagttcagatcatcagccggcagtaccttcaacttctttcaaggctgagtccctttctgcagccagttctgttttgtcttttttcaaggcttcaatctgtttttccatctgagctattctggtggcttgcgctgtttgaaatccaagtgtttgaggatgcaattatgacagcataaatcaatggaacagatctggatgattacctttggatgaaccactcagctcatagtttgaatcttggagctgagcgattcggtcccttaactctttttccgtctttttggcgcactccttggcctcatgcagctggtccctaactgcttctagtgttcccaaatgaggaaccagcttttccaaagttgtagtcttggcctcattgcgaagatggattctctgcatgatggatcatggttcagttctgctaaaaagaaaacaaagttaccgaaggccatcactcggaagacttacgtttacaatacgagtggcttctccgagcgctttcttcagctggcacacttcttcatcttctttctgacggtttatgactataccggcggcttgtgagttctcgtcccaccatttgatcaagataggaggacgagagtcgtcggtcgcctttatgcgagggatttcttctccgtcatcacctgatggtcctgatgtgtttccaagacattagacgggtacactgaggttatttaaatcgccattgtttgagaagacaactaacctgaagatgtgcctagctgggcgtgaggtgatctttgttctttacctgaagacccagctatcgagtcgttaccagcctccggtccttgcgaagtcgtcgtctgcgcttctacttcgggaatctcttgatcagggcctgcgtccgactggtttccagtcgggggctcttgagttgttgccgtttcagttgttgccgactggtttccagtcggcggcgggtcactcggattggctctatcgcacgaagcatgggcgccagtcggctgactttcagcggtcggctggttttcagcagtcggctcggggtccttggatatactctgctctgtcatggcaggatcggggtcttttccagatggatctatatcagatggtttcctgcaaagtgttctttcggtattcagcatcatttttatgagcaaaacatgccgaagcggaatcatatcgagagatctaatacctggaagatgttctgatctttggcattgcacggccggccagttttttcctgggcatggtacgctttgggggtttattaggcgaacctttatccccagatttatcatcgtcgccttcatcatcatcaagtaccagctttctcttgcgaggacctgtttgaccagccaatttggaagtctgaggttgcggatctggtctgattgttggccctccacctccctgagtggtgtgttggcgaggagaccggcgctgagagattggtggatctgacttcatcaatgcatattcctacacaagatgcttccatagttagtcaattcagcatgaagataaaactatgttctgatcatggtttgagggtttccgatgcatacctgtggaggcggattgaatgcattatatggcacgactggcagttggtgagagtagctgactacaattgcatttgagaagattttgtacatcctctccttcatgattttgaaatccaaggagtctggttcttcacggttgggatcatgtttgccgtcgaactcgaatgctgtgcgggatctttccttgattggcgccagtcggcatttgatgaagtgccgagtgatttgctctccctgtaagccttgttctttaaggtttaacatacgatccaacaactccaaggcttgtactgcttcatctccgatcggaagagagttccaagtgtcttggtacattggaggaagacaagagtacccgggaagagcaggctcgggattctgaacatagaaccagttcgcatgccatcctttgttcgaagtcttgaagggcatcgagaaatatttttggcttagagttccccttagttggaatcctgcccccccgactacacacggtttgttcttgtttggttggggtttgaggaagaagattcggcggaatagggcaaagtgaggtttgatccccaaaaaggcttcacaagcatggacgaaattggcgatatgcactatggaattcgggtttaggtgatgcaagctgattccatagaaattcaagatcccgcggaaaaattttgaggtcggaagagcaaagccgccgtagaagaaatgcgagaagaccacgatctcatgagtatccggagacgggaaagcctcaccgtgcgctggtcgccacccgatgatttccttggcaggaagaacgccgtgcgccaccatctccttcagattttcttctgtcacgtcggatgtcgcccattggctttcgaagctttctccctcttccgccatcggtttcactcaaatgtgctgatttgattcgagggatggcttgggagaggtgagggattgaggcggtggatcacgggaaggattttgatgcacttttttgaggtggatttggccggagttgtgaaccctagttcgccggcgcagctttgcactgtagcagggagtggggaaaatggcgagagttccggcggggaagacgaagcgtcgcttggatataggatttttcagtttagggtatcggaggtgctaatgggcctaggcctgaacagtacttcagcccaatacttttaacagcgtggcccattgtgttccttagggacttaggcatattttgctttggcaatattatgcgcacaacagtgttgcccaatgctgctcaaatcctttttatgcggtcatataattctttggaattattgcaatgcaaattaaaaaggtgcccgacagaaaggcgttatgctatttttgcaagcttttttaggctacaaaagctgtttgggttaactaggaatgacttgtttttattatagtcatttccttggcgtgttatatgcctgttttcacggtaaatagtcatggcctaggctatttgacttttttattaccataatctttataatacttgatgggtaatctttagagtttttatattcggatacctgtcaagtgtgttcattcgtgaactttttagagtgtaaaccactcggatttcttttattatggctaaaaagcagtcggctaacatgcctatttaggcgccgcatacgcttttgtcatataatgcacaactgtgttattattttgtctttcaactatatgtttagtttgttaactaatcacatagttgggggctacacctaattaggtgcatctattcgatgcaccatattctttttcttttcgccctttacagtccacttggcaggttttggcttgaagagttagaagtactcggattattatctttgagaaggctatgatggtcgactgcaaaggactcgggggctactgtggagattatgggtaacccatatctacacggagacggtatttggattgggtaccggatacctaatgtagatagaatatcttatttgtatcttgggtttgtttcttaacttgtgtatcaaggaaacaccctgaaatttagtcggttacgactgtatcttacctatattttcatattccgttagggatatagattatcttttgtaacccggactccttcccatatataaggggggtccgggcgcctctaggggcagttgttgatttttcccgaatcatacaattaataatacactcggcggattcatccccggacaggagtagggtattacttcttttttaagaaggcctgaacctgtataaatcttttgtctccgaacccatacactttccaagcttgatagccacccccttttattattgccgaaatctagtttcgacaagtagggtgaggcatagctcctgcagctgctggttgcttgtcgtgcgcgataggaggtccggcggggatcccctgcactcgtcgtgtccggcggaggcggcgccgctggctgtggacgaggaggggaacagggacttgacgttgtcagagactcgatctgcgcccagcgaatgtggaaggaatgagccagcagcggacgcggagctggtcatggcgctgccggtgttgccgaatccgtaggacgtcgaggtcgcctgctcggtggcctctggctgctccgtcgacgccacgtcgggtggtggtggggcctcagcgcagtcgatcggggagctcgtcgatggcggccttggcgttgcacatgagccagtcgacgaccttgcggggctggtcgtagaaccgaatggcagtgtgccagtgtgcgcggcgaggcggatgcgccggtccccgctgcgtgtcccaaccgttgtccctcttcaaggatccatcgccagttgtttactagccgcgctgccgctgccacgaccaccgccgtctccgcggcttcctccagatctttcccatctttctgccaaacaatgggaaaacagatgaatttgaaaaagaagtaactggaatataaaaattactatggacttttttttgtaaaatgagatggtcaatgctaatgtggcactttcgctgaggtggaacaatggcgtggcaacttttgcatcatgagcgcacccacctagccaagtttttgtaccgctacgctcggttttcaagtttttgcacctaatcgcacccacctgccaaggtcttgtaccgtcaacgcaaattttacatgcttgaatagatgtttggagaacctatttgataggaagtctagatatgacacagagaaatttattttgatccatgataaatgaatcgaataatgataataaattatttactctggctacattaaacctatggaatttatcgtaaaaaacaaaattataaattttcctatatgcatatatatcatgttatcatttttttctatattatgcgtatgtatctgcgcattctaccaaatttcttataataatatgttgtactaaatgtcttaggtattaatttatatctctagaatatgcctaattatttaataacattgacatatatgcattttgtaacttatggggttagtttgtagattatattttattataggactaaaatgcaaaaaggtcattacatccccattcccccattgtacctctacacttccacagccctccttttcctttccattgctgtagctgttcctcattcttttttctctcccgctaatctgttatctgtggaggactccagatgataaaatgatgtggaattgtttgaccgacttcctccttttacatcggacggttaatatccattccaccttttctttgcttcttaatccaatggctatgaattaatacatgacgtggctcagtgttgtgaaatcttgaaatttacttttcacaaatgtagatatgcacagtttatagtcgacctttagattcagtcctcattgtttcgcagttcatgttatgatagataagggctgctgaataataacctggtgatcttaaagtctaatcaattcaattgcctgctcaattcctagcttgcctctaaatattttgagagggattaccagggaattgaatgggctgctgctgccatagcatcacaccccaattttcgttcgggattaaaaatcatttaataatttattttctagaaattaaattaaaattaaaagcaatttaacaggtgaatttaatgagggaaataaaatttacttttaaaatcatggctggaaatatttttgtaatattctccatgccctaaaatagtctctagaatttcccgtggatttttggaggtcaagaagtatttttaaaagcacaaacatcacttaatcaattaattaaattgaaaaacaaataaaaatctccttctttctatttgggccatttggactaagtccacttcgcctcccttgggcccgtccccttctctcttctcccggccggcttcgtccctccctagtgggcctcaagcccgctagcctcctcccttttcctctaagtcgaattgacgtccctccttctttcgtgtcgccaacaggaagagcccacctgtggggctcacctttaacctgcaggcacctctcccgaaactgccggcgttccgtgcctcttctccgcaccccatggaattggtgcggacgcgggtcacctcccttcctccaactttttgcccccatgtcctgcactgaggccctgtttagttagtaaaaaaaaaagttttggctttatgtgccacatcgaatatatagacacacatttgaagtattaaacgtagtctaataataaaacaaaatgcatattccacctgtaaaccgcgagacgaatttattaaacctaattaatcagtcattagcaaatgtttactatagcaccactctgtcaaattatggcgcaattaggtttaaaagattcgtctcgcaatttacacgcaatctgtgtgattgatttttttttctacatttaatactccatgcatatgtacaaacattcgatataatagcgtaaaaagtttctgcgtgagaactaaacagggcctgaatcaaagagaaccaacactatctgtgcttgctgatgcatggtaatgtggactcttttgcggttctatactagaaattttgtggacttgattactacgagaaactttgtggcaagatcatgttatgttgaaaaccatccgtgtagtagtaatttatttactaagagaaatcttgtggtgataccaatacgttaactctaagtaatttatttactaagagaaggtgtacaaaccaattaggagtactactatcctaagtaatttatttactaaagaagagctgagaacgaactaagagtaattcatttactaagaggaggaatcaaattgagaagggttgaaaacaacctgggagtaatacatttacctggtgcagctgacctgcaaagaatgcaaacatcaaaaaagaccagcaacgcataacatggctactaaaagtataattacatccagaaagtatgagattgggcagttagccatgaaagcaagattgcattctagaaattagtcaccttcttttcacccatgctctattgaacatgcaattatatctgtgcttatgttaactttttctgtgacacactagattgaacctaaaacagtatagttaatgcttatgttacattgctggaaagcagcatgagtgaatgctttttaataagtaggctagcaccagattttatgatatctcaggattagatttcacaattattcatcattgttttcatcctgagaaaactaacgagtgaaagaaccttaaacatgtgtcctctcggctctcggccacagcaggaggcatatatgtatgaagcaaaaacatactagtcaataggcattaatcgataagcaataacgcaatcaacagtacggtagaggacatgcgcatggtaagaacgcaatcaaattaggccaagttttagttccaaaatttttcttcaaacttctaacttttccatcacatcaaaactttcctacacacacgaacttgcaacttttccgtcacattgttccaatttcaaccaaactttcaattttagcgtgaactaaacacacccttaaccaaatgatgtaaatactctacaggaaggaatgcccacaatccagcagtacggaatgccacaaccaaattcacacatagccacaaatcaaaaatcaaataaaatctagccaccaagcaagcacacgaccaaaaatatacatcgtgtacgatcctatccgtgctccctcacctcaccggccaatcccccccaagccctagtttccccacacggacacacaacattaattaatgcacgaacaatctcggtgcgccgcgccccggtgagttcatccccggccgcgcgcgccgctcaccatcgatcctcgtctccggaggaatcaatcgccttcaccgccgcccccccccccccccccctccccctaaccgctctctcgtctcctccttcctctcccccaccgatcgacctccaccgtataccaccgcgcgcgagctagcgatcaacaacctcgctctccggtctggagaacaacacctacacaccatttcgagacgagatccaatccaggaaggcagattagccggaggagaactcactttcccatggcagcgacgaaggtgaccggtgacgattgcgagcgattcgctcgaggtggtgggggtttctggggtttctctctctctctcgtctctcccccttctctcacaagtcagaactcaccagcggtcgaggctatatatttgaattctcgatcgttcagatccgaacgtgcggcagcgatgccatcggctcaccgcggcgcacgcgggaatgggcccacctgcttacctttgtgtaattccggtttggctgtgcaggcgcggcaaatatgggaatttctttttactactttactgtagatacatctcagctactgttgtcgctggttgtaaagcagcactacttagtttctaccagccatgttaggggagtttctaccggccacagcttctcagataatctcagcttccctaaacaacccagattatcaaccagattttaaaaatttataattatagaatctataaaataattagaaatcggaatggataacctagcttctctagaaatagggtcttggttgtgttgttcccactcctttcccaactaatctcctcgtttttcgtgcgcacacttcccaaactactaaacaatgtattttttaaaaaagtttttatacgaaaaattcttaaaaaatcatattaattttttaactaatacttaattaattatgaaaataaaccaccgtgtgtttccattcaatcccgaacacaacctaaataaactggtttaattcgttagcatgtaaaaaaagtaaatttcacaaaactacagaatttttatcaaattatcactaaactacatatttagtgtgatatattataaaactacatacttaacactaaatttctcacataactacatctttaaggtggagtatcgtaaaactacatatttagtaacaaaattattacaaaactatatgtttagtgacaatttaatctaaagttacatgtttataactcaaacataacactagtgcgaaggacttaaactctaaaatctatagtttcgtgataactttgttattaaatctgcagttttgtgatactccactttacatctgttgttttgtgataaatttagtgttaaatctgtagttttgtgatacatcatcttaaatatatagttttgtgataatttgatcaaagttttgtgatacgtagttttgtgaaatttacttaaaaaaagtttcaattcgtcgatagaggttccctcacctctcccggtcgcccacattgcctgagcttgagcttaatcggttccctcaccttcctcttctttttctctggaccgtcatagccctcgctcttattgttgtagactttccagtgccactcagtcatctcctacgccggccgccggccctctccccgccaacgggctctagagaaagtgagggggagagatggagagagtgaataggtgggagtggtataagtccatttacatgtgagtattacatattttttttattttttaactaagataccacgtcaaccaaacattgattcgtatgatctgtatgattttattcaacccagttttaaaatatggggttcaaaaatctgattttattctccttaggtttccgccgccaccgctcacggaactacgatccgacacgccctcgccgctcccccgcccgctcgcctgcacacacactctctctctctctcttcatgtatgttgtcggtggatttcccggatcctctttttttttccggctgttcctaagggagaaaacgtgtgattttcggtatcgcgtgagatttaccattctgctgtagttgctagaatgctactccctccatatcaaaatataagtattttttacttctatatagtcttcgagatgttgcttggactaacaatatcttaaaaaaataaaatgttttaaataaaaatgttgcatattatgattgtttgtttaatgataaatctagtaacgtcaattttacatgattgagctttttttctattaatagtcaaagttaaaaatgtttgacttgacaatatgctaaaaatgcttatatgttgggacagatggagtagttgttattattacttactgcaattgaaatgatcataagtagtaggttaagttaagaacaagttggttttgtggttgtatgaattcgttccggaatgtttgggatgccaccatgagcttatcattgttagaatcggactcaacgacccttacaatttacatatcataaacaataagcaggatcgttggtttttccctacaagcattggattttacacttactagttttgttacaaacggcccaacacagattctccatggagttaaacaaagaacatatcctcgtaagttctgctctccagttcccgtcgtaataattatattttttcatttttattaccgatgctttaattcattaatttagcacaatctaattattgtagcaagtggaggatgaagatagactcagcatgcttcatgatgatattttactatcaatcctggggagagttgacatttgtacagctgcaaaaacaagtgtcctgtcaacaaggtggaggcacctaccttggcagttaactaaactggataaccaccgtgtacattgacgaagctatgtcaactctcaccaaagcagcaaggagtctgctagctgtgccgcagagagaaaccttcattacaagtctatgccttaagctctacttgatgggcaattactcgagagataaaggatttctattaagtgaagcgattgatggtggaatagtaaaagatttggaccttgctattttgaacgagaaggaacctgaagattgcgatgacaaagatatgttttgtcaggccagagttctgaaagcctttgctggtgcttttcctcgtgtgcttcacttcctcacaaggctctctgtacaacgtgttatcttcaccgagacattcatcatattctgtttgactgttgcactcagctggacattgtaaggcttagaaattgtgatgctgggtccaatgctgtatggaaaatagatgcgccaaactcgaaactccgacattctggagctttcgttgtgcagcttttggagattcgagttagcctgcctcccatagcttgaggaggtccattgggagatttggttctgttcctatgcccccttgtcatttggcttcgtcccaagcctcagggaactatttcttgcatgtggtgcccaattgggcttcgaaggcttcatgttaagcgaagttttacaaggcaccaaagatttgcatactttgacaatagatttccaaggagaaaaggtaattgaatatgtcattttgatgaatcattattatttttttatactataactgctacagtgagtacatgcttttcattactatgaatctgttaattcagttgtgttggacttttgcacaagtcatgaggatctagcagtagaatgctgtcatagtttcagttggttcagttctagtactacttaggtgcattcaccttcagtttttattttaataaagaaacaacctacttaggagcatgcattcttcattaagaagaagaaagacatctgaatttgagttaaaaggacaccaacctaggtggtgtgctgtgcatctacacctctcagttttggttttaattcctcttcactcaagacttgtaattgtccagaaggattttattattaggaacaaactgagactaacccttgtttgtgcaatcatttaaactcatcggtgtgctttgtttctgttttttttttctcttttcagctttgggtacaacctgaacaaaaacaattctgccctgcattcaacaatctaaagactttatctattctttgtgtttatgttgaatttgacctgttatgggctttaaacctccttgaagctgcgccatccgttgagctacttttcattgatgtaagttttcctttcgttttttcaaaatgtaacaacatgacagtaaatgtagctggaaattctcactatttgcaaaagatttacacaaaccaatttctcacactaaatgcagacctgggaacatatatgcttggtggaccaaatggatgaagagggaagaaaggatatctatggagaaagaacacatccttcatgggagatatccgagtttactggcaccagaaaatggcgattgaaaaaactccagtttgccggctttaggccactcaagcaacagctggtatttttaaaagccatcatggatcttagggacaatatttcatcgccatctcagataattttcctgtgaatcagtagaatttgtgttctatagccgcttcagagttctatatgtaaaaattttactgtgcagcaatgatcagctcttgcatgttaatattatattttaattttgagtaaattgtatgcgatctagtgcaaaaaaattgaaaaatgagcaataccagtacaaaaacttgttcgctttgataagcacatctacaaagcatgcaagtcattgttcaactgcattggttctccaatgatcacaagctgaatacacaccggcagccaactgccaacctaaatatccaaagacatacttcaaatgcatacacttcttttgaacacattgcgtaaggaccattatatattgtagtcaaaggtttaagaaaaaacagtcaaaagaatacgttccgatccatatcctcgtagcaaatactagcaagttgtcaatgagacaaagttcaattcaaatatggacgatccaaaaaaggattacatcaaaagtaaggtacactctctgcagtatgatcaaatctctcaaatcatcagcaaacatacaatgcctaccaacaaaagaatcagttgattgaagggatgaactgaaggagcccagttggagccagggggagcaggggagtaatcacctgaacccgagctcgtgctgaggacaacgaccacccaatctccctcattcgcgatcccaacaccagagaacttggtgtcattcagatactggttgtactgtgacttggtgtagttggtcagaaccacatcaggtacaagtccgggaacgcaggccggcatcacctgaccgtctccggtcaccgacgcgttgagatggcaatggtcgaggtactttgggtagtcggggaactgctgctcggtgccagggacagtgtttgctccggtggtgttggtgcaaggttggtctttgaattgctgtgctagctgctcagccaagcaggcagcattcttgttctcggatagcgcagggactttgagggaagctctgtagctgttgatgcccttgagaagctgtgaatcacttcctggaaatgggaagcagtgtcaaacaaacaatgtaaaacaatgattgtatctccaagttttcctgatttaacagtggaatagtttgcatgcatatcagatctcgaccagcaaaaggtagaattttatcgttcgatcttcagcaaatgataatcgtaataagtactgttaacaaatgacaagtgtatgaataaatgcatctcaataaactatgatacttcatatgtcaccaaaaattttcacttgaaagaattttcattcgaaaccatatgcataaaaactgtgccatatgtacctaaacacatcaactccaatacatagcaattgtgacttaagttactgaaaaattttctccttagcagactaccactgagtcctccccgcaaaaaataaaataaaataaaataaaaaatctaccactgagtcctaaacatcagatcttgcacatcaaaagctggatttgtacgaaaacagcttcccaaacaagattttaactcaaaaaagaggaccaagcaaacctcgaaagtggctcacaaatcatgaccatgtgactagttacatcaaaatgtatagaacaccagtgaccagatctctgaccagcacaaatgcccagtgcaaccgcttgagcgttttctaagcgatcgaacagagacaaactaattcgtacggattgaaacaagaatcatcttctgcagactcccagatcccatgaaccaattaaaactcccagagtaattctcaattgaatttgagcaacagggcagctaaatcattgcactactacacagcagccaagaacacgcactccagcgaatcagatccagacacactacaacaaacaaataatcaaaacaaaactacaacaattctaaccatcgaagcccgaatcagattgcaggaagagcagcgagagccaataagccatttttaccatcagatctggcgcaatgcagcaaggaggaagcgaggacgaggaagcagacgagggagatcctggaatccattctcgccgacacaattcctcgctgctgcagcggtgttactgttgcctcggccggggaggaagaagagtgaggtgcgaggcaggcaagaagtaggagaggagtgaggaggaaggaggcgagttgctgtcaccaaccacttctttttaattttactctttattgaatcttgattaatctttactcttccttccggtctgtcctaaaaactttttagtaaaaagtggtgataaatgtttttattagggtccttattgtatatttacactggcaagataattcgattacttttgtatcttgtaccttctgggccatttttcactggcaagtggtaactttttgggttacagcctagctttagcagttgtagttaatttgcttaaaaattattgtggtcacataacttcaataaattctgaaaggaactgtataacagtttttatttattatatatccaagtcaccttcattacattttttatatatttataaataaatagtgcctaaagaaggtctagaaatagttttgttcctcatgtgaaaaataattatccctagagtcgactgcaggcattagatgctttagtagtcataaatttccctgtataaaatcacggaaaaattgtgaatgatgcataaataacggtaatgatgcatgcgctgagtacattttatttatttatacatacaggtcgatattcatatgaaggaaatacaaatacaataatgtagattctgagaaaaaatagccccttatttcacctgactataactctataagttataacacttattagcgataatatatatatatatatatatatatatatatatatatatatatatatatatatatatatattcttaacgatttaaaaggtagtattgaaaaataaactacgatgaaaaatatcaaaatcaatttaaaattaaattttaaaatttaatttttggttatggctacgagctatttgtgttttaagttaatacatgtttatggcatggtggtcgtatagtactccctccgtcccaaaaatacttaatgagaagtggcaatgaatctgaactaccctttattcagattcgttgttctagtaggggtcacatcccctcgcttgagtttttttcggacgaagagagtatgaccctgtttagattccaatttttttcttcaaactttcaacttttttcgtcacatcgaactttcctacatgcacaaactttcaacttttctgtcacatcgtttcaatttcttcaaacttcaaattttagcgtggaactaaacacaacctatatttgcatgggcccacccccattatattctctgtgcttataaaacaaacttcatatactctacgaaaccccaagctgtcggtgtttctcaagtagttgctacaacgtgatcatctgagatgcggccacaaataacaaatttattcttatcaggaaaagaaaaaagaagcattagttgaattaagccatggacaacgtgaaacaaataaaagaagaaaggtgcttggtcgatgcttttcatcatcaaataattaatttcgctgcgtgtgcgtcttctccggttggtcctgcactgacgttaaaaaggttggtgtagatgatgatgatctgtgcagcgagcgagcgaacggcgggacagagagacagctcaccgtgtggcgacggcgatggtggaaccgacacagcgtacgccaacactcaacacgacgcggcggtgggtaatacgcagcgccagtgcactacgtacgtaccttacctcattgtttgctaaattttaatttcagaattgattttaaaatttttttaatgtagttttaaaatattagtttcctgaccacatatttacccctatattataacttataatcagctcttaataactaaccaatggaagagtgaatcactgtgcagtcgcagttgagtcacttacacaggacatttaaactatttgccacctttaatatgtgatgtttaataatttattactcacaatctatgacgtgcccttttacatatctacaagtacgtagtaaattgttaaatgtccacttacatataagccccgctctaacttttgtgcagttttcgacatttcctgtgaatattataactgtaaactgtgtatctctataactgtgtacaaggaagcctcacccaacaatggagttgtggttcattttagcaatgaagggcttttagtacttccaattctaacgcaacatattgaacgcacttaactgtatgaatatatcggacgcactcctacatcccgctgcgatgcaagtcgaccacggattcacgacccagagatccttttaacccctgactacaattttttgccaagattttcctgactcgtatttgcatacactcgaaaaacaatcgcactggttccaaggctaaacatctgcattcatgctctgaaactaaatctctttataaatatcaaatagagcactaatacgagtaaagctaaaagccgatatttcttatctacatgatgagactacgactagttcacggttgttgccaaataaggttaatatttacatcacctacgagcaatctcggttaggctacaaaaggctatggtaaatatttggccaggcgacaataggctgagtttgttttcacttttcagaaccacgggtgccatgtcggatccatcatgcacaggttcctcgaagataatgccgcttccacgagatccgtgacgcctctttggaccgactgaggtggctcagatgaattctcctcctgaaatagggagagaaaatgctcccagatgtgaatataagagcaggtaaaatagcaggctataagctagctataaacatattttaaagagataaaggaagagagactcccaagaagtaatgtgtatatgacagataggatcaggtattaatagtatagtaagcaactaatgtatgaattgggtattacattggctatagatgatttggagctagcaattggctatactattaaacttgatctaacttgaatgacttgataatgaatttggacttgctaatgttactatccaaaatggttttccagttgattgaagatagcaatcctaaaacatagtactaactgatagtaggtgcgcaacaaggtgaaatcagtagggaatatagtgcagtattggagcattgctatcatgtgaaattgtctaactaggaacaagcgagtgaaacacctcggcttgctgaatatttcactttgtgcataagtggcctctccaaataacaataactaagtaaagaaaggattagcagtgatagcattatcattttaaaagttaacggccagctagggaaataagcatgactgaaatcggaaaaaatgatatatccagagaaacaaaaatcaagtttaaagaaatagtttacctcatcagcaagataatgtggtgatattaatttgatacgggtaatgacatgctccacattgtttatcaccttttgctggaaatccaacgggttaatcattccagcagcaactggaacagaaggaatgccaagtggcctcctccatgaccaagataacagttcatcacggaaaaacatagccaaatggtgccatatatgctggctttgctgaaaatcacaaagaaaacaatccgattacgtaggaaaaatagaaagatgaaccacaagggacaatcctaatattaaccaagacggaaaacaattaacagtaggagtactatcattagcgcatcctactataattcactctttaaagaatgatactcacttttggtgaaaccacagactgggcagcagaacacatggcagacacaatgagaccttcaacaccgaaatttgagaagaaagcttgcatattgcgtgtcagcctaaagggaactagctcattgaactcaatcattccatttggatcataagctgcagataagcaaatgtgagtaataataatttcacgtgcattatttacaattactggtaataatcaagaagagtacctggatggaaatcattctggaagatcttgccagtatttttagcaaataatattttgttaggagccctaccaccaatctgcaacatgtacgacatgaaacaggacagagccacttggattgcaaactgtttcttgaaggtccagaggtgattcccagttggtagaatcttatgcatgtattgagagaagatattatcattaacgatatttttagtaatttcattataggcttgcaagcgtaattccaccactgcttcaggggacacctgccctgagatggcttgatttagctgttctttgaaaattgtaataggtgaatcagcttctctattatgtcgggcacagttaatttcatacacctccaggaaagtgctgtacatcaaatcatcctctaccatccgaacctggatcaagggaaattaaacataaggccaggatattaccttggaagctgaaataaaacagctaaacatgattattatcaggtatggaagaatggaaggtatttcacctgtgaccaaacaggaataatgattggggtgtgaatagcaagatggcgctgcctcgactctttatgtttgtcaaacattttgtttagtacacggaatagctgcagcattctctcatcactccgggcatttggagtcaatgatgtctgaacaataaaatggcgctgtgaaccatcagagccaataagtgtcagacgtcggaagctactaccgtgcctccggacaataggaatatcaggtccaactctgtccaacttgacagtatgatcaggtgcaacctcctgcaaaagacaagtaaaacttaaaactagcacatagagaggtgaggaaccgtgcgagaagcataaaactttcacaagactggctaaccatccatatggtaagagataatgatgagtgacatattgacttcaatactgaggataaaaggtaatcactgtgaccaacctgatctgtgaagtactgcccgggaagttctatatcaacaacatggaagtccctgagaattttactttcttcctctagctttaaaattgcagggaaccgatcctcaacattactctgaagaacattcttccagtgcttcaatctctcagtgagttcagcaagtgttgctggaaaagtagtagcactttctgggtcaagatcacgttcaaaatcttgcttgtactccttgacaaaatcaacatgcttgttaacagcatcttgtgaaaagcaagctcggcatacaccagaaagttccttcttgagagattgtggaacctcgcctgtagttgcagttggatacttgtagcagcggtgaagcaatgcattaaccacagcaagaagtctttcctcgggaagagtaacaaatcttgatccaatttcagacagtaaaacctgaaaccagcaaaaataaaaatattagcatacttagaaacacaaacaacgaaagttctagcactagattgttgtttcttcatgtagatttcttcaagattctgtaatcccaacaattcaaatcaaatagtccctccagtcccattacaaacaatattagatttgttgtcttgtttgaaaatataaggcatacatttaaatttagtgcaagcctttcccccaagtctaaaagtatcccatcctctcttggactcctttaaacatttatgcttgacaaccaacacataccaccattttcgaagcacttaatggaagggcaataaagtcattctcttatggattcctacttcactttttgtccctggccaaaatatgccttactataggaaccaaagggcactgaatatgcatggaattctgttctcttaaatgccagctttgctacaaaataaaattcctggcaagcatgctaaaaatttctattgaaaaaaaggaatgggcaaagaaagaaatggcttattctataccattgtcatacacgttggcctgtatgtatggtaagactctaatttaataaaaaagtaatggtcgtagtcatctccaatttcctaaaggtttataaaccactttgttattacttcttacctcaagctcattggctagattggtatgcttgctcctaagagcttccattatatcctttgcagcatcaaatgcacttgctgcagaagttacccagccaagtccattattgcgtcttgctggcatttgcgaaccatctgcaccagttgaactcggttgaccttgatcatggccagcgcttgtaccaccctcaacattagatctgtctgactcttgtccttggagattacccccatcatgagaaactgccgcaccacctgactgggtagcttgatgaacttggttgtcagaagtcatgttcccacccccaagattagatgtcctcgcgttcccttcagataagttattggcagcattgtttgccagcatagcctgctgcatacgctgctgagctattcttcccatttcagtttttgtagcaacatcacgacgttccatcaagtatgtccgaagccaataatacaatgcctgcaagaaaacctctcagatatgcacatatacgagacaagaatatgcatcgtcaagttcaagaaatcgatatgaaaaaatgacatcacaatcacctgtggataaacttgggctattttcagcaaaactaatttgcagtgttgggcttcacttctctgtaatgatagcaataactgaggtatccacgaaagccaaacccaatggggcaactgctcaagatatttatccaaagcccttccagcaggttcattttgtgtatcgaagctcagaaggtagagaattcgtgcaagatggctccttgagtttgaaactccatatttgatgccttggaagaaacaacttacggcatactcaagccaaatctcatcttttgtctccttgaaaacctggcaacacacacacatcagatctggatgatgaagggatattattaagagcataaaggataacatgcataccatatcgcagtaattcccccagctaatccatgcttttggcaaatgcttaaaaagtgttatagcatttgaataagcaacatttgcattctcgcagtcattcatttttagcaggaagtcacctctcagacgaaatatttctgctttgttcttcacagggaaaaattccaaattggtgttattgattaagttaagaccactgactagttcgcctttcatctctaagtatgccttggcttgttcacatatcttcacaaatgcttcctgtaatcagattagaatgcaaacaggtaaataagatgatattgaacgcacactatgcagtactaaaaatttgatcacaaaggcaagtcacctgaacttccatggtagcatgaccatacatcttatcgagtatagttacacaaacgtcaggaagaccttgtttgcgagctatgtgagcaagcttgttcacattccaagctttgtctcggtaaccaagatgatgaagttgaggatttgtttggccaaaatctttgaatgcgtctattactgaattgtacatctcattcctccactggaggaggtcataccaaacagtcatattatcccattcattaggagttcgaagtctccatgtctcaagaatatccttgaggtcagcaaaggagttgtgatgattggaattggcaccagaatttcctgaagctggtttgttcccatttgcaatgtcaagcagaattttagaggattctttcacttcaaccaactgctgaaactgctgcagcagaggcattcgggactgcacagacatttcaggtaactgccaccattgttctagtgcaagttcaacacctttgctgacaaggttctcagcttcaccaacaccattagtacctttgtcatgaagagtgaaaaatgattgaataaggcgtaactttggtgtctcttctacctgagcttttggaataacattctccttcatatatgtccagtcaggcgccttccaaaggcagtctaagagaatctcgtaattctccacaccttttccaaaatcagccaatacttcccactgacctaattgagtggcacaagacaaccactgttcttcccaaagacacatttcagccttagggactgtgttattatatgtaccttgagttgcttttatcattgcctggtaaaagagattttgtgcctgctgccagtaaccgtgttggacaagtgatagcccagctctagtttctgctgtgattgatcttctcttccataatccatatctcatgtcatcctcattgagaagcctgtataattcagccagtgactctgagcatttggcctcattcatatgcatcatatggctctcgagtaacgcaatcgaagtatgccatgcattgcaggtctttccgatatatttgataagctcactaggcatgcgcggttgaggatggctcaagtgaagaccttcaaggagtgcctgggctacattaggtctgcatccttgctgcctcttatgataatcttttgacagaagcgcaattattggcttagcaagagcaacttgctcctctttgtgtaaggttacccaaacaattgggaatacaagaacccacaaatgatatgcgacgttgggatcagcaaatgcaagttccctcaatggagccatgacatctgccacctacattattaacaaagagtacatatgggttatcaggtcaaagatttcatacaaggagatttgtcataaggaaccaggttattccatttctcatgagcaaaactaacaaattatccatatgcagcagtaaaatgaaaaggcaacaaacatatatggtatgaggcagaaaatactagcagcaaagtagttttgagcacaggtatttaccacaagcttgcttgcctcatttaaaaactgagcatgtcttgtagtcagagaatcaaacgataaagatgtaccatccaagctttcctgagcatcaggagcctgttgtggcataatcatgcgatctgaaactggcccagatgtcataagtgcaggaactcgagcagaatttgcagcgagtgtaattggctcattttcaactaatattgccaaaataagatccaggccttgcttcaaccagaaaacatcactcactgcttcccagtcctgggtctgtattataaactgcaatctagcaaataatgtttttccgacatagtcatggtaaagtttgaagaatcgcttcctcatttctgggtctttagctctaagtccaagcatgtattgcctctccaccttatgaaaatactcttgcctcaaagccatttgatacctgcataaaaagaccgtcaggaacactacaagatactaataagagcttgctgtatgtatgtacttacttagctgtatctccacagagtgagtaaagaagttgcaaatattttgcatcccattcttcttgtacagatgggggaaagctttttctgtcaactactgataacttctgaagataagctattatctcctttggattaagtgaactgacagagccagtagatgaagcaagtctgtagtcatcctcaatccaagcttttatcatgtccagtatgcatagaagaacgctaggatctgtgcctttttctgaaaggagtgcttgaagtgtttggcccatagatcgcctgaactcagaagaggccatcaccctctcacttatgagttttaagacggtcttcatgttagatatgaccatagggtctactgtggggcgtgaattaactgatgaatcctgttcaggcctctgtccctgagattatgccaggtcaatgccaaggtaaatggaccatcatgccaaatggaatcttgccaaaacatttactcatggtgttgatgatcaaatcacatagttaaacactaacaaaaaaaacatcctagatgtatctgtggatttttcatcttaaaaatagtaaacagttcaaaatgataacttcacataagaacctaacttacctatagataccaagacagaacaccaggttaataataatcagcacagtgaaaactagtcaactatacggatcaacaaagttaaataatatagaaatactgtgcaaacatacttgtcgaacatggttgccagcagaagatcccatgtcacgtgcaagacgttgcaggactcgaagaagcaaacctatgaacggatcaataaaattcttctgtacttctgcgagtgcgttgaggacaaacagtgcaaagcttatgatagagttagcattgctaggttcaagtgatatctggggagtggttacagcagcaagatgcttttgaatgagatcttgaactctttggtacaacaactttatatcttgtggtgttgtagctgcttcaaggggaaacgcgctgaataccatctttagcaatgaacaaagagacttgccagcatccaacattttgttgttgaagcaaggttccagtatctaaggaaaagagatcccagaatgtatcaaagagtcaacgtaagaaatatctgcattgatctccataaaatacaaatatagcaaaaagactaatccagagaataaggttcattcaagtaacttacttgagaaatatggttgatgttattccggatgaagaggcggggttgcttttctaagactttgttcataacatctaggccctgagcaagtgctgttgcaggatccttggactgagaaggtgtcaaattcccaagcaatttctcaagataattaaatttaacattggcatttggccagacttccaaagcttgagtcagtagatcaagagcttgcttgtacattgagctagattccttatcctttggttcaatcaccagcgacacctgttcaatcaacaaaactatatgagtattcaagacctcagatcaaaaaagttctgctgaagacactagtaaggtggcacaaagtgatcaacattctcattatatcagaaaggttcacatgagaggatggaaccactaataggaatgccttgtcaatccactactgcaatcaaatgttacactgtgctttgtctcttttcaggagaaaaggcaagccaggccgcatgcctcaaaagcaatcacaatgaattaggcaatgaggcaccaacaacaaaagcaagtaccatcagaatgtccagtattaattttttttaagaacattatcatgaaatctaatgaagcaacttgtaaaatttagagcataaaaggtaaacataaaaaggataatcacccttataaggaatgtaatgatcatctcctccatagcagcgttaggtttgtactcctcatctggttgcccggaagacccaggtgtctcgatattaggtattgatgcccccccaggcgacatcacgcaaaggggttgcaaccctggttcaactttcaccctcttactcaaatcatcaccaaatgtgggaacatccgatgagcgttttggatcaccgccaataacaggactaagcatatcaccaatttgactcgtgttctcactttcctgcacaactttcatctcactttgtctctgtctttcccacgccaccaccagtccagcaagttcaattgccagtcgtctattttctgctgttgtgttgtatggtagtccaagacggctaagggagttgaccatctggggaacaaaatgggctctgcaactgtagaagaggtctgcatgacgaacaataagctggaatatgtgaatcatgttgggaattgaatggccttcctccacaaggattttcttggtgtatctaatccatattggcatgcggctgtcccctggagggagtcttctaggaagggcaggcatgaggatgtcaagagcttgcttcaccagcagcttattttctggttggcatgtccgcagtagagcaataaaaacctggggaaataattcatcatattggctagctcggtgcaatgacctggttaaatgcacaattactcaggaagaatttaatgttatactacctgcagaataatcttttcaggagcttgataggcctctaagaaatgacacacgttcacaaaagcccattgcttgctggaattatcttcacgtttgagatggttccaaccgaactttatgagttcctttcgatggtgaacaagatcgctctgtagatacttcagaagtaatgttgcaagctgaaggagttctatcctcaagggttcatcatattcagcactgacctaaaaatatatacatataaaaaagcattgctgtcatggggaagtaacaaagagaaggctgacaggtattaaggtagagtggttcacttcccacctcttccggaggatcaagaagcttgtcaacaatagttttaataatagatggatcaacaacttcccaactttgcccattttggaaagaatgagctagcattggaaggataagtatctgcatagcaacgactaaatgatcttgtccataatgctttgactggaatatgttcagaaagtgattaagaataattttcttcaaatttggtgcatagccttcagcaacctatatggaaaatgtaaaaatggtaagaaacagaaagaactggagagcgacacaagtaactgtcatgaattagaaaaagaaatggtgtcacctctataacataaaattccttaagaaaactataatcaatgcggctacggtacaagaatattgatagcatatcaaatagcgcaccaacttccgtacgatcatgccttagataatttaggaagcattttatgagccgcttgctttccatcacctgttcagaaagtaagattgttaagatccaaaggtctagacacttgattagtgcagtatggaaagatgcaaggatgctaagaaactttaataaagcaatttattgagatgtaaagcacagataacatgtacgcatcatgtcagcaaaacctaaatcattgaattcaaagaaatcaagcgcataagagaaaataagcacccatactaccggacagtgtttgcccattgaacagaacatcataaaatccagaatgataatcctactagcatggcagagataacagtatataacagatagtagcagtagtaaacaaagatgccaaaatttaaatatcatgattccccgaaataattctatataaagaaccaagtatgcaacttgtccatcaactctaaatatcgcatcatgaatttaacatggcaattaaacaggtgaaagaagataaaaattacgtaatcggaacagggtagcaatagaaatacgtaaatctacgtaattggaagtaaccaattaggttaactatggaacccagaaatcgatcaccgatcaagtaagttattcagcttgagaactactataatttgttacccggataaaggtcactagcaattgaagagcagcaacaagagacaatacaaaaacacaaataaacgggcaatttacaaaggcacccaaagagaaaatgcaaaatgagaaaaataaaaggtaagtaggaacatcaatgactacctgcggtaaactcaattcctgctcattttgcaggcgatcaattcttgagggtgatttccaagcaagcaacaaagtgtcaaagacaacccggttgttacagagccattcaggcatcaattttacaagggttgaaataagttccagtccattaaagtaactgtcagaaccagtagccatgtttgatgatgattggcctgtaaaaccttcagttatggcaccagtaagtccctcatccttcactgaggaagattgattaccagcagcttcagtttgtgaatagaactgtgaaaaggcgctagcaagtattttttgaggcgattttgcaagctggtcccttaactccccagtatcagagcagattatgtacatgaacctgaaattttaaaagggaagtataatcagtctctggacatgtgtagatctgggtgttcacatgttcattaaagtataactttacagaacaagaagagcaagctagtgtgccacttatactacagtatgcatcaaaaataataacagcagggctcaatagctagtctcataaatcccaaggtatatgttaaaaacataaccagaatagcagtaatgatctaatacagactaaaagggaagtacactaatgtaaatgaacagcatgtgaggctaactgaacctttttgtaagtcttgcacaaaagtttcacaaagttgcagctaaacaaataagactaattttggtgaagtgcgtaccttctgaaatactttggatggcttaatcgagcaagaaaatagtcaacggcctccacggcatagcggttcaaaaattttgcaagtggagcacgataaggactgttgatttcactataaaattgatcttcaggaagtgccctctctaaatcaattaccaacgtaacaaggtcatccaaaaatttgctcgccgccgggggaagaaggtgaaaaagctcaatcatagctgcccaaaaaaaatagacattagttatataaactcctgactccaaccaaaggcaacatacaaagacgacagcaattggtcattttgatgtctgtaaacaagagaaaaattggacattttgaaccactttacaacaaggcaagacttgatccatttcatattatctagctcctataaatataagttggaggtgatggtacatccacctagatctttttgcgaatggatatgtgcatgcatatgtaaatccacctagatcttctatgaagcatttctacagtaaaattggaagataccgagagcacaagcatcatttggtacacatttgcgaaaaaaaggtttaagttctgtgtatcaaattagtacaataatatatgaaaagaatgaagatctggtttctaaatctcgtgtgatgtgtcctctttcaaacaaaatattgatagttagagaggaaaatgcaataaaattatgacagacctgcagctatttttggctcatctccagctttccaagatttttgactctgggcaagcttttctggctccagccattttttcaagtgatccaataacttagcacctaaagtgacattaaaccagtttgatagtaattcaagcagacgagccaatccctggagcaacggcatggtaagactccttgtatgtgctaagttaactaagatgggccttaaactgctttgcagaagatcttttggcatcctttgctgctgaacgacctgtaaaatgcaaatcatcaatgagaacatgctagatgctgcaagcgcaatctagaatttgaatttttaaagcaaaacaaaataaattagaaaaggaagaaaataaatattctctgaaattccatgtcaatataagaaagcaattgcagtaaacaccacctgacgaagtccctccttggcaacattgacaatctctgtagtcctgcatgtcagagatttgaagaacattgagataatctttgcacgtaagtcgctatgatttggagctttcagatctccccatgccattgcagtacagagtagttcaatgcatgccgtcctcaatttgttccatgtcataattatttttgcattcatcatcttggtgacccaaacagtctcatcagcctcagcaatttgcagtgcttcttgcaaaaagttcacgagctcaggagacaacttcagaagaggtggtcttagtgctaaacagaaattcaatgctgtaacagtacccacctgagatagaaaaaaaaataagtaaaggatccatcacttatatcatgaacatagaaatcctcagaagttaaaacataaaatatatatcttacctgctgctcaatgttcttggaacgcaaagatcgtgaaatcagaggctggagcaacgggaggtacagaggctccagcaattcagagacctcactgccagttctacttgcaagcagtgataagcatgcctgcacattcttcctcacaacaattgaggtatttgggttaaacagttccactgcaagaaactccacaactccctgaaaactttgtcggcgatgttcactgtttgcttcatctgcattgtttactacccgtagaacttgtgttaggacatggtttgtctcctcctgctctttgtttgcatgcatcgggagcctcttaagaacatggataagcccgcgtacaactctaacctggaaaatgcatagggtatccacagacactttaccaaccagcgctccaaggcccattacaccacccatctgagcttgccatgtgctaccataacaacaatgcaacaggcgtggcaataattcctcaaatactgcaacccgcacacttggaggaggagaataaactggattcaaagatggactagaaactaacatgggggtactaggaccacctcttagcataccagtatgcttcatgcgagcaagaaagagtagtgtctcagcaaaagtatttaaagcagacagagcagcttttgcatgttgacgattttcacttgagagtacttcaaccaatgaatccataaatattaaaggatccaactcacggagattagatgaagagttgttccttgatctagatccaatgctagatgaaagggacgaaccaacaggttgtacatatccagactgactggaggatgaagaatcgatatggaaaagcatagcaaaatgtcgacataaatcaacaacgaagtcatccttctcgtctgtaaggctggtgtcagaattagctgcaatgatagctacaagcagaaccttgaaaacagatttctctgccagtagttgtgtctttgtcttcacacctaaatctccctaaagatcaagtagaaaataaagggaaaaatcaacaaaacacactcaagttagattaggcaaaagatactccctccattccaaattgatctacatatagtttttttgagggtattcctaaatgatctacatatttgtgttcatttattaggtctattcgttatttgtgcattggagtaaatggacattgatgcatgcatccatgcacacatgtatttataacccacatgtaatatcttgatttgctattggctaggaaatagtggggatggtgcatgcattgagtttgttgctagagtaaatatagtatgagagagttattagcttttcttggtcttgatgtacctatgaaatatgtagatcaatttggaatggagggagtacaacacaaataccagaaagaactgctgctccagtcaaatattaatatacataaatacaagtcatcattttggtatgaataaaaatccaaatttttaaataataaaaaggaggtaagaggcaaaagtttcaaacaataatggcatctaaatgcagctggacataattattccaaaaaaggcaacctacagattttagagagtatacgatcacaccgtttattgaacaataatgcggaagtttagcattgctatttgtggtaatacctgatttaccacttttatgcattaccaattagacatcaagagattgaatggaccacaagaaggctgtcactacttaataaaaataaaggtccatttggaacaagaaaccaactatagtccaaagaatggacatgactatgattgtaggttagtttggggaaaagggttaaatgaatacagaaaaatcataatgtgacatgttgtcattagtttacaagataacatggcatgctgaataataagcattaattaatttctgaaatcatgcaatgcagtactccctccgtcccaaaataagtccaattttcaccgattccacacataccaatacacaaccaaaacgactagaatgcccctactttatcaaataccaatgaaactattcttcactttatctactcccaatacaattattccctactttcacgaactccgatgcaatgattactctaataatgaacttatttattttgggacaaatggaaggagctaaaaatgaacttattacgggacagagggagtaaaatgtatcaattatgggagctactggacaatcccataactgcaattgaatgctaatcaatagtcaatacaagcctacgttgattttaacaatttcgatcacgacaaataactttgggacaatgtaagatcgatgatgtcaaatgtcagaagatgatcaagcagcgtgagcaaaatacataagtaatattaacaatatcaatactcaacatatattcaaaccaaccttcatatcagaagcatcattgcgacgccttgatggatccaaagaagatattagcagtgtcccaagaactccagggctcacaccctcaccgggtacattttcccgtaagtttaacaaagaatccaagcacactcgaataaactgaagagcctgtttcctgtagaaagcttccatactattaccttgcataactgcactgactgcaaagtgtatgcatctgtccagtggaactagaaacggtgttgcaggctcaaaagtcagaactaaacgaagtccatgttccgggttttccttgcattcaagtgcgaggggctccttcaaaaatcgcctatttcgaccccctagcttacctaacagttccaaggactttgtaccccatgtgtagggaggaggcctcaagtgagaccataaagcaagaatgacatcagacattaaattggccatgctaggttccaaaaaatcagggttgagactatcaatccaaaattctagtgtacgaagagctaagctcacaaggtcatcactccctttcagagcaagaacgagaggtttcatcaaacgaggaatgtgaggcagcaaagaactcaagcgagcaggtaatatcaggcaaagctccaaaatcaagtctcgcatatcttcactagttggtccatcaagcatggagagcaacatattgaggcaaggctgtaaagacggtataagatcacgcatcaatgaatcaaatttagcaatgttcaatgcacggaacatgctacggagaaggtgcatgtaaccaagaggtttctcaacttcagtggcactcttcatgcaaacttccattattactgggacatgtggctgaagagtgcgctcacaactttctggggcctttgctgcagcgacaaacaaaaagcgaaagagttgcaagacaagctttgctgcaggcgaatctggctgcttcagcgcgtcaagttttgagctaacgaggaaattaatcaatacatctgtgaatggccgaagaaccttgggagcttgcaaaaggctagaaaatatgtgtaacagctggttgtttgttatcatgcaatcaaagaggtctggcatgcaaaaggaaaacatgtccattatatcccgagcttccattatagctagcatttgggaaaaacattgcagaatgtctctctcctcatccttttccttaaaaagagccaaacagtgaaccccagattttagaacacccgaagtcttccgcacctataacatatcacataattttattagcaacagttcagtttaaccaaaagaataaaggtgcatggtgatggtttaatggacctcatcctcccgcagtcccctgaatggttgtactgataaatttgatgattgttgactttgttgctgcagaatacatgattggattataagagctcaaggatgataacatactgaataagatagtacccacaaacttgggatgtcaataatacctgtgggcgtggccaatgagcatgggttatgctccagattattgtcttcattcctggtatgtgtttaacatgaaaacattggagttataaatgcttaaacactttgtatatgtaaatactttattaaaaataaatcatacctagtacgagtgtccttatcagacttttgtaatcattaatctcctttgtgtactccaagggtggttgcaaattcagcacagtctgtaaaattgttggagagatttaaataacccataagtacaaataaacagtagcttgtctctggtttcaccacaggtccctcattttgctgcatggccctatcttattttataggccggatgcaactagccaacaataataactaccagcatatgatgaaaaaattgctatatttgtggtttcgtgtagagcagacaggggcataaatcttttatactcggcatttgccatgaaaggcttgagtataatcaagttattcacttactcatagtagtaacacattaaatgtctggagtgaatgcacaagttaatagactaacacatgccctattattttgttttgagaaactcagctagacaactcactgttttaagtaaattcaattacataaatgcaaagcatctgtgaattgcctccataaagagggcctatgacacacctgtaatgggacttcaagtttcattctcaaattttggtgttccttcccttcctcgccttcttcaagcaactggagaaaaagagagcaagttgaccacacagtgtaacaaaccaaaaaggagatagcattgatctttctgttgagaaaagtctaaaatacacaatagttgggagctccagagaatatttaatgctatacaattaaagtcgatcattagacacatatccttaagcaccaatcatcaaaatctggcattaaattttcgttggatataaactgaggccaaccacagtttgccagaataaaaaaggcacgatagccagcttttaccgttgtcaattatgcagaactgtcccactgttttagaaatagtaccatattataaaatagactaacaggctctgttttatttcttatgcatgtacattgcagtacaccagtgcccaatgcatctgtcctcccatgcgtacaacatgtgccagtgaactgtgcaaggttatattatgccatagcatacactataaaatatcattaaaagcatgccatatacctgaggaattgtgcgcttcaatgtcctgaacttcccaacaaatgcatccagtatacgcccctagtcatttctaaaaatcagtaccaacaaaagaaactaactagcgtatcggaacaggaaagcagttctttttaccaacaaaatccgtgcttcatccatgcttggctgatcaatacctttttcatatataggctcaaccttgaagagttcaccaaagagtagcagttcagttcagtataaaaaaattaattcaccattagtactataattaagtatgaagttctttgtgcacacacaaaatcgtaaaagtaaaagctgaacaaaacacaatatgtagatcctattattactactaaaaacaaatagaacaatagggcataagcataccagattcaacatcaaacgagccgatgtcgtatgaatgacaagggttagcgaagaatcatgcatattccgagagaacaaataaatgatccgcgatagctgcacaaaaatgaggtcactacgttaatgacatctgaacatagaagatcaacctccaagagtggagtttgtactggtgatagtgatatcacccccaatgaagtgcctagttttcataatcttgcagaatgctggatcaagaaaaaatacagtatatttctgcgtctgaatcagcaaaagagagatgtggcacctactcaaactaatgaactaattgtttgagcaatgcattgttcatattgaattacagatggtgtttgcctgtttggcagttccccgtgcaaaaagaatataataaattgccttcctaaacttcaacaatgcaagtgttgacattcttacatagcaacaccagactaacaaaaaatgagcatctataaaaaaaatacatggttcacaaattacacaaactaaggaattctgcaagaatcaagattaacctgcggaagagaaaggtctccacgaacataatgcaccagctcggcaagaagggtataggcaagaggtctcaatgtctcgatgcaaactcggcctgtgcctatcaaaaccctgataaacaagcaaaatgtttggaacaaagagtaagagaatgtgtatgtactcaacatctccacagagacaaaagggacgaaaatactatgcacccagttggtttgagtagtgcacagttatcataatcaaacaagaaaaggagcagcttgacagacacttttctctgcgtactttctagcacaataaacagccagtgtcttattaatagttatagtttctctatttacaactttacaacattttttaagaactaggagctgtttgatctcgaattaaggataagtgctgtctcttttttttctgatgaccccaagtgggaaattaactgctttgaattgcccttgtctcttagcaataaatagcttgtgaccatgggttaggcgcattttgttttaaaaacaagttaacttatcaaaagtgcttaaatagaataccaatgagttcagacatcaggactagcaagaactctctgcatactaaaccatgttacacccttatttacagaacatggaacaagaacttgccagcaagcattcgacatattagtaatcaagaacaactatgcatcagatcccagtaaggcaacattcaaataaaacatgaataaattgggtaatcatataaatgaaaagtgtacctctcatcaagaagtgtgtcaatcaagggaaataaaccacgcctgtactcagtgttgagaacttgcttcaagccaactagcagctcctgcaattccatacacaaaagtttatacaaatgcatttcaacacaatgtatagttcattaactttgagaaagatttagataataacttgccttccttatggaaacagagtccggggggcatgtaacaagcaagttcacaatgctcttgcatatgctttcctcatatgactttatatgatccgcgttgctcttcagaaggtacgtcaggaatgacaatgtctgcaacacaaaaatggttaaccaatcatgacctccacagacaaggaaacaaaattgacagaacctgcagtaccttgacttgtgcaccctttaactcaacaaagggcgtcttcaggtgtggtggcactttgtctggccccttaatagagattgcagacaccatgagtggtagcaagtatgggatatttgtctgcacaagcttagcatacaactggaacaaaaacatcactactagagggctctctgtgactatcttgaatgaccgtgcacttggattgagttgtccaccgcctggcactgccaccgtgcctggggcatcagcagtggggtccaaatgctggttgggcacggcagcagcaatattggcactgacattgggattatcgaagaaatgggtgacagtattgggaaagttgcggtatatggtaacaacaaaatcaaggaacggctgcacctctgcctcgacagtagggcgaaagttacggaggagatcaaatacaatcctgatggcaagaagtgcattgtcctcattgtcctgtgtcaatacacgaagagagagcttgagcaggtcttgcacaaagggtcggagcacctcactgtggggtagccgattgaggatctcaatcaccacattccgcagcttgtgctccgcattctcagtgccctgtggtgcggtgaagttgctgaggatggccgagaatgctctgaagtagcatctaagaaagttaagatagtctggagtatgagtcatctccaggctgtcccgaacttccatggcaagctgcagtcggacttgcacagctgcagagtaatagggcaaaggatcagattattgtgtcaaaacaaaatggcactccaccacaaagactatgtctacaagacagactgtaacaggtttacacagttcaaaaggtcaaaatgaaaccgatgaaaaaccatgtggtggtgttgtgagatagattggtacaatccaaccattgaacagaaaaatagaagcttgatatggtgttcagttcagacaaaaaggtaaatttgaaggcaccgagcctgttctcaaaagaggcagaaaattatattttaaaaaaatgaaaggataaaaatagaaattcggg

SEQ ID NO: 5274 - DNA, 15234 bp, Oryza sativa
aaagaatattgtatagtactagaatcgtgtttgcaagaatagccctgagcaactaatgtctttaaatgctgtttactgcaaccctaaccctttatagtgtaactcctttgtactcctttgcatttattctgcacttgtgggtgtgtcttgttgagtacggtggttgtactcagtcttgctcaatttttcccaaacccagaagaggagttcctggaggatgaaggcttcggtgtctagctcgtgcctgccgtcaagtgcctgtggtcgtcgccctagtcttccgctgtttctcgtttgtctttgtgtgtgctgggccttcgctgcccatgtaataaattaactatttacgcttccgcttgttaaactctgaattgtatcaacttttggtgtaccttgcctcctgggacaaggattaatgcacgcacgtaaggaacgcccgttgggttatttccggtcgtgacacctgctgcttgtcatatttcttctaatacttatcgataatcttagtcgaattcacttgaaaacctctagctcttcctgcatcggcagttcgtccagcaatgtgtaccatattgatgggaaaaggattgcaatcgatcttcatcggcctcttggagtcatcaaacttgattttgcctcctttaatagctgcttggatctgctatctaaagacattacaatcattggtagaatgagacccagaattatgccacttgcaatacctcctcttgcctaactcctcagccgatgggattgtgtgcccagcaggaagctgaatctgtttctccagaagtagaaaatcaaagatcttatcagcctttgtgatatcaaagtcatatctttcttcttttccagaactcttcacccattggcatggtataaccttcttgcttctaacccattcggctgctgctatctcagaatcatcatcatcatcatcatcatcagatccatacatatagggacatacatgattgaccttcttaaagcttttcctggcttctgcaaacatctgctcatgcaaggttaccttctgtacaagatgtgacaaactatcaaagtccttggatgagaactttttcctgattggagctgccctgaaaagccaaatcggctaactgagcatcagttaagctcaagctgtagcacttattcctcatctttatgaacgtctgaatgtagtcctgcacaggctcatcatgcctttgccgaatcgctgttaaatcagacaatttcatctcatgaaccccactataaaaatagctatgaaaatgcttctccaaatcggcccaactgttgattgatccacatggcaaagaagaacaccaagtaaaagccgatccagacaaagacaatggaaacaacctaaccctcagagcatccacagccgatgcttcaccacactgagctaagaatcggctaacgtgctcataggttgaaacgctgtcctgtcctgagaattttgaaaaatatgaaaccttgaatcggttaggcaatggaaccctctcaaaccactcagcgtacggatgccgatacaggtttccagcatccttcggcttgagcccaaactgctctctcatcacatctgcaatcatatcggcccatggtctttgctgaggcactccctgcgcttgttgtggcattggctcgaattgattgtattgaggagcgaactggggctgagtcgaccccccttactgatattgaacttgtggtgatggaggctgatactgataattcaaattgcccccttgataattctgaaagtttagttgtatattacgcaccaaatgttcgggaataacttgaggtaccaccattttatctggttgcacattatgaaccaaatgctctgggacaacttgattcgcagcgtgctgtcttagctaattgtcaggtgttccgaacccagccgatgcattcaccaaaccttgatgctgaatcggctgaacaacctgttgcctcggtcttgtctgctgaatcggctacacaacctgctgtcttggtggcatctgctgaatcggttgttgctagattgtgtcaacagtaggctgagctggtaagaacatagcagcaacttggtcttgagttagccgattcacattttgtccattatgctatggctgttctctcaccaacaaccaaggattaattagttgacctggtgccgatgatggtgcagccggtgcaggagccgagactggtgctgtcggttgagccgatggtgcactgtgaggaattggctgaacagctggctgattattagtgaccaagggccgatagtttgggaaaacacctcctggcaaataaaccggtcctgtagcctgatactcagctatcgagcaatcaaccatcgacttcaccatgtttgacaaagtattgactaacacccaagattgattaattaaagcatgttgcacggcatagtcaatcctatcctggaagttgttaaattgtagctgtgccgtgttgccatcttgattatgattctcactgaaagtgcatctaggacccctcatttattttggtgttaatgacaacacaattagagggtaactaatgctttttgttgagacgtatgcaaggatgaaaaagtagtggatgtcaacacaataagtattgcggcatcttttgtggtaattgtcttctaatccatgcatatcttgtgttcttgagtattaggatgccgtactattaagaggaatgccacatgcatataattggtagaacactagtgctcaaaatcatttatttgaagtgttcctgttttatgtctgtcggactatccgatgttgattagactatccgaaatttcacagaactttgctcactgtcttgggtctgagtgttggctaaaaaatatcggactatccgatataaggtcggactatccgatacgtcggactatctgaaatttctcagaacttcactctctgttttgaattgctttttattccttttgagtgagttttaaatcagactatccgatatgatcggagtatctaatgatccagagactaagaaattcaatggaacttgagtctctgtgagaggatgaaattcttggttcaaaaataacggaatatccgatatgacatcagactatccgatcgattggattgtccgaaattctctagaatttcgttctctgtctctggcctgcttgggggtcaaaaacatcggactatccgatgtcacctcagactttccgaggtgggatgaaaagattctctcccaacggccacattttgggggcttctatgaataccccccacctaacccttttctagggttacccaactcattcattcacattcactttgggttgagcttggtgctaaggtgctttggatctttgagctctctctccctctctcaaatcccctcttgttctttgtgtggtcgatcttggtggttgtggatttggggtttgagggcctagtgtgtgtttcactcgatcttgagcactagggttgaccaagagttgtgtgatgtttgttactcttggaggttgaggactcctagacggctaggtgtcactcccgagccaccgatctacgtgtggttggccgggagaagtttgtgaaggccggatctcgcctccacaaggaaagagataccccttagtggaaggaggagtgcttagtgcaacctcttgaggaaagggttagcaaagacccggctcttagtgagctcctcaacggagagtagaatcccctcaaggatttgaactccgggaagaactcggtgaacttcattgttggtgatatctcttcttccattatttagctttgttttttgtgccgctataaatctagtcgctgtttgggccatactcttgtttgtgcactagatctacttgtagtgttcttttagtggatcagacagtctgatccaacatcagactatctgatattttcggatagtctgactgtggatcagactatcagttttagcttcggcataaagttttaaattagcctattcaccccccctctaggcctaattgaccttttcaattggtatcagagcctaatctccaaattaggcttaaccgcttggagggatcatgtcgggccaaatgggggaaggcaaagatggtgataagggagctaagtttccttatcactatccaactacatccacatcttatgtgagtacctatagcagcaaagctccgtacttcaatggtacggactatgccgcttggaagcataagatgaagatgcatttgaagtctattaacccatctatttggagaatagtcgaaaaaggctatgttttgcagaatcccgaagatcccaccaaggaggacgacgagaataagcacaagaacgctcaagccgccaatgcaatacttagtgccttgagtggaagtgagttcaaccgtgtggatggcattgagagtgccaaagtgatttgggacacgcttcggaacttgcatgaaggcacggatagtgttcgtgagtccaaggtggagatcttcaaggggcaatttgagagatttgtgatgttggatggtgagagcccaagtgacatgtatgaccggttgagcaagatcgtcaatgagatcaagggacttggctccaaggacatgaccgatgaggttgtggtcaagaagatggttcgagcaatcactccaaggaactctaccttggttaccatcattcgtgagcgtccggactataagactctcacacctcatgatttgctcggacgcattcttgcccatgacattcttgtgcaagagtccaaggaggtcatccaatacatcaaccaaagctcaacgacaagcatcaagaaggaagacttggcattgaaggcaaaggaagaagaagaagagagccacaagagcaagagcaaggaggagatcgatgatgaagaaatggttctcttcgtcaagaagttcggcaagttcatgaggcgaagcggcttcttcaagggaaattcttccaagcatcactccagcaagtcaagtggaagacattccgcaagagtgtgctacgtgtgcaaagagcccgggcacttcattgcggattgccctcacctcaaggatggttcccacatcaaggaagataagaagaaggatgagaagaaggagaagtataagcatagcaagcgggaacattatggccaagctcaccttgggatgattttcagctccgactccgagtcaagctcaagtgatggagaaggagtcgccacgttcgccgtcaagccttcatcaccaccaagactcttcgactactaaagtgatgaggatgctcccatttgcctcatggcaaaggagcctaaggtaccttctcctctcaagtcatttaatgttgattttattagtgacgaggaggatgaggttgaggatgaagttatggatgatgagttgcttaaatccataaccaaggaatctgtcacaccctgatttttgtttcaggatttataaattatttaataaattattatcagaatttatattaaatgttcattaatttacaagtgaagttaaatgtgggaaataaaatttcctaaatataaagcatggatggatttaatttttattaaattcttcatggttaattatactctctggaattttctcagatttttcggagctcaattcctaatttttaatcatacaaagagcatttcagtaattacccacatattaaattaatcattaaatggtctaattgtaatttttttaagtactttgagtgtccaagtattttcaggatttttcttgaaattatttgagcattggaagtatttttaataatttaaagatcatttaagtgattattttaattgggaaagtaataaaatcctcctcctcagcttgggccattttcagcccattccttcctttccttcctctctcttccgccggcccaacctgagccgcctcctctcctctcagcctagccggaaaagtctattttccctccctgcgctactgttcatcttccaactcaggcagagcccgagccagccgtgccgtgcacagtgccgccgcctcttccttccaaatctcgcctccccgttgctctttttctccaattttgttgaggggaaatattcctcttatcctcctctatctttacccccaagaatcggagcaaaccgttgagtattttatccgaatcgaactcgtttttgagtttatctccaaaaccgagtttttgatttcccggatcgatttcttgcgggaggagtccgatctcttcaatccaaggctataaataggaccccctagtcctcctctttcgtttgccccctctcccgtcctcttccgtgctccgtagctccgtcgccaccgccgccaagcaaacagccgccgccggccatctccagtgccgccgcgccgccgtctccatcgtcgtcgccggtcgccgtcaccaccgttgggtgcgccgtggtgaggggaagctcggccacccttccttttccgtcgccggtcatcggagctccgccgccccgtgcaacccgagccgccgccgtcgcctcctcgtcgccggccgtcgtcggtcgtcgtttggcacgagggtgagtatcgttgggttcgtctcgtcgtcctctacgtgttcatgtcctccaaatccgcagccggtcgctctatctccggcgagcttgccatccgagtcggctgccattgatgacgtcagcatgacgtcatcggtttttctttttcccgtttttctaatagattaaatcttcggaaattcataactaaatcatcgtaactcggttttgagtggttcaagttgctaaattcatctaaaatcatgatctacatgtttgtttactttatatgtactgtttatttggtttttattagtctttttcttcgttttgcgtgttagcttgtcgtttccgtcgttgcgaaggttcgtgagtgcgtcggaagtgatcaagaagattacttgaaggccgattattgcaaggcaagtcacacagatcctaaacacaatcctttgagcatattgatcctatatttaaattctctatttatttcaactgtgcatttattttcgaatgtcaccgggtggtgtgaacttattcctttgttatggccaatttgcattgattactttattccttgataccttgggttattataacttgactagttgggctttatatattggttcagctagatattagttatgattgcttagccatgcttagaaacattagcacactattgggataacttatgactcactattatttaaggatggcttaatgatagttcacgatggttaatcgtgattggttaattaattacttgccaactaaaacttcataatggtgggttgtgagcacatggttttgagagtcgtgctcctgacaattaaggaccggttcgcgagctactgttgtgaaacattaaccgtaccaaccacaagccagcatgggcaacggctttatcttttgtatagcatgattcattatagtgcgccagactgagaagtggcgagaagtccatgggggtcgctggggagtccatgccttgtttataagggggtgattatgatccaggaacggtgcactgttttgagttgtgttgtgcgaagggtattgtcacgatttccccctttgcaatgccgtggtggtatttcggggcatggcaacatgtgtggaatcgtgtcttgtgggtacagtggtacacctctggccagagtaaaactattcgaatagccgtgcccgcggttatgggcgagttgagcaatgtttttcgtgattagtctcacacctctcacaataattatggatgttaatacctgataataatttgcttagctcctggtttggagttagatctgtacagccgggtatggttgttcaggatggttgggcctgtacagcatgggtgtgctgttcagtgttgattaaaatttttaattaattactctactgttttactactcttaactctttgctaaatgctgctttcgcaaatgagcctatattatgccatcctttggtatccttgtgcacttgcatatttgctgtgtggcttgttgagtatgtcatatgctcattcttgcaataatcaatcaacctcagttgaagataaaggatccagaaggagaagacgtttggcttataccccagttgagctgcctgtgggagtggagctgaagccatcgctagaccgttaattccgctgctgttttcttttcttttgtaagtgtgtaacgttattattatgatggatttgtatattaaattgtcagtttgtgtacctcggctgattcctggacgaggattttatgcacaaataagttcggaaattactagtgaatttccgggcgtgacagaatccataccacacttgagtgagttgcttgggagaattgaggatcaatatgcaacacttgagaggcaagaggaattgctcattcatgagaaagagcgatctcatgaactcaagtgcgaacttgctaaggagagagaaaaatgaggctttggtacggctttacaagcaaaccaaagagtctcatgctaatcttgaggtggcaaacgctcaacttcaagagagagtggatggcttggataaagcttacctctctcttgaagagaagtttgaaaccttaaagaatagtgtctctctccctagcaaggcatcatgctccaaaattgccccaagcaatgaaccttgtgcaagatgcaaagatattgatattgaagcttgtgctactaactctatttccttgagtgctttgcaaaagcaaaatgagaagcttatgggactccttcacaatggcctacttaagtgccatatgggtagtaaggccctaaaagagtacctaggctatcaaagggacaacttcaaccatgagggtcttgggtatgttcctccaccaaaaggaaaggtggacaagagtgtgatgatcaagaggccccaaggtcttagcaactttgttagggccaaaagtatccttcctaatgattgtgcttcacattgttcttttgatgcatcttatgttcttaggaagaatgctagtggtcgtgttgttgctaagtatgtaggcccaaggggcaagaatatttctatcaagagagttctttgggtgcctaaggcacttgttactaacatgagaggacccaagcaagtatgggtacctaaaactagaaattgatcccttgtaggaatatgtcactggtggaagaagttgggtgattgatagtggatgcaccaatcacatgaccggagaagaatcaatgttttcatctcttgatccaaatggcacttcacaagataacatagtcttcggggacgatggaaagggaaacgttatgggattgggtaagattgcaatctctaatgatctttctattgccaacgttctcttggtaaaatctctaaactacaatcttttgtccgtttctcaattatgttctatgggttacaattgtctttttaccgatgttgatgtgaccgtctatagaaggaatgattcctcggtagtctttaagtgtgttctcaagggaaagctttaccttgtgaattttcctcaagtaaagccaaacatgagacatgcttagtggctaagtccaacacggggtggctttggcatcggaggctagcccatgttggtatgaggaatcttcacaagcttctaaagcacaatcacatccttggactaacaaatgttcaatttgagaaagatagggtgtatagcgcatgtcaagccggcaaacaaattggagcacatcaccccgtcaagaatgtgatgaccactacaagaccattggagcttctccacatggacctcttcggaccaattgcttatctaagcattggaggtaacaaatatggtcttgttattgttgatgactttttacgcttcacgtgggtgttctttttgcatgacaagagtgagacacaagctatcttcaagaagtttgcaagaagagcacaaaacgagttcgacctcaagatcaagaacattcgaagcgacaatggcaaggagttcaagaacacgtgcatcgagagtttccttgatgaagaaggcatcaagcatgagttctcggctccatattcacctcaacaaaatggagtggctgagaggaagaataggactctcattgagatggcgaggaccatgttggatgagtacaagacatcggaccgtttttgggccgaagccgccaacaccgcatgccacgccatcaaccgcctttatcttcaccgccttcttaagaagactccctatgagcttcttaccggtaataaaccaaatgtctcttactttcgtgttatcggtagtaagtgttacattcttaataagaaggctagatcctctaagttcgctcccaaagtggatgagggattcttgcttgggtatgggtcaaatgaatgcgcataccgtgttttcaacaaaacctccggtattgttgaaatcgcgcgtgatgtgacatttgacgaaactaatggctctcaagtagagcaagttgactcacatgtgttaggtgaagaggaggatccaagcgaagcaatcaaaagattggctcttgggaacgtgcgtcctagggagccaagcctcttcctcaacacaagtggagccacctacatcaacccaagccgacgttccctctacctcaagcatggatcaaggtgaagaaggcgagcaagtgccaccctcaccgatcaacttagctcgcccaagaatccaccaaagtatccaaagagatcatcccaccgacaacatcttaggagacatcaacaagggagtatccactcgttctcgtattgcaaatttttgtgagcattactcgtttgtgtcttctcttgaacctctaagggtggaagaagctctaaatgatccggattgggtgatggcaatgcaagaggagttgaacaatttcacccgtaatgaagtgtggactttggtggagcgacctcggcaaaatgtgattggcacaaagtggatcttccgcaacaagcaagacgaggccggggtcataataaggaacaaggcgaggttagtggcgcaagggttcacccaaatcgaaggattagatttcggtgaaacttttgcgccggtagctagacttgagtcgattcgcatattgcttgcttttgctactaacctcaattttaagctatatcaaatggatgtcaaaagcgccttcctcaacgggcctatcaacgagttggtatacgtggagcaaccacctggcttcgaggatccgaagtatcccaaccacgtgtacaaactccacaaggcactctacgtgcttaagcaagcccctagagcttggtatgagtgtcttcgcaattttcttgtgaagaacggctttgaaatcgggaaagccgattcaactctttttactaaaagacatgataatgatatttttgtgtgccaaatatatgtcgatgacattatatttggttctactaacaagtcttttagtgaagagtttagtaggatgatgaccaaacgttttgagatgtccatgatgggtgaattgaagttcttcctcggccttcaaatcaagcaactcaaggaaggaactttcatttgccaaacaaagtatttgaaggacatgctcaagaagtttggaatggagaatgcgaagccaattcacactcccatgccatcaaatggccacctcgacctcaacgagcaaggtaaagacgtcgaccaaaaggtataccgttccatcattggctcactcctttacctttgtgcatctaggcccgatattatgcttagtgtgtgcatgtgtgcaagatttcaagccgctccgaaggtgtgtcaccttgtggccgtgaagagaattcttagatatttagtgcacacacctaatcttagtctttggtatcctaagggagcgaggtttgatctcattggttatgccgatgcggattatgccgggtgcaaagtggataggaaaagcacatcgggtacttgccaattcttgggtaggtcccttgtttcttgatcttccaagaagcaaaactccgtcgccctatccaccgccgaagcggaatacgtttcggcggggagttgttgtgctcaacttctttggatgaagcaaaccttgagagactatggcctaaatgtgtccaaaatcccactcctatgtgacaatgagagcgccattaagttagccaataaccccgtccaacattcccgaaccaagcatatagatattcgccaccatttcttaagagaccattccacaagaggcgacatagacatccaacatgtaagaaccgacaaacaattggtggatatcttcaccaagcctctagatgaagctaggttttgtgagttgagaagtgagctaaatatcttggattctcggaatgtggcttgatcttttgcatgcatttgtttttcatttactagaataggtttgcttgccacatcatgacaaagtgaacattcaattcatgaataaacactagtcataatctatgaggataacttgaatctatgtgtacggggatctcattctctaatgaatcttggtccttgcacaatttcctatagattcgtacattccctctcttgagggtgcctagttttctttcttttgctgcatttgtccaagtaatagtctagccgagttcatcctataaaaatgttgttgaaaaaaaaaatcttccttgagccatcctttattgtctctgccacaaaggatgtcggactgtctgacatcaagtcagactatccggccacaatcggacagtccgatttcaaatcggactatccgacgtggggccaagggcaaggggacttaacctccccgggggtaactctttttttttaccccttcagtcatttgtctcagtcgtttctctctccacccctcttctcctctcaaaaccctagttctaggccaccaaaaatcttcgtttcagagtctctgattgctattccttctctttagggtggtttccctccctcaactccttccaaatcacttgttccccagtgattctcttggtggttcttgaggtatttccttgtttttcctctatctccctcatggtatattatttcaagatttccttcggtgaatcttcttgttttagtgcctagatctagtacctagaagatcctttgattccattggatatttttgtgtgaatcgagatttgttggtctagggcaaaaggccgtcggattgtctaatatgccgccggatagtccaatgtacatcagatagtccgacgtcaaatcagactatccgacctccttttggcccagtccaaatttctccttgcttcacatttaaatattcttcttccacttcttcttaatcattatcctctgttctaaatcagtgtatcctcatgatcaaggatcagttcaagaatcaagtttactctcgccgtgggtcaatgagttctcgaggtcgctctccctcttccaaggctcgtcatgctatacggcgtatgtctgaatcccgcaaagataccattgacgcgcaagctcaagcctctgaccaagcagctcaagtggctaatgtggagcgtggtgctcctcttcctcctcgccgcagccgagttagtggagaaggatcaagtgcacctgctagcaaagtaaggagaggcaatcctacggattcttctgagcctggtcaaggtagtggttctcatgcaccatcctttgaggaagagattcagttagaagaggacattgccgctcagcaagccgctcaggaagaagggcctttctttatcactgctccctctagagatcctaattatcatcggagagtcataaggtggaaccgcaagtggactgaattggagaaagagcgtaagaaagatccctacaaatttcaacagttgtccaccgatcctcggttttggaacctttttcagcaggattactatgagacagtgattgcacctaagaagggggctattcttatgcagtgggttgattggaagtatatggaggagttgcatgatccaattattgatgaagtcattgaagcttgtgctcggcaaaacttgaaggaattcatgggcttgcaatacccatggtgcaaagaaatcattgcacaattctatgccatagtttactttgagcccaacaaagaaaagactattcattggatgacagatggcactatatacttagtgacatatgccaagtttgctgccattttggggtttccggctcgctctcgcaccaatcgtgtcaagattaatgctgagaagcccatggacacaaattctcttcacttcttgtaccaagatgtggactatgagttaggcaccatcaaaggtctccttcccttctatgcctatctcaacaagctcttgcgcaaaactctcaatcccaaggaaggtgatgctagcaacgtccttgcctatacaagaaatttgctttacaagatgaaggctcacccacagctctttgacgcctttgacttcatctttgaagaaatccggcttatctccatgatgcctaagccctaagcgaggacttggctatgggccttacattatgaagatgattgagattatgtccaagaagaagtttcacaaggaggtggcacataccggttaccatgtccgtcccatcaaggctgctgctgtgccggctggacaaaccactcgtgcttcttctcgtgccggtccctccgctaccgtcaccaagccggattccaactcgtccttgaggttcttcaagtccatcttcaacttatgcaagaccatcttagcttggcaagccaaggaacgcagagcaaggaagaaggacactcgacggatcaagaacctccttcgcaacgcccatttgccgtgttcccccgatggttctgaggttgaggacagtggggaggatgtgattgaggacccgtttgcagctgaggcaagctcctctcgtgcggatcgtggcaaggctcctatggaggaagaagaagaggaggaggaaggtgactatgctaaggagtcaagtgaggagggcgaggattctaatgaggatgagtgatcctctttttcccttttggtgccttgatgccaaagggggagaaccacctatcaacaaaaatctctaatctatctcctttcttgatggctagtcgaaccttgggcttttgtgtcttgttatgtgcaattatctattatccatgctcaaatgtgtgaaatatcttgtcattggcatatgcatgaggttatattgtcatttctaatctagtgcatagattgagggggagctctcctatttcatttctagcatatctttagggggagctccaccaaaa

SEQ ID NO: 5275 - DNA, 4150 bp, Oryza sativa
ttaaaattggatttattgcgtcagccgagggcaggggcgctcggaccgggtccacgggagtggggcccacgcggcagcctcacggtccacggtggaccgggtgcacgcggcttacgccggccggcgccgtgggtcccacgcgtcagccgcacccgagggcgcgggcggctgacggccgggccccacatggcagccgcggggcgcgcccgaaggcggcctcgccggcacagccgacgggaggcgacgcacccgcaccccgatggtcgccgccggcgaccaccggcgcggcggagcggcgctcgagagaggggagggaagggggaagtgaaatggcggtccacggctcaccccgggtcgatggcgacgacgggaacggcgaccggagcggaggaaggcggcggcgcggctcgggtcgacgaggacggcggcgttccggcggtcggcgggcgaaacggaggggtggacgaggtcggcgaggttgcggcgaacccgaagaaggcgacgccgaaacgggagagggtccggggcgacgacggcggcggaccggagctcggcggcgacggcggagagagagagcgacggcgcgagctcgattccgacggggagagagagcggcgagggtcggaaacggcggagggaggcacggggagcgtttatatagggttgggagggggagagagcggccggatgagggggaatcggccacggaagatccggccgccattgatgcgccggcgaagttagggggaaactttccgaacgaatccgagggagagagagagggaaaagtggggggaaagagggagggaatcatggggagtgatttccccctctttattgcgcgcggggacggcggggaagcggctcggattcgcggacgtcggacgcgctagggcacaggcgacgcggcgggagcggcgggaggaatgggatgacgggtgggccccacccgtcagcgagggtggcgtgcgggcacgcccgtcagcggcacgcacgcgcgggaagggggccggatgggccgcgggtgagaggagagagagggagggaggtggtccgctccggcccaagagggagagggggagggaaaagaaactttttagggtttttcttttttataaaacctttttaactttgtttatttcttcttaattattatttgtgctctgaaaattccactaaaatttatttacgcattttaggcttttaggaaatatacaaaaatcctccaagccttatttgacttttaactttgcacattttaattgttggaggctttcacatggattttacttattctatgcatagttttgaggatgtattttagagtcgttttgggacgcgacagcaggagaggcgttatgaagaagatgatggcggttttggtcctcattggggttgtgagttctttagattttgctggaatgaaggtatgaggctgccatctattgaagactgtcctgggtgtagcaatgttgcagaaagttcaagccaatcgtataatagaggcaatcggctaaggcaaacaagagttcctgttcatcaaagattgagtccagtgaaccaagactgtgaccaagaagacagtgaagacaggaagacccaatggtgtccttctggtatttttacaaataatcagaagagaagggttcaaaggttgaggaatagggaacgtttttaggaggttgagcaagagatcaaccatcggctgaagaaaacgaattcgaagcaggaatggcgcattaagaaacaagttcctacagccgatgaagtaaagagattggctagaggaaaaagtgttgtgactgcctcggttaacatggattttatactacctgcggaatttgggatcaagcaagccgatgttgatgaaattgaggaagaatcggctagattgattttatcaccagaacaagcagtctttgagaaactggaagggacagagaatcggcatcttaagccattgtatgtaaacggctatgtcaatgggaagcctatgtctaaaatgatggtcgatggtggggctgcagtgaatttgatgccttatgctacatttaggaagctaggcaggaatgctgaggatctcatcaagacaaacatggtgctcaaagactatggtggcaatccatcagaaaccaaaggagttttgaatgtagagctaacggtcagcagcaagactatccctacaacattttttgttatcgatgggaagggttcctacagcttgttgcttggaagggattggattgatgccaattgttgtattccttcaaccatgcatcaatgcttgattcaatggcaaggcgacaagattgaaatcgtgccagccgacaggtcagtcaacgttgccagtgccgatttagctctttgggagatggatggtttcgattgcttatctggaaaagtttgggatggagaatttctaaaagtatccgattgtgatatacagccaattgaagatggagagcccaagttattattttgagggcatcgtggagggttcaaacgtctataacaaggatacagtagatcatctcgatgacaagtaagaacagggtttcttgttggccgatgatttggaagaaattgacataggtccaggtgatcgaccaaggccgacatttatcagtaagaacttatctccagaatttagaaccaagttgacagagctcttaaaggaattcaaagattgctttgcttgggagtattataagatgccaggactcagccgatcgattgttgaacatcggctacctatcaaaccaggggttagaccacaccagcaacctccgagaagatgcaaagccgatatgctcgaacctgtcaaggctgagattaaacgtttatatgatgctggttttattcatccttgccgatatgccgagtgggtttctagtatagttcctgttatcaagaaaaatggcaaggttagggtgtgcattgatttcagagatttaaacaaagctaccccaaaggatgagtatccaatgccagtagccgatcagttggttgacgctgcttcagggcacaaaatattgagtttcatggatggaaatgcaggatacaatcagatcttcatggccgaagaagatatccatcagacagcttttaggtgtcatggtgcaatcggcttgtttgagtgggttgtaatgacttttggcttgaaaagtgctggagctacatatcaacgggctatgaattatatataccatgatttgatcggctggttggttgaggtctacattgacgatgtggttgttaagtctaaagagatagaggaccacatagccaatttgaggaagtttttcgagagaactaggaaatatggccaaaagatgaacccaacaaagtgtgctttcggtgtatcggctggccagtttttgggatttcttgttcatgagaggggaattgacataactcaaaggagtgttattgcaatcaagaaaattcagcctccagagaacaagacggagttacaggagatgatcggcaagataaatttcgctagaagatttatttctaatttgtctggaacattagagccttttatgccattgttaagattgaaagctgatcaaaagtttacttgggggctgacggagctcgtggctcctcaccgggagaccgcgcaggcccccctttgccagttcggccgggggcttagggtgaaatctcaagctctcgctctctctgtatgtggaaatatcgtctgccagccagaaaacacgagacaccgacgatctatacaggttcgggccgctgagaagcgtaataccctactcctgtgttttggtggatctgtgtatgaatgagctacaagtgtcagctgacttctcccccgttctaagctcataatctgggaaagaatcaaccaaccccctctctatgggcaaggtcctcccctccttttatacttcaaggggataccacatgcacccttctcttcaaactggactgttctttttctcttgaatgggcggagatcagcacggttgctgtccgaatgacgctccgatgggacagcccacacctaccttcacttccgccgggggtgagcgcgtcgtgggagcatggctgtgcgctgacgatatggtcagtgtcagacccgtcgcaaatcggtcattcttgtccaccgcgtgtaatcttggcaacg

SEQ ID NO: 5276 - DNA, 14270 bp, Oryza sativa
cgtgcaaggagcgagaagatcagttcaaagtcgtcgttccgcgatgatcaagtgaagttttctcggagatgacctaaacccaatcctccccgagagggtagtttcgttagcttctagatcgtgtgttgcttgcttgtgtgtaggggtatggtttgcatcattggtggggatgcgaccatactaggttgtttgcttaaacaacttgaatcataaaatccattcacaacagatcaataggcaagtggtttagtaccttatctttagtaacccctctcatctccccctccctctcttgtgcccgcagcaattggtcagcatgagggacaatttcaacggatcaggatcccgtcagtttcatggatcaactcagctcacttctaatagtattccacgtcagcctcttgaagatcagcctcaaccccaagtcatggctaatcaaactcagacagtggaagagttgttacaacagatgcgatgtcggtaccaaatataccagatgcaacagatgcaacaacaatgtcaggagtcacgtcaatgtcacccaccgcaggtgcgagatcagatgccagcccggaacccgaatcagagtcagagtcaggagttcccaatatcggcaccgaagacccctgtcaaaatgcggtcaagatccccgaagataacgacagccaagtcaacgtcagaccaaaggaaagtaagtgctacctgttatgactgtggtgagcaaggtcattatgtaaggaactgtccatggaaggtgttcgccaggtcacctgaaaaagacgagaagcagtgcccagggagtaaccaagctccaagtcagtctaccgacaagaaggatggtactttgcagcgcaactctggagcgaataggacagtgatatggaagatggataatggcaggaccatcatcatcaccagttcagaatttactcctgaagatgcagcaaggatacccaagcgtcagagaggaagaaataccttccgaggagcgcgtcagctaacccgtcatctcataaagtacggtccgcccagacccgaagatgatgaatcaggagaacggttttctgctgacgacgatgacgacaacgatgatgataatgatgacaatgatgatgcgacccttgacagtttcagggaaagagagttgaagttcaaagcatgtgctagatgtgggatagtcggacacactgctagtttatgcctccccacctgccgctgtggtgaatatacccattactcagatgcatgccctttgaggaaggtaacatgtttcttgtgtgaaggaacagatcatgtgcctaaggactgtcagttgaacgcggtcatagctaagaccaagaaagaacaagggacaaccgtgcaacccattcgtcaaccaatgacaatcgacaacagcggtcacaatccttctgctctttctctaactccagctccagtggaagccaaccatggaagaagcaacgtcaccaaggatgttcataagcctctgcttgttcccgtttcagctgccaaagtgcataatcagaagcctgcaccccaagaccaagcaagtcgattatgtcgcaactgtcgtaagccaggacatcgtttcagtgattgtcctcttccaagagcagcaaaggcagttcgtcgtgattcacaagttaccagcactgcccacgacaccaaacgacacctgaatgtgcaacctccgccccaacggattatcgtcaagggcaccgtcaaaggtcgcattgttccaccggcaatcgtttcaagcctacaacaccaacgccagcagggtaagcaatgccaggagaacaacagctcgctacagctacaaagaggcggtacgctccttcgtcagcacccgcagcaagtgttgtcagcaccgggtcgcccaactgttgtcagttctagcaatgcacctggtattgctccaatctggaggcccatcgacaaatcaccgctcggtaaccccacgggcaagaagatcctacccgttacagctgacaagatagttgcccctccaccatcgaagatcaacaagcagagcaacgttcccggtgagacttctggtagtaggaactaaagaaaaaagtcagtcaggtttgaataatggaagcaatagcagttctagacaagacttctacttttcaagttcagtcgtgaaaagggcagttctaatcagcagcagtctacaattgtttgattttgtagtactcctcattgtacatatatgtttatggcagccatgtaatgaaaaggaaatattgaataaaatatgagtcagccagttcttctccttttatgattcaccttcagcatgcaaaagcaaatcaaaatgggtatctgtcagtgtctcaagaaaccaagggtttctcttctaactcatcgcaattctattgagctccaaaacctgtttgtgagccaatagaggaatggttaaccaacggagtgaaaatggttagaccctcaacactcgacataatgagatctctctaaaggcaacatcagtggtaccccaatgaaaagagggatggaatatttgaatgtgacatcatatagagactcttgggaactccctaaccttggaagctgttacaggatggtaagcggcaattacaccctagtggtgtgattatgaaacaagaatggtttccatagttcaaggcaaccgctataagttccagaaaaaaaaaatttctcatgaggtttcccagaagttgaaagagaaattgttccaatacatgggtcagaagatatagagtcgagtccagaaatgtgtagtcagtagggtatatggtagagaatcccttttcaacggaacatctttaccgaacatatgaaagcgaagttgttatgatcaaagaacaggaactctcggcagcatcaaagtcggtttccgatagttgttcagattgcagtattttccgaaaagctgttgcaggatctataatccgttaacccaggaagagttagcaaaggatggtcgaagaagtgaaatgtcatgccatggaaaggacctcttgagttggatctgttgggtgatcagtgcttgtttcaaggaatgttaactatgcaatctgtttaggcatatgacaccaaaaatcaagtcagaagcaagaaagttgtaccagcagttagaactggttggggaagtagtcaagagttagtaagatcaggagctaaatgagaatttctttatgtggaatctcccatcagcaactaaggattaagttccaaatcttgctgggatgaaagtgcgccgtcattactctattttgatgaatcggtgaagtttcagtttgcaaagtgagggcctttgtaagcaagagaagtgttggttatttttcaaggacaatagtccaattgttcctagtcaggagaaagtaagactactccctgtaaggggggtaggtctcggagatgagttttggctcacttcgtcgctgttttagttgaaggttcaacccagtgcaacaatccgggtagtacttgaagaagccagttgcaaggtgtcagcagagttacaccgatctcaagttatctgattgaattctgaggtacaccggtgaggccaggtcaatagctcagctttgagaagcagcatcagggacggttgcagttcagacaaaagacaggtcaagcaggtttcctggaattacgtgtcattcgagccaggacccgttcaagcggacgtaggatcaatgagttacaaatgccagatgcaagtcttaggaacaacttcacccttctctagccagcttggggaattgtcaggttatcagactgccagtatcaacagttcagatcaagataagtaagtttcgtgagcagccacagttctggtctgggtcagttcaagcagaactagccggtctagttttggcaaagcaaaggaatagaaaggtcgaatccagccatttcaatggtgcaggtttcatcaatcagtcaatcagccagttcaagatagaaaggggcagtgcagtgtgcagacccgtcagatcagtcagaccgacagcctacaccagctttctttctagccatcccagaatctcgggacgagattcctgtaaggggggtagatttgtaacgccccgattttcgttcgggtttaaaaatcattaaataatgcactctctagaaattaaataaaagttaaagcaatttaatcaagtgaaataatgggagagtttgaaattttcctttaaaaatcattggccgagaatattttgtaatattctttgtgccctaatatactctccgataatttcccgtgaattttcggagctcaataaataattttaataatacaaagttcattaaaccaattaaataaaaaaaagacaacgaattaaagtcctccttctttgctttgggccacttccggcccaagttcccttcccccccaggccggccttccctccctcggcccgctcggctctctctctcgaagtctacttggcctcccccaaccgtctcctcctctctccttccccccgagccgccgacaggtgggtcccacctgtcagggccatccctaacctccggctccctcagctgaaaccgccgccacggcctccccacgtcgccgccgattccgcctcctcctccacccgcgcgctcgccccgaccgcgggaccgcgtcgccccacctcctccactctcctccccactttccccctccaaaaccggcgccgaaccaccccacttcgcccacgtcgccggagcccactccgaagaccgttgccggtcgattccgccctccgcggccatgatcccaccgccccgagccaataaaaacgatccccgtggtctcctctcccatttccccaactttcccgagctcccggcgccctcgcccgctctcccctcgccaagccgagcagccgccgctcgccggagttcaccggccgctttttcccgccgccccagccaccaccgcgccgcgccgtgtgtgccgtcggcttcgcctcgccgtgccgcgccccggcctccactccttttcccccaaaccaccaccgaaataccaccccaccgtgaaaaccgagccgccgctcttccctccgtctccagccgctccccgccggcgataccgacctcgcccggtcgtgcggctgcctcccacagcgccgccgctccgtgccgcatcccggccaccggcccactcctcaaatccacccccgaagcaccattcccgccgcaaacccgagccccaccactaactgccgccaaccggccgcctcttgccgccattcccatctacctcacgccgcgccaccgcctccaccgcattcgctgcatcccatcgcccctcggccgtggctccgccgtggtcgggcgtcatcggaacgccgttctcgtcgcctcccgtgccgaccgccgccatcctttccgccgccggtcgcctctccgtggtcgtctcgcaaggaagatcgcgttcgcaaggataagagttcagaagatccaagtgaagaagcaaggcaagtcacacattctccttgagcatgttgattccaatttataaatgttttaccgtttacaaataaatatgcatgttttgctaattacatgggatccgggtattacctatctgttcgcttgtgccatgtttacttgatgtatgttctttgtcaaccttgggtaatgaatcaactagctcatgttacttatgtgacctagctagaactatatgcttagccatgcttaattaccactagctcagttgatgggataattacagtattagacctttttagtatcagaatgagctgcgtgctcaagacacctggccatgcttcatggtcataattatccaactaaaatgcgactgaatgatgggctgtgggtgcatggttttgctagtcgcacccatggcaattaaggaccggttcgcgggatgccctggaagaacttatcgtacttaccacaagccagcgtgggcaacggctgggcttgtagtgtagctttcctctagccgacgcatccaggcaagggtgggcgtgatggagtttggatgggccctgcgacggcctatgcggcttccggattcacctaggcacgagaggggactgcccgctgccttgcgaggagtgggggtgaaacctgaggtgtggtgtgcttggttagagggggttatgcgaagggtcctgtcacggtctctttccggtatgtcgtggtggcatgtcggcgcacggaaacgtgtcgtggggctgtgtcttgtgggtacagttgtacacctctgatcagagtaaaactattcgaatagccgtgcccgcggttatgggcggtcgaccagattcaccgtgattagtcccaccttaataaatcgactcaatgcactatagttcaggtgggttggttgggcctgttcaacgtggtgtagcgttgatcagtggagatttaatgttactttaattactcaacagttttactattttgctcaataaaatgttttacaaccgcctttatgcaaatagccacaaaccgtccttgtgttccccttgcacgtctgcatcgttggtgtggcttgctgagtacggtggttgtactcagccttgctattattcccccttttcagaagtgtagtgcttctgagttgaagacgaagttagaagaccaaggctcagaccccagttgagttttgcctgtggagtggagctaaagccccgctaggatcgcctttttccgctgctgctgctttcgtttcggtgcgaggactaagcgcctcttttgtaagtattttacgctttatttacgtttggaactgtatattacttgtcgttttgtgtaccctagctggtcctggacagggatttaatacacaaaatagtctggaaatttgggctaaatttctgggcgtgacacacatcttcttagtaagccatcggagcagaccctttacagctatggctcatcccatatatgacggcgactctcgcatttcagcttccgttgattttctcccggtggtatgtatttggataccatgtagttcactatgttggcataccatgggttggagtcgcgaaccgtcatcagcatgtcatctctcaagaaatcatttatcggctattcctgcgtgttagtgatttgcagcctagacaaatgatccgctacgaaattttctactccctttttatccttaatttctaagtcaaattcttggagcagcaagatccatcttaagagacatggtttagcatctttcttagtgagcaggtactttagagtagcatcatcagtataaactatcaccttagctcctaccaagtaagatctaaacttatcgatagcaaaaacaaccgcgacaagttccttttcagtagttgcataattgaactgagctccggttagagttttcctagcgtagcagattgcatgatgctttttatctttggtttggcccaagaccgcactaatagcgaaatcgcttgcatcacacataatcttgaagggcagagtccaatcaggaggttgaatgattggagcggagacgagtgcctttttgagaatttcaaaggattttaggcatgcgttttcgaactcaaagggagcatccatagctaaaaggttggtcaaaggtcgggcgattgtagaaaagtccttgagaaaccttctataaagcgggcatgtccaagaaaactgtggatctccttgatgtcacaggaggaggaagatgatctattacatcgattttggcacgatcaacttcgattcctcattcggacactcgatgaccaagaactatctcttcacggaccatgaaatggcactttccccaattgagtaccaggtccttctcttggaatcattgtaagactttgtctaaattctgcagacaatgaccgaaggtgtttccatagacagagaagtcatccatgaaaacttccataatgtccttgatcatgtccgagaaaatagacatcatacacctttgaaaagatgcaggagtgttgcacagtccgaaggacatcctacgataagcataggtaccgtatggacatgtgaatgtagttatactttggtcctctggatggataggaatttgatgatacccggaatacccatcaaggaaacaaaaaaaaaagaatgacgttccaacatctcatcaacgaagggtagtggaaaatgatcctttttcgtagctgttgacggtcgttagcgatcagtttcgaccgtcaatattataaaaatagaggagaactagttatgcttgcaatgcatatatatactagaataataatattccactagtatttggttcagtaacccttttgcagagaataatcataaagtgaagtagaatcgacatcaaatcagacgatacatcaatcgaacgatgttgaggatcaaacttatgtatgaatgggttaagaactcagaattaacacgacgaatagctacgaagtgaagcaacggaggaggctgccagccaaaacttggacaagttcggccaaacctcccgtggcgccaatggatgcagggtttggatggacggctgggattgatcccgaatgatggttggagggtattaccgaccattccaaccgtcacaaccgtcattacctgcctataaaaggagatcctcttctcacttcactcacacacctcaagcaagagctctctcatattctctcaagttagtttagtgttcttaagctagtggaataggaatagagtagaaatcaggagtccggaagtcttcggaagagtttgggtatggctctagtatttagtatactcttctttatacatttatggtattgaaatactttccgagtatatgaatgtctactttacaatatgttcatgttatacagaatatgatgctagcttatctgggagatgctttggtgcgggtataatgtttgcatatgcaattactctatgtgacgatgatattcgagtagtatctggtaatttagacgtggtgtctagattacaggatatcattatttgggattatatgctgtggatgagaggtgggtcgctgatggtgacagctcagtacgggtattcctccgtgcatgtatatagtcctaagttaattccctggggagggtactcctccgtatttagccccggttgtatggtcatgatgggctgtcgtaaggaactcggcagtcaggggtggcttcttgaagtaccaggagggcatcggatcgagggtattagctagtatatcagataactacgatgtatgtatactatgtatactagaagtataggaatatactgtttttctcttttctttccacttagcttagatattttaatatgagaatgagtagcttcctgcttgtgtttcactctacccttgaattatcttttcccctacttagactatgattattacaagtaatatataaattattagtcaagttctcactaccatgatcttcccacgggattaaataaatacgatacccttggaatactctcgggggaaatgctacaatgatatatccttgcgcttgtggatgaactctgtaaccataatataccaggagtatttctgcgccattgctcggaattatatttcttgtaatgtcgttaagaaataccaacaagcatttctagcgccgttattgcctgggaagattcataatagagattacctgaactaatactttatatttacctctgtataatcactgccctttgcaagctaatcttggttgttttaacttttgttttggaaacagggtagtgcatgactggtttcaacttgccggaaaacttcaaagaaaatccagaagctttctttcggagcgtcagacagtgagtcgttgctccgcagaaaactctaccgacaaagaaaccagccgtaccaatgccaccgactttcaagactatggctgacaagaccctccgcgagttcactgctccctctgctgacaatgtggccatcgggccgcagatcaacatgggagacgtggatttcgatctgaagtcccgcctcatcacaatggcttaggctagcccattctgtggcaagcctaacgaggatgccaacgctcatctgtagcagttcttggagatctgtagcacgtacactataaagggtgtcagtccagacgctgtcaggctgaggctgtttccgttttcccttctcaggaaagggaagtagtggttttacgctaaccgtgctgctgtcaacacctgggacaaatgctctatggcattcctctcgaaattctttccgatgggcaaaaccaatgcccttcgtggaaggatttccaatttccagcagacgagagacgagtccattcctgaagcatgggaacgtcctcatcatgggatggacaactcgctaatcctgcaaaatttctataatggactcactacaatgtcccatgaccatctggacgcggcagctggaggagcgttcttctctaagacggttcgaggagccattgatctaatagagaagatggtctccaatatgggttggagcaaggaacgactccaaacccgacagcaaggtatacacacagtcaaggagacggaattactcgctgccaagctagacctcctcatgaagcgattggacgaccacgacaatcggccacaagacaccgtcaaggccttggacttacacgtcacgtgtgaggtttgcggtggcacgggtcattctgggaacgactgcccggaaacccatgaagaggcgatgtacatgggcaaaaacaacaacgagtatcgtccacaaggaggtcaggggtggaaccagccacgcccgtactatcaaggagaaaacaacaacagtaacttctctaaccaaccctccttgaaggatctcatttttgtgcaagctaaaaccactgatgctttaagcaaaaagctagctgccaatgacaagatcctagagaacatcaacgttcagctagatggtttcacttcctcttttcaaaaccaactgatcttcaataaaatgatagaaacccagctagctcaattggcttctctagtccctgcaaatgaaattgggaggattccgaggcggggaggtaagtccactcgtgatcggccgtatcctaaccctgcaggaactaatggggtagctagagaagcgccatctagtgactcggctaacaaagaggttcaaccagaaaaggccgtgccgcaagaatactacgacacacgattgttgtcgtttcctcaacggagtaggaaaccatcagtagacgagcagttcgctcgttttgttgaagtaatccaaaagattcacatcaacgtgtcgttgttcgatgctatgcaagtgccaacatatgcccgttatctcaaggatatactcaacaacaagagaccgctcccaacaacggaggtgattgagctgacggagcaatgcagcaacgtcatactccacaagctctcggaaaagaggaagcatccagggtgtcccacgatcacttgctcgattggggcacagcagttcaaccaagcactccgtgatctcggtgtcagtgttagtgtcattccaatggacgtctttgacaagctcaacttcacggtgttggcaccaacaccgatgcgcctacaactggctgactcgtcagtccgttaaccggcagggatagcggaggatgtgccggtcaagattcgggatttcttcatcccagttgattttgtggtgctggacatggacacaggaaaggaaacgccactcatcctggggcatccgtgtcacaccctaaaaatccaaaatatataaattgttgtttaattggaattattagaatttattttaaaagcctagaagagaagatctaattttaattaataaattccaatataaaatggggccagataaaatttcattaaatactttgcttaattctataattcctagatttttctgggatttatttgagctaaggaagtatttttaataaatggaattgcatttcatgaataatttaattgaaaaaggtttttaaaagtctcttttggctttgggccgaaagtcggcccaaaaacctcccctctctctctccccggcccaagtcggcccagtccgcagtccgcagccgccgcgcgcgcgcgttcggtcgctgacaggtgggtctcgcctgtcggagtcgtcgtcttcctccggccgccgctgcccaaaaccctagcgccgctccgccgccgccgcttcccaaattcggccgcgcctttccttctccggtgaaatcaattgaggggaaacgatcttcgggatctcctctaccttttctcttttggaatctgtcgcgaccgagaaaaatacattttcccgaacgctagtgtattaatccccgtcccaggaaaagccggggtacaccacacaaacatgatataaaagacacatctttattatatcgataatatttacattattacaaaggcacttaaggcctgacaatcaaaaataaacagcagcggactagcgggcctacggctccatcttcacaggcgctcaactggggtataagccaggactccacctaagacttcttctccaaagcttctcttactaaaggggggggaggtagagcaagaatgagtacaaccacagtactcagcaagccacaccggagatgcatgattaatgcaaggggggtacaaggggtaataatacaggggttaagttttgcagaaaacagcatttaaaggtcacttagttgcccaaagccattttataaagacaatcctagagttacacagtgttattaatcaaggccgtgaaccctcacgaacctgccttaacccaaggcctacgatgattcagaccgaactggcaacccgaccctgggtcccagctcgtcccaagccaacccaggccaaccattccacattttagttgttgagcaaattttaagaattaaaacactaacttgggtacattgctcggcttgcccataaccgagggcgcggctattccaatagattatactctgatcagaggtgtacatctttacccacaagacacatcttcctcacgtgtaaccacatgccacataccaccacggtatacggacggaagacgtgacatagtttccaacccatcctagccatagacaagagtaccgacccaaccccacctacggccggaacctccgggacaggcaggcaggattgagcccctagcagtaggacaccatccctgtgccatgacatctcgactaccgggccgcagctcgtgtagccttcatttgtcctagagatgtccatcgacccccgacttcgtccatctccatccgtgtacttttgtttataaccagactgagccacaaactaagccttacccactagacatgtggaagtacggtagtgctttgcaacagaggcccgagcttaatccttatagtacccgaggtacgactaacaaaacccaaccacgcacctcgagcccagcctaaaaccattttgggggttttgaatagagggggaggtgtgtgtccaattccaacataagccaaccattccatagtgtccaagtgatatgagaattcccaaagtctaaagttataaaaccacctaatgttgcctaattaatcagcgaagcatctacctaaattcatactagtggaaccatgaatagagtacccactagctagggttttattttcctagggtgaacaagataatagtaacaatagcaataacaatgtcttaacaaaggtaaataggcatggctaaataaaacagtgataacgcgggaatttaaataaagcggtaatgcattaatttaaatcaaaataattttataaactgggattcaatatgctcaaggatgatgtgacttgccttgctcgctttcccaaacgtcggcttcaacttccacgaagagcggatcttccgaagctgcagcgtctacacgaccaacggaaaagaaaaggcttttactctaataaactccatataacaagcaggaacaaagcacaaaaatgggttcttgacttgttaaggaaaaattagagacttcaacggtccaattacgagttcaaatggccaagttatggccatttgaagtttatatgctctttaaatgaatatttgcgaatttcttcatttaaattttaatttaaaaagggtttattgcgtcagccgagggggaggggcgcgcggaccgggtccacgggagtggggcccacgcggcagcctcacggtccacggtggaccgggcgcacccgggctcacaccggccggcgccgtgggccccacgcgtcagccgcacccgagggcgcgggcggctgacggccgggccccacgcggcagccgctaggcgcgcccggaggcggccacgtcggtgcgggctgcag

SEQ ID NO: 5277 - DNA, 11054 bp, Oryza sativa
  unsure (1)..(11054): unsure at all n locations
accgagttcatctccatggggagctccggttatttttgtggaaaagaaagatcatacccagaggatgtgtgtggactatcgtgcactaaatgatgtgactatcaagaataagtacccgctacccagaattgatgatttgtttgatcagcttaaaggtgccaccgttttctccaaggtagatcttcgatcagggtatcaccagttgagaatcaaagaggaagatatacctaagacagcttttaccactaggtatgggttgtttgaatgtactgttatgtcttttggacttaccaatgcccctgctttcttcacgaatttgatgaataaggtgtttatggaatacctagacaagttcgtggtggtctttattgatgacattcttatctactcccgaacaaaagaagagcatgaagaacatcttcgccttgcactagagaagctatgagaacatcaactgtatgctaagtttagcaagtgtgaattttggttgtctgaagtgaagtttcttggtcacgtcatctcagcaggaggagttgccgtcgatcctagtaatgtggaatccgtaaccaactggaaacaaccaaagacagtttcagagattcgcagtttcttaggcctcgcaggttattatcggaggtttatagagaatttttccaagattgctaagcccatgacacgactgcttcagaaagatgtgaagtacaagtggttagaagaatgtgagcagagttttcaagagttgaagaatcgcttaatatcagctcctattttgattttgcctgatccaaagaagggtttccaagtgtattgtgatgcatccaaacttgggttaggatgtgttctgatgcaagatgggaaggtggttgcctatgcatctcgtcagttacgtccgcatgagaagaactaccctactcatgatcttgagttagctgtagtggttcatgcgttgaaaatttggcgtcattatctttttggtactcgtacagaggtatataccgatcacaagagtttaaagtatatctttactcagccagatctgaacatgagacaacggagatggttggaattaattaaggattatgacatgggaattcattatcacccaggaaaggctaatgttgtagcagacgctcttagtaggaaaggctattgcaatgctacggaaggacgatagttgccattggagttatgcaaggaattagaaagattaaatttaggaattgtcagtagaggtttcgttgcagccttagaagcgaagcccactttaattgatcaagttagagaagcccaaattaatgatccggatattcaagaaattaagaagaatatgagaagaggaaaggctatcggtttcttggaagatgagcaaggaactgtatggttgggcgagagaatctgcgttcccgacaacaaagatttaaaagatgcaattctaaaagaagctcatgatactttatactccattcaccctggtagtaccaaaatgtaccaggatctcaaggaaaggttttggtgggcaagtatgaagcgtgaaatcgcagaatacgtagcagtatgtgatgtttgtcagcgagtcaaggcagaacatcagaaacccgccggtttgttgcagcctttgaagattcctgaatggaaatgggaggaaatcggtatggatttcatcactggtttacccagaacgtcatcaggccattactctatttgggtgatagtcgacagacttaccaaagtggctcatttcatcccagtaaagacaacttattctggaagtcggttggcggaattgtatatggcaaggattgtgtgtttgcatggcgtccctaagaaaatagtgtctgatcgaggcagtcagtttacttcaaatttttggaagaagcttcaggaagagatgggttctaagctgaactttagtactgcttatcatccgcagacagacggacaaaccgaaaggtgaatcagattttggaagacatgttgagagcttgtgctttagacttcggtggaagttgggataagaatctaccttatgcggaattctcgtacaacaacagttatcaagctagtcttcagatggctccgtacgaagcactgtatggtcggaagtgccgcactccgcttttgtgggatcaaacgggagcacgtcaggttttcgggactgatatcctgagggaagcagaagaaaaggtgaaaatcattcaagaaagattgcgtgtggcttagtctcgtcataagagttatgccgacaatcgccacagagatttgagttttgaagaaggagattatgtgtaccttcgtgtcacgcctcttcgaggagttcatcgttttcacaccaaaggaaaattggcaccgcgttttgtgggaccttataagattgtcagtagaagaggagaggttgcttatcagttggagttacctcaatctttggcaggagtccataatgtgttccatgtgtcgcaattgaagaagtgtttaagggtacctactgaagaagctaatcttgaacagatagaagttcaagaggatctgacttatattgagaaaccagtccgtatcttggaaatagatgagaggagaaccagaaatcgagttatccgtttttgcaaagtccaatggagtaatcactcggaagaagaatcaacttgggaacgggaagatgaattgaagtcagctcatccgcatctgttcgccagttcttccgaatctcgaggacgagattctgtttaaggggggtaggtttgtcacaccctaaaaatccaaaatatataaattgttgtttaattggaattattagaatttattttaaaagcctagaagagaagatctaattttaattaataaattccaatataaaatggggccagataaaatttcattaaatactttgcttaattctacaattcctagatttttctgggatttatttgagctaaggaagtatttttaataaatggaattgcatttcatgaggggaaacgatcttcgggatctcctctaccttttctcttttggaatcatcggctaattttgtttggaaattcgaggattcgagttcgattcggatcgatctctctcctccgagccctagactttccttctcgtcgccggtcgccgtgggcctccgacgctgccttctagcccctataaaaggacccccggtgtcgccgctacccgtcgccaccctcgccttcgtctctcgtcgtcggaagcgccctagcaccgtgtagccccgcgccaccatcgtcgccgtcgctccagccgtgcgccgctgccgttccggtcgtcgtcgtcgctcggggaggtcgccgtcgtggtcgccgtcgcgtcgccgtcctcgtccgccccttcgccgtcgttgaagaccgtcggagcaccgtcgccgtcgtcaacccgaagagtgccgccgcttcttcctcgacgccgtcgccgtccgttgatcttccgccgccgttttggtcaccggtgagttcgccgcatcgccctctacgtgctggtgccctccgttcgcgtcgccgcgccgtcgttcgccggcgagtttgcaagcccgagtcgccgctggtgatgacgtcatcgccgacgtcatcgttgccgttcgtcgtggtccggccgtggaccggtcaatctcggccgtccgttcccgtgaaccgctgccgtgcacccggtccaccgcaaaccctagccgctgacgcaataaacccctttttccttttcaaaaataattcattattgcgtcataattcaattaaaatccacataagtgttttaatccgatttaaacttcaaaaattcataactaattcatcttagctcggatttagttggttcaagtctctaaatttttctaaaattgagatctacatgttaaaaatatccacatgtactgttcatgcttgtttatgtgctgtttggtgattttgctctttcctgtttagattccgacgtttccggagagtccgttttcgcaggagaagaatttgaagagttccaaggctagcaaggcaagtcacacagatcccaaataatcctttgagcatgttgaacccgtttaaagctactgtttctattcaactattgcatttattttcgaatgtcattgggtggaattaacctattgtttgttatagccctttttgttcttgattactttattccttgatactctgggttattaaaacctgactagttgggctgtatatattggttccactagatattagatatgatttcttagccatgcttagaaacattagcacattattgggataacttatgactcactattaattaatgatggcttaatgatagttcacgatggtcaatcgtgattggttaattaattacttgccaactaaaacttgataatggtgggttgtgagcacatggttttgagagtcgtgctcatgacaattaaggaccggttcacgagtttcggttgtgaaacattaaccgtgccaaccacaagccagcgtgggcaacggctttaccttttgtacagcatggttcattgcggagcaccaaactgagaagtggcggagataagcccacgggggtcgctgaggagtccatgccttgtttataagggggtgattatgatccaggaatggtgcgctgtggtggattgtgttgtgcgaggggtactgtcacagctcctttccgaggtaccgtggtggtattgaggcacatggtgacatgatgtggggctgtgtcttgtgggtacagtggtacacctctgatcagagtaaaactattcgaatagccgtgcccgcggttatgggcgggtctaacaatatcattcgtgattagtctcacacctctcatcataataaaagatgctataactggtaataatttgtttagctcctggtttggaatggtatattcctggtttggagatagatctgtacagccggctatggttgttcagaaaggttgggcctatacaacagggtatgttgtatagcgttggattaatattgtttaattattacttaactgttttattaaattcttaaatatttcttaaatgctgtttatgcaaatgaaaccctattatgccatcctttgttatcctgtgcacttgcatatttgctgagtggcttgctgagtatgtcatatactcaccttgcaatcattcatcagaggaagagttctacaatgatgctgatggtgtggaggattaggtgtagccctggtcaagctgcctgtggggtggagccgtctgcgccgtttatttttttttccgctgcttagatctttaatgattgagaggaactatctacctctgtaatgacattttgttcgcttattaactagagtaataattgtactctattatcaatttgttattgtgtgcctcggctgattcctggacgatggttcacacacatgtaagcgtttggaattttggatggaaattccgggcgtgacaatccgttccttagcaccgcaggagccaacactgacgtgggaacaggaagtatccgtttccatatcaacgggaaggaggaaaagtttgagttccagccaaagactgaacaatgctccatggtcagaataaagtatgggccaaacctgcaaaacattcaaatggtcgaagtggagccacccaaaaaggacagcctggtaaagttcatgcagaatttcctggaaaaggaaacaacgatgcctaggaaccgttattggaaaacgccggtgaaatcaagcacaccggccaagaagctagaggagccggctcaaaggaagccttctcccgccccatcacctccagagacggtggaaaatccgtgcactaaacggaagggaggtacggtcttgcacgtcggacccaaaatgacgcgaccttcgccaacaggtaaattggtatgtatccacttatttgctttcaacaatttaaatttttgcatcaacacatgtttgaatttcaaatttgcatttaggatttttgaattttgaggaaacccttcaaatgaattttttagagcaaccaaaataaaattttcaacgaaaattcactgtgccatgaccacactgatcattggaacccaacggccgaaagtggggccagttgggttcaccaggggttcggccgaaccccctggtttggccgaaccggccaggcaacggtcagctgcgtcccttttcgaggcaacggctagtgggccccacaggtcagttttgaccgttgtgggagcactacttaagccaaccagccaggagcgggaaatccatcccatttcaacacattttcattccctctccaaagtttgctctcaaattcattcaggctttgatagtttccctcaaattcaaatacatagttgcatatatacaagttgctttagtgaaactgatcggcgggtgaaactcttgctattctaacccccgctgagttagtccgttcttgctccattgtgtagaatgaggaggcgattgtctcgtctgttcaaggggtccggctcttcgtcaagttgtcatgatgagtctagtactcattcatcagctgacctcgaccatgttcaagaggatgccgaagctccacgacgtttcctgaacgacaccgacctcgaccttatcgatgatcgggaaagacaagcctactacatgctgagtgaccgggagtatgctcacatgcgagaatactctccggagctgctgaaaaagataggtatggatgttgattttcgtgctatttggaaagctgttggttggcagagatttgctgtggtagataagcctagttctcgtttgcttactttgcaatttctgtgcactttgaaagaaatagaagatggaatttcctttcactttttccataaggaatacacatttacatggaaaggattaagtaaacttcttggttttcacgattcttgtaaaatcgatctccagaaaggaatttctgggttcgagaaaaataggttttgggaagatatttctggtgctccaatttgcaagaaacctaggacgaatgatatccataatcctgatcttaggctcatgcacaattgattgctatgactttgtttcctagaggtgatcttagacccattaggggggataaatttactatcatgtttgccatggttaggaagataaaaatttctcttgtgaaatgcatgataagacaatggttagaaagtatgaggttttctgctcctattgaatgcacttctccgattgctcggatagcgaaagggctgggggtcgttagtgaccagattgctttcatctctactgcttgtccatgtattgatgagaattatctagtgcaaggacatattatgaaacatggagtaggtggatctttgatatactttttcctcggttgtataaatgaaatcctattgccaaatgcggggtatcatttgtacaactgccatgaactaaccattccctgcagaccatagaagaatctcgtgcaggtggagcatacagggagacgcgcagcatggcaaggaacgaacgagaaagttcatcatcctcaacacccgtgcagatgtatgaggcaggttaggaaccaactgggcaagtgccagtgaggaacggtggcatgcgcctcatgacatagaatggggggacaaccaaccccccagatcaagtggtatgctcccatctccaagtgaatggcgctcaagttcctctcgttgggactagggtgaaatcaccaggagaatggatacccttgatgtgcagacgggagagatccaatataacctcacagaacacatagcccagacgcaagagtggcaacagactgctgatgctcaatttgccaacatcaacaacatgatccagcaacagcacgatgaccttcaagcgtacttccgcttccaggagttcaatccttatcaaggaccctaagcgtaagccaagcttggagggagacatctctccccctgctgagctaacttgtatcacattgcatatttccctttccaattgcatatttgcttcttacttgcctcctataaacctgaaaacaacataaaaatttgcaaaataaaaaataccaaaagatatgataggtntgagtcatgctaggtaagacaagctagctctctttgttgaaatgatgaatagttgctctgttttatatctcttatatatgggttcataggtaagtgctctctcaaagattaaatataagtagccaataaatctaggaacctaaggtaaatgagctgcacttgctgatcttagtctaagttgttgcaagatatgagatagtaaataagagttactatgatcctggtcctagtttgacttaaattccggatgttttgtttttcaaaatgataaatttggaagttcctcatttgatataaattcctaccagagccaaaaatgtgccatcataattgaactatatacattttggttgcttgtcattccattgaactttgtcaaactcttctgacttgtgtagatacttctcatgctctatgaccaagatcatacacccacatatatgcacatgctaaactcctacatcgggagctagcaatattccattccatttccatattaccaccaaaataaattctccatgctttcatatgctttcttctcctaaaaagaaaatccttttgaaaaaaaagagaaggagggaaatgcatggttatgaaaaaaaaaataaagttatgctctcacaagcatgggaatgatactgaaaaaaaatgttagccatgccctctcttaattaataaaacaaggatttttttggagaagaaagtaagcacaaaggagaagcattttctttatatgtcatttccaccatatatcacacacacactttgcacgatcttaatcttgagtatgtttagttatctgctttagtctgagtttttgacttagtaataaatgtgaatgcaagtatgccatgtttgatctctaccgagctccacatatcaaatcttagagtaggaatcaagaaggcaaaaatagcgaggaattcattttgatacacttagagagaatgagtgaatcatttgaggaacttggctttcttttgcaaaatcattttgaaaacttccgggacgaaagttgaataaagattgggtgattggtactctaattgctattctgtctttcaaccgcccaagacaaggagaagcagtgtctcgtgggaatcaggggtaagggtaagccaccgtgccaaagattatttaatctgagagagagtacatataccttgcacctgtacctttgagatatacagcatagtagcaacacctaatcaacaacaaagtttttgtttcctttcgtccttcactcgggacgagtgaagattcaagcttggggggttttgttgacggtcgttagcaatcagttttaccgtcaacattatcaaaatagaggagaactagttatgcttgcaatgcatatatgcgctagaataataatattccactagtatttggttcattaacccttctgcagagaataatcataaagtgaaggagaatcgacatcaaatcagacgataaatcaatcggacgatgtcgaggattagacttatgtatgaatgggccaagatctcagaattaacacgatgaattgggccaaaatttacaagtctacgaagtgaagcaacagaggatgccgccagccaaaacatgggctggttgggccggcccctagttcggccgaaccagggggttcggccgaacctcccgtggcgccaatggatgcagggtttggatggatggctaggattgatccgcaatgacggttggagggtattaccgaccattccaaccgtcacaaccgtcattacctgcctataaaaggagctcctcttctcacttcactcacacacctcaagcatgagctctctcatattctctcaagttaggccttgtttgtttcagcttatgattattataatctagattattaaaccaaattactataagctggattataataagctgacatagaataagctgtgagttgtttgtttgtccggattattggaggtatggattattgggtttgtaaggctgaagtctataataccctcagctattttggatgccttattcatccttgtcactatataaaacaaatacgtaatttaaataatgtcatctattaataaataaaacattcatgaatatgttttttttacaacagactgaacaataaattattatctcctagcaaataaagcatcggtaatattatcacgaaagatatttgcgtcgccctcttcgtctcccaattgactagcattccctcgagatgaaggcatcggcatatagttttcatcgttatcacaccgatcgaactcctcgtcactcaatttactatctcgaatgaaattatgaagcgccatgcatgcatgtattatttttgtttgcttgagcatcggataactcgtaagtccaatagaattctccatttcatcttcaaaacgccaaaagaacgctcaatcacgttacgaagagatgaatgtaagtggttgaacacctccttcttgccactaggacgtggacccgctcgaaactctggtaaatggtatttggtccctttatatggagctagaaatcccattcgatttggatagcccgagtcaacaaggtaaaatttccctgttgatataaacataaacatactttattagacatcactttaacactgaaactagtaagaaaagtgaaaagatatatgtgaaattacctggtggaggatgagggaagatagtggcatatttgcataaagcatcattaaacaccctcatatcatgtgccgatccgggccatcccgcaacaatgaatgtaaacctcatatcaaagtcacaaacagccaaaacattttgagtgggatacttgttcctacccacatgctgaaccacctttgatgcgggcacaacaactagtatatgcgtcccatctattgcacctatgcaattattgaaatgaggctgaaaccgatcaccatgtagtcttgggtgaatcgttgtgaagtgtggatctctaggtttgactagatcttttgagagaaggtaaacactctgcaacacttcctcaaatttcacgctgattgttccttttgat

SEQ ID NO: 5278 - DNA, 3508 bp, Oryza sativa
agatagccatgcactcttgaaattttcaaagagaaataaatggaagaggatgtatacaaaaggagttattgattcattttttttccacccacaaatttaccatacacatacacatacacatgcacattcttgaccagaaagtatgttttgtatttccgtggatccattatttgactttgcaatatatgtgatgcaagtaatgctctactcttttccataccctgagctccacaaaagccttattagatggtaggaaaagaaaaggcacaatcatatgccttgtgaggaatcatacactttgagcgatcgaaagaatcaatggaggagcaaagcatagttataattttgtgttacctcaaaaaccacaagttgttcttcatgaaaaattagggtgacttaatgtcaagattgttccatttctcaattgctcaagatcgcatggtagacactataaagatcgacaagtacaggtatggctttgaataatttgtttgcatgatgattagttaggaagtcataactctgttgtagagtccatagccttcactcgggatgagcaaaggttaagtgtgggggtgttgttgacggtccttaaatcataatatctgaccatcaatacctgcaaataatgaaataaaacacggtatccaacttagtggtaggtgttattactaatcatttccactagtgttggtgaaatatgtgtatgcaggtaatttgaggagaaaacacatccgtcatgtgacaaaatgcacctccgcacattcaggatgcgtttacacggattagaggcccaataagtcaataaaaactatttagaattggaccaaaacatcgcccaggttgttgggggcccattaaccaacctcccgaccaaaggagaggccaggaggagagtttttgggttcggccgaaccaatcctggtgcttcccgccaactactttcacctggacgtctcggatttctccccttaggcagttgcagggtgttttggtcatttcccatacccctaactgtcatttggagcctatataaggaggtcttcatctcacttcaagcacacacaactttgagctgaattacaagaggctctattgtatcttttgtacattagaaataggtagaaagcgaggggaagctctgaaggagtgcccggaagtttggcgctcatccgacttctgcctcgacgagtgtagcttcctaggaggaattctgaaggagtactggagtatcggtgagtactggagtactggccgagtagcttcctagatggctacgaaatcagtcttggctttatagccatggttcgagagaaaaccttctctggtagtatcggtgaaaatccatacctccatcttcaggactttgagctagtgtgttcgtgcctatctatcgtcggcatgacacatgatactcttaagtggaaattgtttcctttttctcgtagagatgaagctaagcaatggtacactctatctgtcaagaaattccactgtgaatgggaggagcttaagtgcaatttctgccttactttctttccattaacccgtgtaatcaatctttgagtagacatcctttcttttcgacagaatgagaaggaatatctcggtgcagcctaggccagtttctcactgttaactcaatctggcccagacttgtcgttacccgaccacgtgttgttgcaacattttcggtacgggttagacaaggagtttgccgaaaatctcaatatttctgcccgaggatcgttcgcacacaagacaaccgccgaaggaagagaactcttagatttgatcttagagaacgattctttcggccgaagcgaatccgtcccgaaggtcgagattattcatgaggaacctctgcacgtggagttggaacccgactcaactgtcgaatcctcatcccggtcgcaggagccggaggaagaagaaattcatcctccggaaatttcattccaattcgaggaggatcttttcgaagattattagaacaccttgaattattcctgagagaagagaccaccgaccaaggtcaattctaatgaacctcttgataaatctatgcttaaagagacggtgaagaggttgaccatcatcatgagtaacaaatggttaagagaaggagagctcttatctgaatcgattcagatccgatgcccctcctcaaccattatgtgtcacattggaggtaattcggtccgtgctctgtataatccctctgttggtgccaatattatgtccgcaacctttgcattcgattgcttaggggacagatcgttggaaccaaccgtcagaaccttccgaatttccacaaactctactaccgaaggtttagggattatctctggagtgcccacacggcacaacagtgttgaggtcatattagattttcatgtgtttgaaatatatgatttcgacatactcatagggcatcccatagaaaaactcttagatgtgcccgaaaccggtgtccttaacctgaaaataggaagaattgccacctccgtccctatgttgcaatcaaccaattctttgatggagtctcttcctgttcctgagccaattgagggagtgatggctatttctccattcgagaccctagagtctattttcgatgaatccatcgaagaattcaatgaaggggaggatgaaactggagaaacgatggatctgccaaaaacggatctgccgtcacgagccccaattgagctaaagcccttaccgtcaagcctaagttatgcctttctgaacagcgatgcggagtctctagtcattataagtgacaaactcctgagagggagatggcccgacttatcgccattttagaaaagcatagtgctgcttttggctattccctccaagacttaaaaggcatcagtccgaccctttgcactcatcgcattctcttagaaccgtctagcacaccatctagggaacctcagaggaggctaaataatgcgatgagagaggtcataaaaaaggaagtcttgaaactcctacataccgggattatctatcccgtaccatatagcgagtgggtcagccctgtccaagtagtgcctaagaagggaggcatgacggtcgttgaaaactcgaacaacgagttgatcccgcaacgaaccgtcacgggatggagaatgtgcattgactataggaaactcaacaaggctacgaagaaggatcacttttcgctgcctttcattgatgaaatgcttgagcggttggctaaccattccttcttttgtttccttgatgggtattctagttatcaccaaatccccatctatcccgatgatcaaagtaaaaccacattcacgtgcccatacggaacgtatgcatatcgaagaatgtcgttcgggtagtgcaatgcacccgcgtcatttcaaagatgcatgatgtctattttctctgacatgatcgaggatatcatggaagtcttcatggacgatttttcagtctatggtaaaacattcaatcattgtttggagaatttagataaggtctt

SEQ ID NO: 5279 - DNA, 1811 bp, Oryza sativa
attcctgcagcccggagagagagagcgacggcgcgagctcgattccggcgggaagagagggcggtgagtggcggaaacggtggtggggagctcggggagggtttatatagggttgggagtgagagagggcggtcggaggagggggaaacgggcgcgggagacccggccgccattaatggcgccggcgaggttaggggaggggtttccaaacgaatccgagggagagagagagagggaagaaatgggggaaagggggaggggatcccggggaataattccccccactttattgcgcgcggggacggcgggaggcggcggcgctagggcgtgggcggggcggcgggagcggcgggaggatagggttgacaggtgggccccacccgtcagcgagggtggcgggcgggcccgcccgtcagcggcgcgcgcgcggggagaggccgagtgggccgcggggagaggagggagaggggagggagatgggccgggccggccagagagagagagggaaggaaaaagagagggagggagacaggactttggccgcgggccgagagagagagagagggaggtctttgggccagacttggcccaaagggagaagggggattatttttagctttttctttttaataaactctgataattgtttttgttgcttaataattatttccggtgctctgaaaattcaagtaaaatttgagggctccttttagaccaaggagaatttaacaaaaattctccgggccacattcgaatttttctggcacgtattttagtgtttgtcaatttcttttcgaattttaattaattctattattccttttagaaaatgatttttatttcgggatgaatttatcaggacgtgacagaatcatcagctaatttcgtttggaaattcgaggattcgagttcgattcggatcgatctctctcctccgagccctagactttccttctcgtcgccggtcgccgtgggcctccgacgctgccttctagcccctataaaaggacccccggtgtcgccactacccgtcgccaccctcgccttcgtctctcgtcgtcggaagcgccctagcaccgtgtagccccgcgccaccatcgtcaccgtcgctccagccgtgcgccgccgccgttccggtcgtcgtcgtcgctcggggaggtcgccgtcgtggtcgccgtcgcgtcgccgtcctcgtccgccccttcgccgtcgttgaagaccgtcggagcaccgtcgccgtcgtcaagccgaagagtgccgccgcttcttcctcgacgccgtcgccgtccgttgatcttccgccgccgttttggtcaccggtgagttcgccgcgtcgccctctacgtgctggtgccctccgttcgcgtcgccgcgccgtcgttcgccggcgagtttgcaagcccgagtcgccgtaggtgatgacgtcatcgccgacgtcatcgttgccgttcgtcgtggtccggccgtggaccggtcgatctcggccgtccgttttggatggaaagatcttggccgttcgttcccgtgaaccgctgccgtgcgcccggtccaccgcaaaccctagccgctgacgcaataaacccctttttccttttcaagaataattcattattgcgtcataattcaattaaaatccatataagtgttttaatccgatttaaacttcaaaaattcataactaattcatcttagctcggatttagttggttcaagtctctaaatttttctaaaattgagatctacatgttaaaaatatccacatgtactgttcagcttgtttatgtgctgtttggtgattttgctctttcctg

SEQ ID NO: 5280 - DNA, 17726 bp, Oryza sativa
cctatttgaatacatgtcccagtcaagggagcagaacaataagaacggaggtacttgacacttgaaagcttggaaagttcattatttttcagggatttgttcctattttgacagaagcaaacgttttcaggaagcacttctcatctctctccaatacttccaagaccccattaggcgagctggatagcaaatgtgggaacagttgcaaacttaacaattagatgcaaaacgaaaggtgtgctagtgtggttcaattccctcggtggaatatgctcatggtcattatgttccagtgaaaaggcacttcatcttcagtgatctcaacacttattttcgaacacctgtgtttatttcactgaaagagagctttaggcggtcgtttacccatttcaactattgaaatctttttgctgggcaaaccttgggcaggtagattgtttcgtgcctaagagcagctatggacagttgttaaacgcttattgggtagccatgttttagtgaagattgttttctgaccatccaattgcatctatcccaaatcatgatatacatataaattaaatcttgaacagtaggtggtggccgtttttatttttccgcagatcattccttgattgtaccaccggtaatttcgttcttcatttcaagcgctgtccaccttttggcctcgcttaagatcggtgtactacatatgccggtaatcgagaacagtaaagtggtggccgtttttatttttccgcagatcattccttgattgtaccaccgcccaccggtaatttcgttcttcatttcaagcgctgtccatcttttggcctcacttgagatcggtgtacacatataaaaattaagaggactatagttaccatgaaggccgaatgtctttttacggactgtgccaattaggagctcaactctagattattcataccaacatacatatgtgacattctatgatttatcaatgacgaattgacgagcgctcgtttctataatttccattctcagggaaaaatatttgagtcaaaaaactttgtcatgggtgacttataaagcgggtaattttcatttctagcatggtttgatggaagtcaggaagaattcctgaaattttgttcaacttaggttggagatggcaaaaacaatctgttttgggaggataattggtatggtggcagacctctgaatttgcagctccttgctttatacaacattacccatactagacatatcacccttgcaaaactgaaggagaaaggatgggagattatcaaattcagaaggactttgcatggagataaacttagagactggattaaacagagatggatgcttctgaatttgcaagaaggaataaaagataaaatgtggtggaatctagaaaagcatggttgcttcactgtcaaatccttttattaaagctcttaaaagggagcaagtggcattcccatataaaaaaaatctggaagtttaaaatacctccgaaaatcaagattttcctatggctggtgttaaaaaacagaatccttactaaagataacctttttaagagaggttggagaaaatgtgataaattgtgccaattctgtgataaggaggagtccatacagcatttattttttgaatgctctgttgctaaattgatctggaatgtgatgttgtgtgccttgaatataacacctgctagagataaaaaccatatgtttggataatggttatctaattttgacaaacactctaagcaacttgtgatggtggggggtggcagctgtattatgggccatttggaagtccagaaacaaagtgtgttttgataaaaaatggcccaatgatccaattgagctgatatatcttacatgtcattttattgaaaattgggctaacttgcagaaatcggaggcaagacaaagaagcttaatgttgggagccaagctggcaagacaagtggcaagtgaagtcttcagttcccgatttgggtggagaatctatgcaagacgtttggaataaagaagttcaggagtttagtgttgctgagttctttgctttgctatggtactactcggttaggtctgccctttacatcttgttgtctgtgatctggtgatctctgtaaagcttgccctgcagaaactgttagtctctcttgtcagggtgctgctccagtaagggggttgtgtttagccttttcctttgtttttttacttctgaaccctgttgtacttgtcgtttcatttttagtaatggaaatgggggctttccagccctagttaaaaaaaaattgtaacgtgtttttctttcctttttgctattacagttagttaacctctgtgttagttttttttcatttgtgctaattttttgacaaattttgttacaggagatcatgactttatggttttagctgtaggacactgtccgaagtgacttttagcggaagacactcttaaaaaatggatcgtggatatttgctgatgaacacatcattagttaaaataataattttcggttgaagaggagagagaaatcacattaaatatcaaaaatgctcttggacccacatttcaactctcctatctctcttctctctctatcctctcctccagcgccgcatcttgggggattttatgggcggtgcacggttgagttcatggacatggtggcagcaatagcggcgatggcggaggtgtcgacaccgccgagcctggttaagatgacggagaaggctctcgatgagatgccgcagtggtcgtggcagagcgtggtggacatagtcaggtagtgccagcggctagctgcacccgatggtggacgctacagggatgttcgaccaggtcatcggcgcgctggtgtcccacgtggccatcaccccaggggacgccaccctgacgagcttcctcgccggagagctcggtgttccggttctcgtgcgacaccaagagcagctgcctcagcgtgcggtgcaccagccgcacctagtggttcgaggacctcgccgtcgtcctcagccccggcatgttggagcgcgtcgccagggcgcgctaggggcagccattgtaaacccgatttgcccgaccggtgacttgacgcgtcaggagctggctattgtcacgcccggaaattctgtagtaatttccgaactaatttgtgcataaaatcctcgtccaggaatcagccgaggtacacaaactgacaatttaatatacaaatccatcttaataataacgttacatacttacaaaagaaaagaaaacagcagcggaataacgatctagcgatgacttcagctccactcccacaggcagctcaactggggtataagccaaacgtcttctccttctggatcctttatcttcaactgaggtttgatgattattgcaagaatgagcatatgacatactcaacaaaccacacagcaaatatgcaagtgcacaaggataccaaatgatggcataatataggctcatttgcaaaagcagcatttagcaaaacatttaagagaagtaaaacagtggagtaattaatcagaaattttaatcaacactgagcaacacacccatgctgcacaggcccaaccatcctgaacaaccatacccggctgtacagttctaactccaaaccaggagctaagcaaattattaccagttataacatccataattattgtgaggggtgtgagactaatcacgaaaaacattgctcaactcgcccataaccgcgggcacggctattcgaatagttttactctggccagaggtgtaccactgtacccacaagacacgattccacacatgttgccatgccccgaaataccaccacggcattgcaatgggggaaatcgtgacagtaccctttgcacaacacaactcaaaacagtgcaccgttcctggatcataatctccccctcaaaaccagaggcaatggactccccagcgacccccacggacttcttgccgcttcacagtctggcacactatgatgaatcatgctatacaaaagataaagccgttgcccacgctggcttgtggttggcacgataaatgtttcacaacagtagctcgcgaaccagtccttaattgtcatgagcacaaccatcaaaaccatatgctcacaacccaccttaaccagattttatttatcaattaattaacatcacacgattaaccatcgtgatcgaccattaaatataaccataattaaaataatataatatagtttataattatcccctttagttagctaatgtttctaagcatagctaagcacacatacatatagcatttagctgaaccaatccaatatataaggttcatgctactcaaattataacccataggaaaataaagtcatcttaggccattaattaacggggaaaggttcaccacccaatgacattcgaaaataatgcatagttgaaataaaataatagctttaaacgggttcaacatgctcaaagggttatttgggatctgtgtgacttgccttgcaataatcggtcttcaattaatcttcttgaatacttccggcgcactcacgaaccttcgcaacgatggaaacgacaagctaacacgcaaaacgaagaaaaagactaataaaaaccaaataaacaatacaaaaacaagcataaacagtacatgtggatatttttaacatgtagatcttgattttagaaaaatttagcaacttgaaccacctgaaacggatctacggttatttagttatgattttccgaagatttaatctattaaaaaaaactggaaaaggggaagatgatgatgtcatgatgacgtcatcaatggcggccggctcggatggcgacctcgccggagctagggtgattggccgggattttggaggacatgtacacgtagaggacgacgagacgaacccaacgatactcaccctcgtgccaaacgacgaccgacgacggccggcgacgaggaggcgacggcggcggctcgggttggccggtggggacgggctacggcggccggcggcgaaggagaggtggcggccgagcttctccacctcttggcgaaaccaacggcggcgacggcaagcgacggcgacgacggaggcggcgtggcggcgcaaccggagttcggccagcggcggcggcggatggtttcacgcggcgacggctctacgggtcacgggagaggacgggagagggggcaaacgaaaaagaaggactagggggtcctatttatagccttggattgaagagatcggactcctcccgcaagaaaatcgactcgggaaatcaaaaactcggttttggagataaactcggaaacgagttcgattcgggcaagatactcaacgatttgctccgattttgggggtaaagatagaggaggatgagaggataaaaactcctcaaacaatcggaagaaaaagggccggattgggtgcggatttggaggggaaaaggggcggctcgagctagcaaggccggccggccggaggtaggagaagggcccgacatgtgggccccacatgtcggtgtcccatgagaggaggggcgggcggctcggcttgagccgactcgggcggccttgggccggctccggcgtgcggaagagagaggaatgttgggccgaattcggcccaacggcttagggaggggtttttgaactttttaattaaaataatttgtgaaatgttgtttcaattattaaaaatacttcccttgctcaaataattcccagaaaaatctagaaaatagaggaacaagcaaagtatttaataaaattttatctagctcatttttatgttgaaaattttcctagattattagagtttaacttgtaggcttttaaaataaattctaataattccaattaaacaacaatttatatatttaggatttttagggcgtgacagctatactcatgaatggtgaggtccccgatcagagttcgggcctcattttcggcctgggttagggtgagaactgcgcaaaaaggcaaaaaaacaagagaggcaaaaaaaaaaaaaaagaacaaaagggtatgagataaataaagagttagcaaattagaaaaacttatagaaaattccctaaatacccctgaaaatttactcaatcccttcaatacccctgaatttgacatcatcccttatatacccctgagttttcattttgatctcctctatacccatctccattagttgaccattagttgaccgctaaatattttaaaatgactatattatccatcctatacatatgtggtacctacccaataaattttcatatgaaaaaaattaacttatacaaaataaaagcaatataatcatttaatgcccaacttaaaaaataaaagttattattttttattttttaaaaattatgattaaatccatacattagtttcgctagaaaattaagagcaaaaactaaatgttatttaggtttaaatttttgggaagatatacgaaatttgtcaaatttgatctgaaatttatttaaaaattttaaatttgttttctaatttgtgataaactaattacatcccctttgttttttcacaacgaatcttttttcactaaatatttgtagaaaagtaattttcaaattttatgcagaacctttttttacgataaatcttttttattttaatgaaataatgttttatttttaaaaattcataacaaatatttagtaatttattccttattggttttcacaactcaaataatttacacataaaacatttctagcttttaacaatataccaaggacaataaaataatttctacaataactaacggtcaaactaatggtcaactaacggagtgggtatgtaagggatccaaataaaaaactcaggggtatataagagatcaaacaaatttcaggggcgtagaagggattaggtgaaattacatgggcatatagggaattggcccaaaaacttacgattaacgcctcctggcaaaacaaggcgaggcaagtcgagaacccgttcatcctcatttacggtgatctgccaacatgcaaaactcctccacgaaatcacagcagctcaaccgatgggcggttctccgcaaaagggtgaaacgggactcgatcgtcccatcaatcgccaccttcagcttccggttaggggagatcactagccggccctatcggattgccttcgtcgcgtctgtcttagctccatagggattcgtgtggtagaaccacctctccatccaatgccgctcccactttggcatggaggcattcactggccacaaatcggagcatacagcgcgaacattgaagttcacactcccaaagacggttttctttgtcccaaccggagtgaccaccatctttgagtgaacggtggcgaagaagatagcgccgaacagatcagtttatggcacgaaccccgcggtttggcaaatccagtcgaagatcgcgatccgaactaggactgagggactcagttgaggaagctccacttggaaaagttgaaggaccttggggagcaggacgtcgcatgggaagcgaagacctgcatcaaagaaggcggcgaagacaacggtccagccatcaacggggcgatgaaccactgcatcgccagcgaagaaggcttgcttttcaaccactgtacttgacgcgacgagcttcgccagatccgccttgttgaacagcgaagtgccgaggaagccggtgcagtcttcgccaatcttgcaggggtccggtccggtcgctgcggctggagcaggcttgcgcggagccatgatggaatggcgaaaaatgaaagtcagagctagcgaagactacaaggccgaaaaagaaaaggtgaaagcgagagcaagaacgcagccgggggaagtaaaaatagatggggtaaaagtgaaagcgacccacggggggactatatagccctagtcatgcgacggtttgccttccggccaatagcagcccaccacgtggcacccagggatggacacaatggtaactcttgttaggatgggccgaacagtaaaaggccacatgaacaggaaaaacgcgacccaaaacccgagtttaaagaaaagaagaagtgacctaactcacgtccgaaaaggatagaaggtcgaaaaacaacatggaaacgtttgagagaactcatgaaataacaagggttagcttctgcaggtgtacataggttttggcaggaacatcggccgaaagggggcacctcatgccataccacatatttgcacggtctcgcccaaagctccctactcgctcttgcccatgaggggcttgctggaggcatatcacgagggccttcgaccaaatctgccgaaaccaccagattagcaaagcgccgactaaaatcacaaggggtcgcttggaggtgaagccataggatgaagctgtaaggcgaagtcgaagaatggaagccataaggttcgtcatcaagtctctctgttgggtgaagccatggcgcgaagcagaaggggttcgcccaatggggctcgtcttcaacaaaagggctaggaggtgttgcggcccaagaaggctcacacaaaactttagggctatgtaataggggatccaaaaaaatttcatcattaatacattgcttttaccatccaatcatttcattgagagaagttattgtcatttcgacaacaatatagatactaatcctgatttttaaaactatagataaataaaattgttgtgtccttatgaattcaaaataaagtttacatataactttcgttaaaacaaagtttacttatattaatttaataaaattgaaaaacctatgtatttaatatatgtttaaaatttaaatatttaaaatattaatagcaatatatagcgcgtacttggcgtatagtacaccttggctgtgtttagttcagcgcaaagtttagattttggttaaaattaaagatgatataactaatatgtgtatatgacatattgatgtaatgaaaaataactaaactaaactttgattcaaagtttagaattatcggctgaccatccaaccaccaaaataatgccacaccagcatcgggctacagttcagaacgtcgcaatcagcgcctcggataaaaaaaaaaacctttcggcgctgccgaccttgtgagcccacccaaaactcgaatatacagtacgatattcacacgtctcccccacccaccccaatcaatcatgctaagctcaaacaaccgatctgcaactttgcagatttgaagattcatctcaccaaacaagaacatgatggagtattttacatctgaaaccaaaagcacaagcaaaagagagtccaatagtaacacaacaccctatctaaagcaaagaacattactacagctggaaaaattactacttcctcccttctataatactatgaaagatttttgagggatggcgaatctggacgaaagatttttgagggatggcgaatctggacacacagaatattattacagctgcaagtggcaacaaaaacaccctgctaggctgcttcgtcgtcgtcccggggacacacagctagctacatgacggagcaggcgttggggttctcgtcgctgaaggcagcggtgtagcggacctcggtggaggaggcgcgggcgagcggtgcggcggaggggtcggacaccacgttgcgcacgtaccccgcgggggccttcttgtcgtaggcgcccggtgcgtaggggtgcgccaccgtgtcgtacggcacgtatggccatggctccacccgcttcccggtcttgtacgccacgcgccgcatcaccttcccggcgtccacgtaccccgtcaccgtcaccttgttctgcttcgccgtcacctccaccgagctcacccctgcgcacatgcacagattcgtcaatcatttccacaacaaagaacaaaagctaaaggagcccttgttttgcttttcagagcgtgtgaaagaagaagcagcagcaaaaatatgattaagcacctttcatgtcctcaagggccttcttgatcttcctttcacagccttcgcagtctatccgcaccttcatctccactgtctgaaacaagaagaggatataggcataagttttttccactccaacaacacaactgtcaactagtactatcatggtacaaattcgactggaagacagatatacagagatcgacagaagagggagatgcgattaatggattaacatgttcagtattacctggaattgtttcctcttcttgaggtgtcggcgagtcctcggcacggagcagaactcggagacaacgtcgacgatgcccatctcctcaacaatctccaaccaaactcctcagtcctcactaaagagaccaaagaactgcaggtctttatctgtattactgtacaggccaagcaaagtagcagaggcttcctgagctgaaatgcaagtggattggatcctgcggtgtgtaggtatcgctcgccttctgatataaggcctcgccgcaaacggtggcatccaccggtgctttgacacgtgggcagagagacttttctgctggtgtgaacggagcggagcacatgagaggaagccggtaggaagatgatatggtccgagaggctccgttgggtgttgggttggggcccacacgtcgatacaagtgccacgtgggaggactgcctgccggcagcatggccaggtggtggtgattgatgtgagcgatatctctccaccgccaccgctattcaggtcttgggacgatgcgatgcacctaacctgccggccgacctgactgcctgccaagggatggggttcattgggagcggggatcgaacaaaagaaatagaaaaaaaatattttcctaatgtttaaccgtccgttttatttaaaaaatttataaatttcttctaatatttagtcatacataaaataatatatttatgttctattatgtaataacaataaaaatactaatcatattattttttaaaataagatgaacagtgaaacatgatacgaaaacccataacaacacttacttagggacggaggtagtttgatgaagctctctctcgtggcctgatcttctggtcagaggataattcttgctttgatcgagtacaacatttgcaatgtggctaccaaccagaacaagtctagaacgtcgtgcaatcgctacaccacaaacgatgtcataccaaccatgacacgtggttgatgatctcagcaatgcaaatgagagaacactgcaggaacaagataagatgcaatctaaattacgaataggtgatgaagcacgaagaaatagttctgattgaagtggtagatctaatcgacccgacaaatcaacacaccaactattaggagctctgaatctatagtcgccgactaatcgagcgaggattagagaaaaggtgaatggcacttggcaaaattcaactaaacaaaacccaaatgttctagagggtgcacatagacacttatagagaaaatagatctagggtttagtgttaattcgtggaggtggagggagacacttccgagatgggcctagtctattaatagtcccggttgcaataaaaactggaactaaaaatgatctttagtcccggttaaaaacaccacagctattttatgatcaccaaccgggattaaagatcatctttactcccggttcatcccgtgtcagtagtctgtcagggggccgaggatctttagtgggactaaagatcatctttatagtcccggttgataatactaaccgggactaaaaattatattgatctttagtcccggttagttttaccaactgggactaaaatttaatatgtagtatataatccctatcccttatcctctcctacacttcacaaatcccttccccttcctcttcacagatctaactcctccccctcctcgccttcctcctcacctctcctccccctcacttcccatccggtggccggcggcggcggccatggcgggcggcggcagctggcggggccgcgcccggcggcggccatggcgggcggccaaaggtgtcacgcgcggcagcggtcgtgccctctcgtctgccggccggcctcttttcttttttttttctgataatttgtgattgattgagatgtataattttgtgattcattgcatggatatgagatgtataatctgtcacacccagaaattctcgaaccagaatttctaagctgaatgtgcattaaacccctgtccaggaccagccagggtacacaaacgataattgttgacatacagacccacgtcttacaaaaatataaaagattacaaatgcagcgggaaagataaaagcgagctaaaccgggaagcttgacttcagcagcgggcgactccactccacaggcaaaccttgactgcagcgacgaaaccaacctctctgagacggctccaactgagaagaacttcaactctggtgtgggggaaaagagagcaagactgagtactacccactgtactcatcaagtcataccggaagaggaggtatgatgcaggatataaccaaaggaagctaggggttcttttgcataaagcaggcatttcaaaacagtagttgaaagcagtaaaacagctgtagtaattaatcaatattaaccaatcactatccaacgctacaccacgttgcaacaggcccaaccaaccacctgaactacaccagttcattaagctaaactaggggtgagactaatcacggtgaatctggttgatcgcccataaccgcgggcacggctattcgaatagttttactctagccagaggtgtacaactgtacccacaagacacgattccacacatgtcgccatgccccgaagtatcaccatgatactgcaaagggggaaatcgtgacaagaccctccacgtaaccctcccctaaccatccacaccacgctaaggtttcacccccacccctcaaaaggcagtgggcggtcccctcttgcgccgcggtgaatccggcagctggacaaccgaacacctcggccgacccaactccatcacgcccaccctcgctaccggtgcctaggaaagggtcgagctatacttcagatcaagcagttacccactcccgcttgcggtaagcacggtaagtctcccagggtttcccgtgaaccggtccttaactgccatgggtgcgaccagcaaaaccatgcacccacagcccaccattcagtgtattttaattaactaacaccattgcggtggcaccaatccaaaactatgctaatagacaaagtctatgtaataatgtgatccctttttgtgtactagttgagctaagcatggctaagcatttcctaaaccaacatctaatcattttgatacacaggttatcaatggcatatggtaaacaataaatggctaagtaataggacccatcccacatgacattgtaaaagaatgcaacatttaatagaaatgcagggtgtttgtaaattgggtacaatatgatcaaatgtaaagcatgacttgccttgctctcacattgacgagacgtcagcaacgccttcgagaaaccgcggatcgacgaaacggccgaaacctacgcgacaaacaaagcacacaagcaaaacatggtataagactactgaaacaggaaacaaaaccatttttaatggattatttgcatttttcttgatttactgagacttgaatggacttaaaacggagctcggatgaattacttatgaattttagaagataaactgtgtttttactaataaagaaaaagtccttaattaattattgcgcaataatacccagggctgacgtcatccaaggggggggggcggctgccgacaggcggggcccatgggtcagcttctcaaagaggagaggaagggggcgccggcacgtgggccccacaggtcagcggctcaaaagggaaggaggtggcgcctggcaggtgggccccaccaggcggtggctcaaaggcgaggcgagggtggcgtcggccgggctcggctcggcctcaaggccgaccggccgaccaaggcgaggcgacggcgaggcacggccaccgacggcggtgaccggcggtgcgggaagcgtcgacgacggccgaaaggcggcggcgcatggccggagcagcggcgtggccggcgctcgcgggaaggtgaggaaaggaggggtgtttgtaaattgggtacaatatgatcaaatgtaaagcatgacttgccttgctctcacattgacgagacgtcagcaacgccttcgagaaaccgcggatcgacgaaacggccgaaacctacgcgacaaacaaagcacacaagcaaaacatggtataagactactgaaacaggaaacaaaaccatttttaatggattatttgcatttttcttgatttactgagacttgaatggacttaaaacggagctcggatgaattacttatgaattttagaagataaactgtgtttttactaataaagaaaaagtccttaattaattattgcgcaataatacccagggctgacgtcatccaaggggggggggcggctgccgacaggcggggcccatgggtcagcttctcaaagaggagaggaagggggcgccggcacgtgggccccacaggtcagcggctcaaaagggaaggaggtggcgcctggcaggtgggccccaccaggcggtggctcaaaggggaggcgagggtggcgtcggccgggctcggctcggcctcaaggccgaccggccgaccaaggcgaggcgacggcgaggcacggccaccgacggcggtgaccggcggtgcgggaagcggcggcgacggccgaaaggcggcggcgcatggccggagcagcggcgtggccggcgctcgcgggaaggtgaggaaaggagggagagggaggactcaccgacgacacggtggccggagcggaagacgaaggcggcgacgacgacccgacgagaggaggggcggacgagcggcggcgacacctagagaaggggaggagaggagttagggatggagaaggcgaccgcgacaaccaaagtggctggctggagacggaggggaatggatagctcaccggctcgcgagggagatggggtcccggtggggttccggtgacgcgaggcggtggccgagatggcccacacggcggcggagctagcggcggcggcggcttggcgcggcggcggccctagtggcgacggcacgcggccggagatgggcggcggcggcggagctcggcgagcgcggcgcgacggcggtagagggcgtgggagaggacggtgaatgggggaaatgagagagagagctcgagtgagggtttttatgggcgagggaggggcggaaacggccggggatggcccctatttggccggcgacgtggagaggtggaggagagagagagggtgttgggggatttcaaatcccccaccacttgcgggcgcgcgcgtgcgggagatgcggggaaagggcggcgacgtgggcgcgaggtgcgggcgcggagtggaggcgcgacgtggagcggagaaggcggcggcgcgggcggttggagctccggctccaacgaccggaggtaggggacgaccgacaggtgggccccacctgtcggcgccagaaagagaaagggagggagggaggacttcggggaggggaaaggaggagcgggccggcccaggaagtggcgccgagcgcggggagagagatgggccgacggcccatctagagaaaaaggaaggaaaagaaaagaaaacgaggaaaaggattttcctgggattaaaaaattgcactttggtgatttttaattggttaaaattatttccagggctgtgaaaattccactaaaaatcttgttaatgcattggagcatggggaactcaagaaaaattccaccacgctatttccgattattaattgcatttattaactagggatttagctctaggttaattaagataatttcttcgggcaatttatttaaccaatttttaaaacaagaaaagggggaaacttctgggcgtgacataatctgtgatgtatttgatttgtgtgtattttttaggatttgtgatgtatttgatttgagtgcacttttttaaggatttgtgatgtatttgatttatgtttataataacttaagatttgggatgttactttgaattggggatttggggattgatttagggatatacatggcactagattcgggagaaaatatagagattaaatctggaaaaaaagggcaccatctgaactgacgctactctctctttagtcccggttggtgttatcaaccgggactaaagattcctcttttttttcccggttcgtaacaccaaccgatctttagtcccgggtatttgaaccgggactaaagatagcgatctttagtcccggattcgtactcccggttggaaaaccgggactataggggggttaccaaccgggagtaaaaaggctttctccaccagtgattagaaggcccaagacccaagttaggtttcagtaacagcactgccttgttttgacgattcatgttaactcggaatgaatttggatacgagaccgaatgcgtttgaaaggtagagagataagctttccatcaagtccaagatcacccaaatcggagatggcatggaggtgctaggtctgtttgaattcagtgttgtctctagaggccgaactaaatttcaaaactcattagactttaatattttatggatcccccgttcatccgatgcattgtttgacaatgttttatatttctcatgcttggttgtatgtatatacttcatgatcacatgttatcatccgcataaagcgaagacctaaacctgcagtagttgcaattgagttgggacaggaggcccactgtttcagttgcgggtaatatcttacgcaaggcctccattgcgaggattaaaaccataggtgaaagtggatcaccctatagcagtcttgaacctcttgcatggaagattcctgtcctgtagaaccattcatcagtaattttggacgatcaggtgagcaagagagatgagatccagtttctccatctatgggccaaagccaaaagttgtgagatctgtcaataaataagtccaactcactgaggccctctttattgaaggttaggtttattggtctagacttttaaatcagtttattgacttatatgatttataagctagtggatttaatgtcctaagtttagtgatggtgtcatacatctacctcacataagcaaaaaaaaaaaaagcttctcaaacctagcttttggcttaatagtgttagagtggcttatagcttcataaaagccaaacagaaaagctgcttatttgtttagacttagacttttcgacttataagttggcttataattaagcctaaataaagagggcctgagtccaggggcggatccagaaagaaaaaattgtgggggggctcaattacacagtttcttcacctctagtcatctagagacctttaatttatcatttatggtgaaaaaatcgaaggggatgctccgggggtatcgatgggtcttgtgggtgtaggggggactcgagtcccccttgcacccatgttggatctgcccctgcctaagtcgaatgcttttgggatatctaatttgaagagtatggttggcttattggttttatgcaacgttgaaccagattttgtacatatatgaaattatcatgaatagctctttttcaaataaaagcactgtttggtttggggatgccaagtctgtcagttttgggagcagcctatttgccaagaattttgtaacaattctttctaagctactcctccgtcccaaaaaacctcaacct

SEQ ID NO: 5281 - DNA, 23562 bp, Oryza sativa
ccaccaccaccaccaccaccaccaccacgtgcatcacagtgtaaaataaagttgtcaattctagacaaggatagtgattcaataccactaatacattcaaagtcttcagattatccacacaatgaactagcaatgtcagtagaacaacaatatccctctcttcgaagacatgaagaatgtgaggtgtcatcaacccaaacagtcattgagttatcttcattgagatattctgaatatacatatcaacatatatccatgaatattgaatataagactccaattctctctccctcggtatctacatcgttgcatgcagattcctcatgtattgctataacaaatggtccttcaagttcaaattatgtcgaggaagtaccaatggaaacaattttgaatcaaccaacattatccattcctttggaagcatgcaaggatgagctattgcattgtaaagaaaatggaggcattccaattccaccacctccacctcctctttgtggtaagtgtgtacaaatttcaacagaaaaattccttgtggggtgtgaaatgtttttgattccatcattgatacctcaatcaccaccctcacccccaccctcaataccattgtcttttccatcagctttaccttcaacctcaacatcatttacagctttacatcaactatcccatataaaaaccgcacctcctcctccaccaccaccacctagaggacttctagaaacttcatgtttatctccaatcacatcctccctaagagaacattcaaaaatattacctccccctcctccacctctcccaaaagaatgtttgccaactccatctccacctcaatcccctgattgtccatcttttcctacaaaatatgcaactacatctcctcttccatcaccaccaccaccacttctacataaagtacatgaatgtgttattccttctcataccaggcatgttgtagtacctgcaccaccaccaccacctccctttggagaacatcattctacttttagtaaagatttaacgacatcaccttgttccttttatgaagatcatgcaaaaaaatatactagaattcctctaccaccaccacccccagaaggtagccacggaattttagctacaacttctactgaattgattgatgctggtcctcaattgccaccattatctcatcttgaatggaaacggtgtccacatcatcctccagaaaggccacattatcttccaggagaagttggaggagctccatcgccaccatcaccacctcctcctcagagagaaaatacatcagtaggaattcaaggtggcattccacctctgccaccacctctgccaccaactctgggagattatggagtggctccacctcctcctagcattggtgcaggggctccaccacctcctcctccacctggaggaatcacaggagttcctcctccacctcctattggagggctaggtgggcatcaagctccaccagcacctcctttacctgaaggaatcggaggagttcctcctccacctcctgttggagggctaggagggcctccagctccaccacctccagctggatttcgaggtggaactccacctcccaatgcacatggaggggttgcaccaccacctccaccccctagaggacatggtggggtaggtggcccccctacccctccgggtgcacctgctcctccaatgcctcctggtgtgcctggtggtcctcctccaccccctggtggaaggggtttgcctgctccacctggtggcagaggtgtagtaggacatggacttactcgttccttggggctgaactcagctgccacagcaagaaggtcaactctaaaaccactacattgggttaaagtaacaagagcaatgcaagggagtttatgggcagaaatacaaaagcaagcagatgctaataggtaccctcttgttttttagctttttgattactagaaaatataacttctctacctctttcaccatagttacaacaaaaaatactgtagtgtaaacccgctgctatttcaatttatttctcgtatcatttttttaataaaattttactaactggtagtatcatgtatgtagccattctgaatttgatgtgaaagaattggagtctctttttgctattgctccaaagacaaaaggtggttcaaaatcagatggagctagcaaatctcttggatcaaaacctgacaaagttcatctggtaacttactctaacacattactatgctaaacagaaaatattcccagtacttttgtttaatctactgctatgataatgaattacttgattccatgcaagtgtaatgcgcacaaaattaataattactttcattttagaagacaagttttctatatagttgcggaaaaacctcattatcatattcacttttgaaaatgtgttgatggctttttgtaccgagattgtatctttagttcatatatttatatttcacggtattcattagcttctctctgacaataaaatctgcccttcattaattactggtatcacttgtgttttctaagagttaccttggtgtctttgaaatctacagattgatttaagacgagccaataacacagagatcatgttaactaagatcaaaatgccactacctgatatgatggtaagcaccctgctatttcttttttgcctttattgatgcacaatagttggacaaaagggcaaggtcattaaatgtctttgttccttgctaatactccttcagtaccatattagttttagctctaacctgaatcaaacttctctaacgacgaccgagtttataggaaaatgcaccagcatctaaaataacaaataaatgcactattaagagctatttcatggtggaattaatggaactaatttgatgttgtagatgttgatgtacttttatataaactatatcgaagttcaagaagtttgactttggacaaaactacataacttactatattggaacgaagggactaatatgactactatagtgattgaatatctatcgtgcgctatattatttccttggcgtagaactgatacaacatccaatatagctcgcttttaaccagttttgcatatgtgggctattattttgttgtttgggaattgcacacatagacctttgcattgtgacaacatccaacatagcttgtttttaaccagatttgcttacaatctgaagattaggtagctgaccaaaataaatcatcaacagagtttatgaaagttttgtttttggtgattgggttcttccactggaaagtagggtgtcagcctgcatttaagtgataaattaagtgggattccctactaacaaatattgagaattttttgggtttccttttgccaagtaggatgtagaagacattttatcgacacaatcaaaatttcatgtgaagctagcttcacatactttagatctagcttcacatactttaccacttgcgagagtgctcggtccagctcaccaaccgtgggtctcataagttacattgggcctacttcaccacaggtccaactaaagccacaacttcagatcctaggtctaaacaaaccaaaaggtggtttgatgggtgagtataacctccacatgttaagccatgatcccccatcatcaattatcaatgtaggactaaacccaacaattgcatcggatatgtaggcttcagctaaactacattactaaatatcatgtgttcctgtgttatctctgcaatgtcaaagttgatcaatggttgcagcaatcaggaaggttagtcatcgtttcactatatcgattaacttctgcaacactaccaatcagtgaaggccaaacactcgaactagtttgagatagtttctttaaaaacagggtagcaactccaaatccacaagtatagtcgcaatgatttatgttgaatattttcaagtcaatctgcatgcacttcaaggatttggatttggtttcgaaatttttatgaaaatagatctacaatggagacacgaatttttacgtggaaaacccttacaggaaaataccacgggtgccgaccgacaatgatcataattgagaagttgattcaaacataaaggaataacaatgggatcgtcgccacttcctatacggcttacaagagtatatataagggataaacggaaagacacacaatagggaaagacgtgatgacctactaggaaactagtctgaatattttgtcggcctaagatttggatcacatatttaacatgttttccatctggttcagctaatgcttataggaatgtttcaatcacattccatcttgatattaattaatacaccatatttagtccattttcctggagctgaattgtataccctgaaaccatttgcattttagaccaaggatcacctccgtttgatgaaactcagttcatgacatttagtagctacttcattcttaagaattattcagatttttagtggacatttactcaaaagttactcccattttttaaatggctaccggtaaggcttaaggtgcttcatccattctatatctactttctctacttgtaacagagtgctgctctagctttggatgattcagttctagacgctgatcaactggaaaatctcataaaattttgcccaacaaaagaggagatggaacttctaaaggttgttttaaaattaaagcttatatttccttgcactccttctgtaatctttaatttttctcttctctgaatatcttgcaaaagtaaagtatttgcactttttcctatcagaactacactggagacaaggaaactcttggaaagtgtgagcaggtaaaccttcatgcatgtttggactcttcttttgttatatattgatttgttttcacttatatttgatcagaactattgaggttataactgacaaattatattttgtacattcctattcatctcctccgtctgcagttttttctagagcttatgaaggtgccgagggttgaatctaagtttaggatatttgctttcaagattcaatttcaatcacaggtcatacactgttgaaattttgagttattatctccgtatttgaaatgtccatagattttcactatcccccttttcatttccctcttagattagggatgttagaaagaatttgctgactgtgtcatccgcttgtgaggaggtaaatatgttttaatacacctcctttggattaataagtattaatgtttatcacgtgagagctcatttcaatatgtcaatcagctcagaggctctgagaagttaaaggtgatcatggagaaaattctgtttctaggaaataaattaaatcagggaacaccaagaggtaatttactgcgtctattgacgagctataaaatctttcaaataaactttcatgcaaatatgtttagcttaaaatcattttgcagttgaaatttcctggataatttctaagctccctcttcattaggactaggagggagaaatgccctgtgacaacttcactgtatatataattacatttatcctttccactattatcaacaaaaataagttgtttctctaggtgcaacaatgtaaaacaattcaggctatagattgaagttgtttgaatgtcaatttaagtactgtatgttcaagatctgtgggtcactaattttagcttccctatacctcgtattcattgaggaagaaaaaatatttaatttttccttatcttgttgcaggccaggctcttggttttcgcttggacagcctattaaaacttacagacactcgtgcaaacaacagtagaatgacactaatgcactttctttgtaaggtatggagatatatagctgtcgtacactagttgttcatataaaatcaagcatgagtatgaaagataatgttgatcccaaaataataaatttgtctatactaattatgtggggcccaaatatcagtggtggtggccaccaccatcaccacaaggaatattcaaaggagtaaagatatattatgctcgtaggactagaaaagaatgtaattgtgatattttgcttttcaccacatttcaccaaaagagtgtcttgtaattacatacaaggcactcttcatgattaatatacctcaatagtgctatgtacattaactcaatagtgctatgtatattaactctaaaacatgtagttctttgataacttcatcactaaatcagtagttttgtgatacaatgctataaatctgtagttctatgaaaaatttggcactaaatctgtaatttcgtcatatacatttttgaatctgtagttttgcgatagtttagttaaaggcagccttagttaaaatatcgctagttttgtgatatttactcaatttgaaaggccaactaactagctaatttctttgtcatgtttaacttgtcatcatactgcttattttgctcctctcataaaattctaagtttgcttctataataagctttaattcttattaactcgatggttggtttaagtgtttatcagggccttgcggacaaatcaccacatttactggatttttatgaggaatttgtcaacctagaagctgcttctaaggtgtgtatgtcgatctgacgagagcatccaaaggacttgtgttgataaaaaaaattatacattgtttagaaaatggaagtttgtattgaacccaatcaattacatcacggtgcctctgcataactaagatacacacgaccacactcaacaaacaaaaaatggagaatatcatggatttgtaaggaccatcaatcgaaagaataaatcgtcacccatgaacaactccttaaatatatcctctaaatgcacaaagtattaagagccaccaatcctaatactagatctccacccatatacctgggtaaagaactccttgaccaccttctccaaatgtagacatgccgcaaccaccatatcccgcggatcaggcttctgtaggatagcccatgtacgaagccaatggataagacaatatataacctgtaatagtgaagttatgattttttttaatcaaaatatacattattcctgcatagccaaagcaaccaacaagtagcaaatgctcttaacaggacatgtgcttttaaattattatgaattccagcaaggcagctcccaaacatatgggctacactatgcagtggaggaagtccaaatgctacttggaccaaacagaatgggcaaaatcaaaaaaaaaaagatgtctaattgtctcatcattgtgacaaaaacaaccgttcttattgctttgccagtttccttttgtcaaattatccatcgttaacaccactccacaatgaaaataccaaagaaaaatcataacttttaagggtatctttagtttccaaagatgtttattaatattaagaacattgatgtgaattagagctaggtaatgagactgcaccgagaactccccatttgaggttaagttctaacgaaactcgtcttgctcctgagttaattgaaaatcagtgatacatgataataaatacaagtttaaggaccacccgtgcattttactcataataaattattccaagccacctattttgatcctataaggtcccttctccatgaaagggaatgattggtttctaagacttgtgcaacagtagccggcttatgcttaactatattttgaaggcaaggatactgttcttttaaggttgaattgcccaaccatttgtctctcataacctgatttgggagctatataaaggatccaaaccagagaaaatcccatttctccttcatgggggtggaccaaaagtataagtccctggccttccactaagcttgagaaagaggtttatcacctacatacttattacatatcaactgttgtcaaaccccttccgtggagagcaacttgaataagcacttactaagtagagccacattcttaatgtccaaaacatgaattcccaaccccccccccccttgttccttggggaggcactttttttctctgaccaccacatttccagtaaacctggagcgaaaatacttaagctttgtaagtatcccctttggtatggcaaagaaagacatcatatatctcgggaggctacttagcactgaattaatcaatgttagccatcctccggtggacaggagttttcctttccaactactttgatgtttttcaaagcattttatcacatctttacaatcggcatttcttaatctcctatagtgaatagggatacctagataccggaatagaaatttaccagtggaacaaccaaagagctccatgtattcattgttaaactcgttcgcttcaccaaagcaatataattagtttttatggaaatttatcttaagactgttaattgctcaaggcaaattttgctacatgacactgcttatgtgtggttttagctctaggacactgcccaaactcacttttgagggaaaacactccataaacatggtaatttgctagtggataccacgccgattaaaataataatttccggttgaagaggagagagaaaacgcgtgaaatgtcaaaaatgcccttaggcccacatgtcagctctatctcctatctctcttctcctcttccagcccacatgtcgctccccgccggccgccggccatgcccgcgcagatggcggtggaggcagtcgttgaactcgtcaccatcgacgtgacatcgagcggctcatcgagatgttcatctggaataactcgttggagaagggcgcccgccgatcggccgcggtggttgtctccatgctcaccgaggggaagttgaatgctctctgcgtcaccggcacccccggcgccatcgagtcagtcgcgtcgctgcattacgcttacctcgacgagctcaacctacttggcctccatgcccatccaccactctctgctaccgagcttgccgctagcaaaatcagtcgttccaccgccgggtatatttcgccggcgtcgtgtgcagtcgcctcccccaatctgcccttgcctctgaccatcacacgcgtgtttgtggggggaggggggattgcggcatcgtgattcggcgattgggatgagagaagggcggcagcggcggctgcggcggtggccatgagtggctcagcgtcgacggggatggggtgcgggagctacggctggcttgcgtcggccggcggtgggaggaagggcgggggtagggggtgggggtggcgaggcggcggggagaaggagcggctgcagctgctccaccgcgcgctacggctgatgggctgccggagggccagggtgcttctgctgctcgccactgcctcccaagcagtgtctacgcgggcatggccggcagccagcgaggagcgacatgtgggcaggaagagaagagagataggagatagagctgacagtgtgcccaagggcatttgcgacatttcacgcaatgtctctctcctcttcaaccagaaattattgttttaatcggcgcggtgtctactggcaaattaccatgtttaaggagtgttttcctctaaaagtgagtttggtagtgtactagggctaaaaccacacataagcagtgtcctgtagcaaaattttcctttgctcaatgacataaagcaataacgtcaggttacgagctttttctaatttatgatccataaaaaaaactatatcattggtatattgcaagatagagagaccatcattcattagatgatgtcgtactacttctgcaatttgccgatcaactttggctctattaatcagtatagccaatacgtcagctataatattaaataatatgggtgataagggatcaacttgatgtacccattctggagttgctttgaacagttgcaactgaaagcattggctgaggagcagcaagcagttgtgaaagggctgcagaaggttgaacaagaactagctgcttcagaaagtgatgggcccgtttctgaggttttccgcaaggtataatttaattccctacctttttggatgctatgtgtttagtttagatggctactgctccatccgttttttaatatatgatgcagttgactcttagatacatttgaccattcgttttattcaaaaatttatataattatcatttattttgatgtgatttaatttatcattaaatattttttaagcatgatttaattttttttatattcgcacaaaatttttgaataagatgaatggtcaaacgttcgttaaaaagtcaacggcgtcacacacacacacaaagaaacagaaagaaatttacttgacgttcctttctgtttctttaagtatggaatcttaataaacagatatatttactgatggttttgcaatctagactttgaaggagttcactgatgcttctggagctgatgtaaggtccttgtcagcactatatgctgaagtagtaagccatcgtgatccaacaagctagctttcaaaactgttccatttggattcgaaccccttttaacatactgagcggtgacagggtaaaagtgcggatgcactagcctattattttggagaggatcctgcaaaatgtccttttgaacaaggtaatattcgatctggaaattctggatgattcccaattctccatcaagttgtggtagaacaagttaatttttacagttttgtgaacactgcttgagagcatcattttttccaaacatgtgacattcactagctcaaagacagaatcaataattaaacgtctgacagaaattattagatctaataaatacttgaattttacgaattgtcggatttaggaagttggtgctctttcgttctagaattttcaagaccaggtaaatctcctgttgtgttcacgatcatctaaattaataaaagcttatatgctggaacagagggaaggtctaaagtactgaacaaagctaaggcttagggtgtgttacagtgttagttcacgttaaaattgaaagtttggttgaaattgaaacgatgtgatggaaaaattgaaagtttatgtgtgtagaaaaattttgatacgatggaaaagttgaaagtttgaagaaaaagttaaaaactaaacgagggcttagtaaatggacctgggctcatgggctggtgccatctgcagcacgttaggtcccatacagaaaatggaccactgaatttaccgtacctaatccctgatcggcaaaaagatctaggctgtgtttagttcatggcaaaattaaaagttaggttgaaattaaaacgatgtgacgaaaaagttggaagtttatgtgtgtaggaaagttttgatgtgatggaaaagttggaagtttcaagaaatattttgaaactaaacacggcgctagtataaattaacaagagttcctgttaactgattgattatgtgtgctaaattcattttcttttacctttttaaattaaaaagctatcaatgttcgtatgttctgattaattttctgatcatgtacatatgtaactgtaaatcttatactatatatttatatgtacactgtaggaggttctcctacagtatttttcctctaaaacaaatgttaatggagactttaagtagtaacagcatccttctttcctcttgctcacattaattttgaattcgacaaaaatacagtcacgtctactcttctgaactttgtggggttatttcggaaagcacatgaggagaacataaagcagattgaggctgacaagaagaaagcacagaaggaggctgagaaggaggcaaaccaggaccgtactcctgtaaagtctaaagatggactagtagatagatcaccaagatcacccttcaagtgacatgcatcactaccaattttttattgtccagccgggtcagtttcttctcgacaaatgccacctccattaccattagccattcagaccatcgtggctcaagcaatgcatggctccatgtgcttgagaaacaaggtaacgcatcattatgtacattgcacacttttgttcttactgtattgatgaaattatagtcgtcattaattatcattctaacctataatatatatttttttattttgtataggtactcaacccatgcatgctttctagcttgcaatactgtacagagctaactccgcaactatatatttaggtccgtttgtacatatttcactagacatttcttctattgtacatgtatactagaagaaataggtcagtagttgtaaactaggaaaaggaaagaacgtaagagaggatcagtaggtcagaaaccataggaaattaaggattagtgttacctcgaggcagttacagcaactggtgaatgtatagcaatgttcctgactcgtgctatcaaatgacgcatccaagtgtacaccttttatctagaagcatgtgttgtcaattaattaaaaccaagctagcttacttatatggttatggtgttactgtagctgttaatgtatagaaagaaaaggaacgaatacaaacttcgaattaaatttgaaaatatatcgctcattcaattttatttcaggaatattcgggatgtaaattttttaaaaaaaatatatcgtcgatctcgcacaatcattgagcgaaaatgaggtgacgtcgagggcggtatcgtgcggtgaaaaagcgagaccgcgtgctctcgcggaaagaacgagcgagaccgaacggtatcgctgaaaagagagcgacaccgtaccaatgcttcctttggttagtgactaatgacgtaattaactatttaataataacaattagtgattaattaataattaattaatcactaattaatcattttgaaatccggtatcgctgattggttcagcgagaccgttcgttctcgctctttcatttcgcaagaccgcacggtctcgcgcttttctcgtgcgatactacccgtgacgtcacgccacgtcactttcgcgtaatggttgtgcgaaattgacgttatattttttaagaaattttgaatcctgaatatttctaaaaataaaatgaatgaacagtgtatttccaaattttattctacaaacttccatgcttgcatattgaggagtgtttgctttcggtcagattcagtctagtacatactccctccgtcccaaaaaaaacttaacctaggagagtacatcccctcctaggagaatgaatctgccatcttctcttaggttgaggttttttgggacggaggagtagcttagaaagaattgttacaaaattcttggcaaataggctgctcccaaaactgacagacttggcatccccaaaccaaacagtgcttttatttgaaaaagagctattcatgataatttcatatatgtacaaaatctggttcaacgttgcataaaaccaataagccaaccatactcttcaaattagatatcccaaaagcattcgacttaggcaggggcagatccaacatgggtgcaagggggactcgagtcccccctacacccacaagacccatcgatacccccggagcatccccttcgattttttcaccataaatgataaattaaaggtctctagatgactagaggtgaagaaactgtgtaattgagcccccccacaattttttctttctggatccgcccctggactcaggccctctttatttaggcttaattataagccaacttataagtcgaaaagtctaagtctaaacaaataagcagcttttctgtttggcttttatgaagctataagccactctaacactattaagccaaaagctaggtttgagaagctttttttttttttgcttatgtgaggtagatgtatgacaccatcactaaacttaggacattaaatccactagcttataaatcatataagtcaataaactgatttaaaagtctagaccaataaacctaaccttcaataaagagggcctcagtgagttggacttatttattgacagatctcacaacttttggctttggcccatagatggagaaactggatctcatctctcttgctcacctgatcgtccaaaattactgatgaattgttctacaggacaggaatcttccatgcaagaggttcaagactgctatagggtgatccactttcacctatggttttaatcctcgcaatggaggccttgcgtaagatattacccgcaactgaaacagtgggcctcctgtcccaactcaattgcaactactgcaggtttaggtcttcgctttatgcggatgataacatgtgatcatgaagtatatacatacaaccaagcatgagaaatataaaacattgtcaaacaatgcatcggatgaacgggggatccataaaatattaaagtctaatgagttttgaaatttagttcggcctctagagacaacactgaattcaaacagacctagcacctccatgccatctccgatttgggtgatcttggacttgatggaaagcttatctctctacctttcaaacgcattcggtctcgtatccaaattcattccgagttaacatgaatcgtcaaaacaaggcagtgctgttactgaaacctaacttgggtcttgggccttctaatcactggtggagaaagcctttttactcccggttggtaacccccctatagtcccggttttccaaccgggagtacgaatccgggactaaagatcgctatctttagtcccggttcaaatacccgggactaaagatcggttggtgttacgaaccgggaaaaaaaagaggaatctttagtcccggttgataacaccaaccgggactaaagagagagtagcgtcagttcagatggtgccctttttttccagatttaatctctatattttctcccgaatctagtgccatgtatatccctaaatcaatccccaaatccccaattcaaagtaacatcccaaatcttaagttattataaacataaatcaaatacatcacaaatccttaaaaaagtgcactcaaatcaaatacatcacaaatcctaaaaaatacacacaaatcaaatacatcacagattatgtcacgcccagaagtttcccccttttcttgttttaaaaattggttaaataaattgcccgaagaaattatcttaattaacctagagctaaatccctagttaataaatgcaattaataatcggaaatagcgtggtggaatttttcttgagttccccatgctccaatgcattaacaagatttttagtggaattttcacagccctggaaataattttaaccaattaaaaatcaccaaagtgcaattttttaatcccaggaaaatccttttcctcgttttcttttcttttccttcctttttctctagatgggccgtcggcccatctctctccccgcgctcggcgccacttcctgggccggcccgctcctcctttcccctccacgaagtcctccctccctccctttctctttcgggcgccgacaggtggggcccacctgtcggtcgtcccctacctccggtcgttggagccggagctccaaccgcccgcgccgccgccttctccgctccacgtcacgcctccactccgcgcccgcacctcgcgcccacgtcgccgccctttccccgcatctcccgcacgcgcgcgcccgcaagtggtgggggatttgaaatcccccaacaccctctctctctcctccacctctccacgtcgccggccaaataggggccatccccggccgtttccgcccctccctcgcccataaaaaccctcactcgagctctctctctcatttcccccattcaccgtcctctcccacgccctctaccgccgtcgcgccgcgctcgccgagctccgccgccgccgcccatctccggccgcgtgccgtcaccactagggccgccgccgcgccaagccgccgccgccgctagctccgccgccgtgtgggccatctcggccaccgcctcgcgtcaccggaaccccaccgggaccccatctccctcgcgagccggtgagctattcattcccctccgtctccagccagccactttggttgtcgcggtcgccttctccatccctaactcctctcctccccttctctaggtgtcgccgccgctcgtccgcccctcctctcgtcgggtcgtcgtcgccgccttcgtcttccgctccggccaccgtgtcgtcggtgagtcctccctctccctcctttcctcaccttcccgcgagcgccggccacgccgctgctccggccatgcgccgccgcctttcggccgtcgccgccgcttcccgcaccgccggtcaccgccgtcggtggccgtgcctcgccgtcgcctcgccttggtcggccggtcggccttgaggccgagccgagcccggccgacgccaccctcgcctcccctttgagccaccgcctggtggggcccacctgccaggcgccacctccttcccttttgagccgctgacctgtggggcccacgtgccggcgcccccttcctctcccctttgagaagctgacccatgggccccgcctgtcggcagccgccccccccccttggatgacgtcagccctgggtattattgcgcaataattaattaaggactttttctttattagtaaaaacacagtttatcttctaaaattcataagtaattcatccgagctccgttttaagtccattcaagtctcagtaaatcaagaaaaatgcaaataatccattaaaaatggttttgtttcctgtttcagtagtcttataccatgttttgcttgtgtgctttgtttgtcgcgtaggtttcggccgtttcgtcgatccgcggtttctcgaaggcgttgctgacgtctcgtcaatgtgagagcaaggcaagtcatgctttacatttgatcatattgtacccaatttacaaacaccctgcatttctattaaatgttgcattcttttacaatgtcatgtgggatgggtcctattacttagccatttattgtttaccatatgccattgataacctgtgtatcaaaatgattagatgttggtttaggaaatgcttagccatgcttagctcaactagtacacaaaaagggatcacattattacatagactttgtctattagcatagttttggattggtgccaccgcaatggtgttagttaattaaaatacactgaatggtgggctgtgggtgcatggttttgctggtcgcacccatggcagttaaggaccggttcacgggaaaccctgggagacttaccgtgcttaccgcaagcgggagtgggtaactgcttgatctgaagtatagctcgaccctttcctaggcaccggtagcgagggtgggcgtgatggagttgggtcggccgaggtgttcggttgtccagctgccggattcaccgcggcgcaagaggggaccgcccactgccttttgaggggtgggggtgaaaccttagcgtggtgtggatggttaggggagggttacgtggagggtcttgtcacgatttccccctttgcagtatcatggtgatacttcggggcatggcgacatgtgtggaatcgtgtcttgtgggtacagttgtacacctctggctagagtaaaactattcgaatagccgtgcccgcggttatgggcgatcaaccagattcaccgtgattagtctcacccctagtttagcttaatgaactggtgtagttcaggtggttggttgggcctgttgcaacgtggtgtagcgttggatagtgattggttaatattgattaattactacagctgttttactgctttcaactactgttttgaaatgcctgctttatgcaaaagaacccctagcttcctttggttatattctgcatcatacatcctcttccggtatgacttgatgagtacagtgggtagtactcagtcttgctctcttttcccccacaccagagttgaagttcttctcagttggagccgtctcagagaggttggtttcgtcgctgcagtcaaggtttgcctgtggagtggagtcgcccgctgctgaagtcaagcttcccggtttagctcgcttttatctttcccgctgcatttgtaatcttttatatttttgtaagacgtgggtctgtatgtcaacaattatcgtttgtgtaccctggctggtcctggacaggggtttaatgcacattcagcttagaaattctggttcgagaatttctgggtgtgacagattatacatctcatatccatgcaatgaatcacaaaattatacatctcaatcaatcacaaattatcagaaaaaaaaaagaaaagaggccggccggcagacgagagggcacgaccgctgccgcgcgtgacacctttggccgcccgccatggccgccgccgggcgcggccccgccagctgccgccgcccgccatggccgccgccgccggccaccggatgggaagtgagggggaggagaggtgaggaggaaggcgaggagggggaggagttagatctgtgaagaggaaggggaagggatttgtgaagtgtaggagaggataagggatagggattatatactacatattaaattttagtcccagttggtaaaactaaccgggactaaagatcaatataatttttagtcccggttagtattatcaaccgggactataaagatgatctttagtcccactaaagatcctcggccccctgacagactactgacacgggatgaaccgggagtaaagatgatctttaatcccggttggtgatcataaaatagctgtggtgtttttaaccgggactaaagatcatttttagttccagtttttattgcaaccgggactattaatagactaggcccatctcggaagtgtctccctccacctccacgaattaacactaaaccctagatctattttctctataagtgtctatgtgcaccctctagaacatttgggttttgtttagttgaattttgccaagtgccattcaccttttctctaatcctcgctcgattagtcggcgactatagattcagagctcctaatagttggtgtgttgatttgtcgggtcgattagatctaccacttcaatcagaactatttcttcgtgcttcatcacctattcgtaatttagattgcatcttatcttgttcctgcagtgttctctcatttgcattgctgagatcatcaaccacgtgtcatggttggtatgacatcgtttgtggtgtagcgattgcacgacgttctagacttgttctggttggtagccacattgcaaatgttgtactcgatcaaagcaagaattatcctctgaccagaagatcaggccacgagagagagcttcatcaaactacctccgtccctaagtaagtgttgttatgggttttcgtatcatgtttcactgttcatcttattttaaaaaataatatgattagtatttttattgttattacataatagaacataaatatattattttatgtatgactaaatattagaagaaatttataaattttttaaataaaacggacggttaaacattaggaaaatattttttttctatttcttttgttcgatccccgctcccaatgaaccccatcccttggcaggcagtcaggtcggccggcaggttaggtgcatcgcatcgtcccaagacctgaatagcggtggcggtggagagatatcgctcacatcaatcaccaccacctggccatgctgccggcaggcagtcctcccacgtggcacttgtatcgacgtgtgggccccaacccaacacccaacggagcctctcggaccatatcatcttcctaccggcttcctctcatgtgctccgctccgttcacaccagcagaaaagtctctctgcccacgtgtcaaagcaccggtggatgccaccgtttgcggcgaggccttatatcagaaggcgagcgatacctacacaccgcaggatccaatccacttgcatttcagctcaggaagcctctgctactttgcttggcctgtacagtaatacagataaagacctgcagttctttggtctctttagtgaggactgaggagtttggttggagattgttgaggagatgggcatcgtcgacgttgtctccgagttctgctccgtgccgaggactcgccgacacctcaagaagaggaaacaattccaggtaatactgaacatgttaatccattaatcgcatctccctcttctgtcgatctctgtatatctgtcttccagtcgaatttgtaccatgatagtactagttgacagttgtgttgttggagtggaaaaaacttatgcctatatcctcttcttgtttcagacagtggagatgaaggtgcggatagactgcgaaggctgtgaaaggaagatcaagaaggcccttgaggacatgaaaggtgcttaatcatatttttgctgctgcttcttctttcacacgctctgaaaagcaaaacaagggctcctttagcttttgttctttgttgtggaaatgattgacgaatctgtgcatgtgcgcaggggtgagctcggtggaggtgacggcgaagcagaacaaggtgacggtgacggggtacgtggacgccgggaaggtgatgcggcgcgtggcgtacaagaccgggaagcgggtggagccatggccatacgtgccgtacgacacggtggcgcacccctacgcaccgggcgcctacgacaagaaggcccccgcggggtacgtgcgcaacgtggtgtccgacccctccgccgcaccgctcgcccgcgcctcctccaccgaggtccgctacaccgctgccttcagcgacgagaaccccaacgcctgctccgtcatgtagctagctgtgtgtccccgggacgacgacgaagcagcctagcagggtgtttttgttgccacttgcagctgtaataatattctgtgtgtccagattcgccatccctcaaaaatctttcgtccagattcgccatccctcaaaaatctttcatagtattatagaagggaggaagtagtaatttttccagctgtagtaatgttctttgctttagatagggtgttgtgttactattggactctcttttgcttgtgcttttggtttcagatgtaaaatactccatcatgttcttgtttggtgagatgaatcttcaaatctgcaaagttgcagatcggttgtttgagcttagcatgattgattggggtgggtgggggagacgtgtgaatatcgtactgtatattcgagttttgggtgggctcacaaggtcggcagcgccgaaaggtttttttttttatccgaggcgctgattgcgacgttctgaactgtagcccgatgctggtgtggcattattttggtggttggatggtcagccgataattctaaactttgaatcaaagtttagtttagttatttttcattacatcaatatgtcatatacacatattagttatatcatctttaattttaaccaaaatctaaactttgcgctgaactaaacacagccaaggtgtactatacgccaagtacgcgctatatattgctattaatattttaaatatttaaattttaaacatatattaaatacataggtttttcaattttattaaattaatataagtaaactttgttttaacgaaagttatatgtaaactttattttgaattcataaggacacaacaattttatttatctatagttttaaaaatcaggattagtatctatattgttgtcgaaatgacaataacttctctcaatgaaatgattggatggtaaaagcaatgtattaatgatgaaatttttttggatcccctattacatagccctaaagttttgtgtgagccttcttgggccgcaacacctcctagcccttttgttgaagacgagccccattgggcgaaccccttctgcttcgcgccatggcttcacccaacagagagacttgatgacgaaccttatggcttccattcttcgacttcgccttacagcttcatcctatggcttcacctccaagcgaccccttgtgattttagtcggcgctttgctaatctggtggtttcggcagatttggtcgaaggccctcgtgatatgcctccagcaagcccctcatgggcaagagcgagtagggagctttgggcgagaccgtgcaaatatgtggtatggcatgaggtgccccctttcggccgatgttcctgccaaaacctatgtacacctgcagaagctaacccttgttatttcatgagttctctcaaacgtttccatgttgtttttcgaccttctatccttttcggacgtgagttaggtcacttcttcttttctttaaactcgggttttgggtcgcgtttttcctgttcatgtggccttttactgttcggcccatcctaacaagagttaccattgtgtccatccctgggtgccacgtggtgggctgctattggccggaaggcaaaccgtcgcatgactagggctatatagtccccccgtgggtcgctttcacttttaccccatctatttttacttcccccggctgcgttcttgctctcgctttcaccttttctttttcggccttgtagtcttcgctagctctgactttcatttttcgccattccatcatggctccgcgcaagcctgctccagccgcagcgaccggaccggacccctgcaagattggcgaagactgcaccggcttcctcggcacttcgctgttcaacaaggcggatctggcgaagctcgtcgcgtcaagtacagtggttgaaaagcaagccttcttcgctggcgatgcagtggttcatcgccccgttgatggctggaccgttgtcttcgccgccttctttgatgcaggtcttcgcttcccatgcgacgtcctgctccccaaggtccttcaacttttccaagtggagcttcctcaactgagtccctcagtcctagttcggatcgcgatcttcgactggatttgccaaaccgcggggttcgtgccataaactgatctgttcggcgctatcttcttcgccaccgttcactcaaagatggtggtcactccggttgggacaaagaaaaccgtctttgggagtgtgaacttcaatgttcgcgctgtatgctccgatttgtggccagtgaatgcctccatgccaaagtgggagcggcattggatggagaggtggttctaccacacgaatccctatggagctaagacagacgcgacgaaggcaatccgatagggccggctagtgatctcccctaaccggaagctgaaggtggcgattgatgggacgatcgagtcccgtttcacccttttgcggagaaccgcccatcggttgagctgctgtgatttcgtggaggagttttgcatgttggcagatcaccgtaaatgaggatgaacgggttctcgacttgcctcgccttgttttgccaggaggcgttaatcgtaagtttttgggccaattccctatatgcccatgtaatttcacctaatcccttctacgcccctgaaatttgtttgatctcttatatacccctgagttttttatttggatcccttacatacccactccgttagttgaccattagtttgaccgttagttattgtagaaattattttattgtccttggtatattgttaaaagctagaaatgttttatgtgtaaattatttgagttgtgaaaaccaataaggaataaattactaaatatttgttatgaatttttaaaaataaaacattatttcattaaaataaaaaagatttatcgtaaaaaaaggttctgcataaaatttggg

SEQ ID NO: 5282 - DNA, 58114 bp, Oryza sativa
tgtcttttaatcagctttaccttcaacctcaacatcatttacagcttacatcaactatcccatataaaaaccgcacctcctcctccaccaccaccacctagaggacttctagaaacttcatgtttatctccaatcacatcctccctaagagaacattcaaaaatattacctccccctcctccacctctcccaaaagaatgtttgccaactccatctccacctcaatcccctgattgtccatcttttcctacaaaatatgcaactacatctcctcttccatcaccaccaccaccacttctacataaagtacatgaatgtgttattccttctcataccaggcatgttgtagtacctgcaccaccaccaccacctccctttggagaacatcattctacttttagtaaagatttaacgacatcaccttgttccttttatgaagatcatgcaaaaaaatatactagaattcctctaccaccaccacccccagaaggtagccacggaattttagctacaacttctactgaattgattgatgctggtcctcaattgccaccattatctcatcttgaatggaaacggtgtccacatcatcctccagaaaggccacattatcttccaggagaagttggaggagctccatcgccaccatcaccaccttcttcttagagagaaaatacatcagtaggaattcaaggtggcattccacctctgccaccacctctgccaccaactctgggagattatggagtggctccacctcctcctagcattggtgcaggggctccaccacctcctcctccacctggaggaatcacaggagttcctcctccacctcctattggagggctaggtgggcatcaagctccaccagcacctcctttacctgaaggaatcggaggagttcctcctccacctcctgttggagggctaggagggcctccagctccaccacctccagctggatttcgaggtggaactccacctcccaatgcacatggaggggttgcaccaccacctccaccccctagaggacatggtggggtaggtggcccccctacccctccgggtgcacctgctcctccaatgcctcctggtgtgcctggtggtcctcctccaccccctggtggaaggggtttgcctgctccacctggtggcagaggtgtagtaggacatggacttactcgttccttggggctgaactcagctgccacagcaagaaggtcaactctaaaaccactacattgggttaaagtaacaagagcaatgcaagggagtttatgggcagaaatacaaaagcaagcagatgctaataggtaccctcttgttttttagctttttgattactagaaaatataacttctctacctctttcaccatagttacaacaaaaaatactgtagtgtaaacccgctgctatttcaatttatttctcgtatcatttttttaataaaattttactaactggtagtatcatgtatgtagccattctgaatttgatgtgaaagaattggagtctctttttgctattgctccaaagacaaaaggtggttcaaaatcagatggagctagcaaatctcttggatcaaaacctgacaaagttcatctggtaacttactctaacacattactatgctaaacagaaaatattcccagtacttttgtttaatctactgctatgataatgaattacttgattccatgcaagtgtaatgcgcacaaaattaataattactttcattttagaagacaagttttctatatagttgcggaaaaacctcattatcatattcacttttgaaaatgtgttgatggctttttgtaccgagattgtatctttagttcatatatttatatttcacggtattcattagcttctctctgacaataaaatctgcccttcattaattactggtatcacttgtgttttctaagagttaccttggtgtctttgaaatctacagattgatttaagacgagccaataacacagagatcatgttaactaagatcaaaatgccactacctgatatgatggtaagcaccctgctatttcttttttgcctttattgatgcacaatagttggacaaaagggcaaggtcattaaatgtctttgttccttgctaatactccttcagtaccatattagttttagctctaacctgaatcaaacttctctaacgacgaccgagtttataggaaaatgcaccagcatctaaaataacaaataaatgcactattaagagctatttcatggtggaattaatggaactaatttgatgttgtagatgttgatgtacttttatataaactatatcgaagttcaagaagtttgactttggacaaaactacataacttactatattggaacgaagggactaatatgactactatagtgattgaatatctatcgtgcgctatattatttccttggcgtagaactgatacaacatccaatatagctcgcttttaaccagttttgcatatgtgggctattattttgttgtttgggaattgcacacatagacctttgcattgtgacaacatccaacatagcttgtttttaaccagatttgcttacaatctgaagattaggtagctgaccaaaataaatcatcaacagagtttatgaaagttttgtttttggtgattgggttcttccactggaaagtagggtgtcagcctgcatttaagtgataaattaagtgggattccctactaacaaatattgagaattttttgggtttccttttgccaagtaggatgtagaagacattttatcgacacaatcaaaatttcatgtgaagctagcttcacatactttagatctagcttcacatactttaccacttgcgagagtgctcggtccagctcaccaaccgtgggtctcataagttacattgggcctacttcaccacaggtccaactaaagccacaacttcagatcctaggtctaaacaaaccaaaaggtggtttgatgggtgagtataacctccacatgttaagccatgatcccccatcatcaattatcaatgtaggactaaacccaacaattgcatcggatatgtaggcttcagctaaactacattactaaatatcatgtgttcctgtgttatctctggaatgtcaaagttgatcaatggttgcagcaatcaggaaggttagtcatcgtttcactatatcgattaacttctgcaacactaccaatcagtgaaggccaaacactcgaactagtttgagatagtttctttaaaaacagggtagcaactccaaatccacaagtatagtcgcaatgatttatgttgaatattttcaagtcaatctgcatgcacttcaaggatttggatttggtttcgaaatttttatgaaaatagatctacaatggagacacgaatttttacgtggaaaacccttacaggaaaataccacgggtgccgaccgacaatgatcataattgagaagttgattcaaacataaaggaataacaatgggatcgtcgccacttcctatacggcttacaagagtatatataagggataaacggaaagacacacaatagggaaagacgtgatgacctactaggaaactagtctgaatattttgtcggcctaagatttggatcacatatttaacatgttttccatctggttcagctaatgcttataggaatgtttcaatcacattccatcttgatattaattaatacaccatatttagtccattttcctggagctgaattgtataccctgaaaccatttgcattttagaccaaggatcacctccgtttgatgaaactcagttcatgacatttagtagctacttcattcttaagaattattcagatttttagtggacatttactcaaaagttactcccattttttaaatggctaccggtaaggcttaaggtgcttcatccattctatatctactttctctacttgtaacagagtgctgctctagctttggatgattcagttctagacgctgatcaactggaaaatctcataaaattttgcccaacaaaagaggagatggaacttctaaaggttgttttaaaattaaagcttatatttccttgcactccttctgtaatctttaatttttctcttctctgaatatcttgcaaaagtaaagtatttgcactttttcctatcagaactacactggagacaaggaaactcttggaaagtgtgagcaggtaaaccttcatgcatgtttggactcttcttttgttatatattgatttgttttcacttatatttgatcagaactattgaggttataactgacaaattatattttgtacattcctattcatctcctccgtctgcagttttttctagagcttatgaaggtgccgagggttgaatctaagtttaggatatttgctttcaagattcaatttcaatcacaggtcatacactgttgaaattttgagttattatctccgtatttgaaatgtccatagattttcactatcccccttttcatttccctcttagattagggatgttagaaagaatttgctgactgtgtcatccgcttgtgaggaggtaaatatgttttaatacacctcctttggattaataagtattaatgtttatcacgtgagagctcatttcaatatgtcaatcagctcagaggctctgagaagttaaaggtgatcatggagaaaattctgtttctaggaaataaattaaatcagggaacaccaagaggtaatttactgcgtctattgacgagctataaaatctttcaaataaactttcatgcaaatatgtttagcttaaaatcattttgcagttgaaatttcctggataatttctaagctccctcttcattaggactaggagggagaaatgccctgtgacaacttcactgtatatataattacatttatcctttccactattatcaacaaaaataagttgtttctctaggtgcaacaatgtaaaacaattcaggctatagattgaagttgtttgaatgtcaatttaagtactgtatgttcaagatctgtgggtcactaattttagcttccctatacctcgtattcattgaggaagaaaaaatatttaatttttccttatcttgttgcaggccaggctcttggttttcgcttggacagcctattaaaacttacagacactcgtgcaaacaacagtagaatgacactaatgcactttctttgtaaggtatggagatatatagctgtcgtacactagttgttcatataaaatcaagcatgagtatgaaagataatgttgatcccaaaataataaatttgtctatactaattatgtggggcccaaatatcagtggtggtggccaccaccatcaccacaaggaatattcaaaggagtaaagatatattatgctcgtaggactagaaaagaatgtaattgtgatattttgcttttcaccacatttcaccaaaagagtgtcttgtaattacatacaaggcactcttcatgattaatatacctcaatagtgctatgtacattaactcaatagtgctatgtatattaactctaaaacatgtagttctttgataacttcatcactaaatcagtagttttgtgatacaatgctataaatctgtagttctatgaaaaatttggcactaaatctgtaatttcgtcatatacatttttgaatctgtagttttgcgatagtttagttaaaggcagccttagttaaaatatcgctagttttgtgatatttactcaatttgaaaggccaactaactagctaatttctttgtcatgtttaacttgtcatcatactgcttattttgctcctctcataaaattctaagtttgcttctataataagctttaattcttattaactcgatggttggtttaagtgtttatcagggccttgcggacaaatcaccacatttactggatttttatgaggaatttgtcaacctagaagctgcttctaaggtgtgtatgtcgatctgacgagagcatccaaaggacttgtgttgataaaaaaaattatacattgtttagaaaatggaagtttgtattgaacccaatcaattacatcacggtgcctctgcataactaagatacacacgaccacactcaacaaacaaaaaatggagaatatcatggatttgtaaggaccatcaatcgaaagaataaatcgtcacccatgaacaactccttaaatatatcctctaaatgcacaaagtattaagagccaccaatcctaatactagatctccacccatatacctgggtaaagaactccttgaccaccttctccaaatgtagacatgccgcaaccaccatatcccgcggatcaggcttctgtaggatagcccatgtacgaagccaatggataagacaatatataacctgtaatagtgaagttatgattttttttaatcaaaatatacattattcctgcatagccaaagcaaccaacaagtagcaaatgctcttaacaggacatgtgcttttaaattattatgaattccagcaaggcagctcccaaacatatgggctacactatgcagtggaggaagtccaaatgctacttggaccaaacagaatgggcaaaatcaaaaaaaaaaagatgtctaattgtctcatcattgtgacaaaaacaaccgttcttattgctttgccagtttccttttgtcaaattatccatcgttaacaccactccacaatgaaaataccaaagaaaaatcataacttttaagggtatctttagtttccaaagatgtttattaatattaagaacattgatgtgaattagagctaggtaatgagactgcaccgagaactccccatttgaggttaagttctaacgaaactcgtcttgctcctgagttaattgaaaatcagtgatacatgataataaatacaagtttaaggaccacccgtgcattttactcataataaattattccaagccacctattttgatcctataaggtcccttctccatgaaagggaatgattggtttctaagacttgtgcaacagtagccggcttatgcttaactatattttgaaggcaaggatactgttcttttaaggttgaattgcccaaccatttgtctctcataacctgatttgggagctatataaaggatccaaaccagagaaaatcccatttctccttcatgggggtggaccaaaagtataagtccctggccttccactaagcttgagaaagaggtttatcacctacatacttattacatatcaactgttgtcaaaccccttccgtggagagcaacttgaataagcacttactaagtagagccacattcttaatgtccaaaacatgaattcccaaccccccccccccttgttccttggggaggcactttttttctctgaccaccacatttccagtaaacctggagcgaaaatacttaagctttgtaagtatcccctttggtatggcaaagaaagacatcatatatctcgggaggctacttagcactgaattaatcaatgttagccatcctccggtggacaggagttttcctttccaactactttgatgtttttcaaagcattttatcacatctttacaatcggcatttcttaatctcctatagtgaatagggatacctagataccggaatagaaatttaccagtggaacaaccaaagagctccatgtattcattgttaaactcgttcgcttcaccaaagcaatataattagtttttatggaaatttatcttaagactgttaattgctcaaggcaaattttgctacatgacactgcttatgtgtggttttagctctaggacactgcccaaactcacttttgagggaaaacactccataaacatggtaatttgctagtggataccacgccgattaaaataataatttccggttgaagaggagagagaaaacgcgtgaaatgtcaaaaatgcccttaggcccacatgtcagctctatctcctatctctcttctcctcttccagcccacatgtcgctccccgccggccgccggccatgcccgcgcagatggcggtggaggcagtcgttgaactcgtcaccatcgacgtgacatcgagcggctcatcgagatgttcatctggaataactcgttggagaagggcgcccgccgatcggccgcggtggttgtctccatgctcaccgaggggaagttgaatgctctctgcgtcaccggcacccccggcgccatcgagtcagtcgcgtcgctgcattacgcttacctcgacgagctcaacctacttggcctccatgcccatccaccactctctgctaccgagcttgccgctagcaaaatcagtcgttccaccgccgggtatatttcgccggcgtcgtgtgcagtcgcctcccccaatctgcccttgcctctgaccatcacacgcgtgtttgtggggggaggggggattgcggcatcgtgattcggcgattgggatgagagaagggcggcagcggcggctgcggcggtggccatgagtggctcagcgtcgacggggatggggtgcgggagctacggctggcttgcgtcggccggcggtgggaggaagggcgggggtagggggtgggggtggcgaggcggcggggagaaggagcggctgcagctgctccaccgcgcgctacggctgatgggctgccggagggccagggtgcttctgctgctcgccactgcctcccaagcagtgtctacgcgggcatggccggcagccagcgaggagcgacatgtgggcaggaagagaagagagataggagatagagctgacagtgtgcccaagggcatttgcgacatttcacgcaatgtctctctcctcttcaaccagaaattattgttttaatcggcgcggtgtctactggcaaattaccatgtttaaggagtgttttcctctaaaagtgagtttggtagtgtactagggctaaaaccacacataagcagtgtcctgtagcaaaattttcctttgctcaatgacataaagcaataacgtcaggttacgagctttttctaatttatgatccataaaaaaaactatatcattggtatattgcaagatagagagaccatcattcattagatgatgtcgtactacttctgcaatttgccgatcaactttggctctattaatcagtatagccaatacgtcagctataatattaaataatatgggtgataagggatcaacttgatgtacccattctggagttgctttgaacagttgcaactgaaagcattggctgaggagcagcaagcagttgtgaaagggctgcagaaggttgaacaagaactagctgcttcagaaagtgatgggcccgtttctgaggttttccgcaaggtataatttaattccctacctttttggatgctatgtgtttagtttagatggctactgctccatccgttttttaatatatgatgcagttgactcttagatacatttgaccattcgttttattcaaaaatttatataattatcatttattttgatgtgatttaatttatcattaaatattttttaagcatgatttaattttttttatattcgcacaaaatttttgaataagatgaatggtcaaacgttcgttaaaaagtcaacggcgtcacacacacacacaaagaaacagaaagaaatttacttgacgttcctttctgtttctttaagtatggaatcttaataaacagatatatttactgatggttttgcaatctagactttgaaggagttcactgatgcttctggagctgatgtaaggtccttgtcagcactatatgctgaagtagtaagccatcgtgatccaacaagctagctttcaaaactgttccatttggattcgaaccccttttaacatactgagcggtgacagggtaaaagtgcggatgcactagcctattattttggagaggatcctgcaaaatgtccttttgaacaaggtaatattcgatctggaaattctggatgattcccaattctccatcaagttgtggtagaacaagttaatttttacagttttgtgaacactgcttgagagcatcattttttccaaacatgtgacattcactagctcaaagacagaatcaataattaaacgtctgacagaaattattagatctaataaatacttgaattttacgaattgtcggatttaggaagttggtgctctttcgttctagaattttcaagaccaggtaaatctcctgttgtgttcacgatcatctaaattaataaaagcttatatgctggaacagagggaaggtctaaagtactgaacaaagctaaggcttagggtgtgttacagtgttagttcacgttaaaattgaaagtttggttgaaattgaaacgatgtgatggaaaaattgaaagtttatgtgtgtagaaaaattttgatacgatggaaaagttgaaagtttgaagaaaaagttaaaaactaaacgagggcttagtaaatggacctgggctcatgggctggtgccatctgcagcacgttaggtcccatacagaaaatggaccactgaatttaccgtacctaatccctgatcggcaaaaagatctaggctgtgtttagttcatggcaaaattaaaagttaggttgaaattaaaacgatgtgacgaaaaagttggaagtttatgtgtgtaggaaagttttgatgtgatggaaaagttggaagtttcaagaaatattttgaaactaaacacggcgctagtataaattaacaagagttcctgttaactgattgattatgtgtgctaaattcattttcttttacctttttaaattaaaaagctatcaatgttcgtatgttctgattaattttctgatcatgtacatatgtaactgtaaatcttatactatatatttatatgtacactgtaggaggttctcctacagtatttttcctctaaaacaaatgttaatggagactttaagtagtaacagcatccttctttcctcttgctcacattaattttgaattcgacaaaaatacagtcacgtctactcttctgaactttgtggggttatttcggaaagcacatgaggagaacataaagcagattgaggctgacaagaagaaagcacagaaggaggctgagaaggaggcaaaccaggaccgtactcctgtaaagtctaaagatggactagtagatagatcaccaagatcacccttcaagtgacatgcatcactaccaattttttattgtccagccgggtcagtttcttctcgacaaatgccacctccattaccattagccattcagaccatcgtggctcaagcaatgcatggctccatgtgcttgagaaacaaggtaacgcatcattatgtacattgcacacttttgttcttactgtattgatgaaattatagtcgtcattaattatcattctaacctataatatatatttttttattttgtataggtactcaacccatgcatgctttctagcttgcaatactgtacagagctaactccgcaactatatatttaggtccgtttgtacatatttcactagacatttcttctattgtacatgtatactagaagaaataggtcagtagttgtaaactaggaaaaggaaagaacgtaagagaggatcagtaggtcagaaaccataggaaattaaggattagtgttacctcgaggcagttacagcaactggtgaatgtatagcaatgttcctgactcgtgctatcaaatgacgcatccaagtgtacaccttttatctagaagcatgtgttgtcaattaattaaaaccaagctagcttacttatatggttatggtgttactgtagctgttaatgtatagaaagaaaaggaacgaatacaaacttcgaattaaatttgaaaatatatcgctcattcaattttatttcaggaatattcgggatgtaaattttttaaaaaaaatatatcgtcgatctcgcacaatcattgagcgaaaatgaggtgacgtcgagggcggtatcgtgcggtgaaaaagcgagaccgcgtgctctcgcggaaagaacgagcgagaccgaacggtatcgctgaaaagagagcgacaccgtaccaatgcttcctttggttagtgactaatgacgtaattaactatttaataataacaattagtgattaattaataattaattaatcactaattaatcattttgaaatccggtatcgctgattggttcagcgagaccgttcgttctcgctctttcatttcgcaagaccgcacggtctcgcgcttttctcgtgcgatactacccgtgacgtcacgccacgtcactttcgcgtaatggttgtgcgaaattgacgttatattttttaagaaattttgaatcctgaatatttctaaaaataaaatgaatgaacagtgtatttccaaattttattctacaaacttccatgcttgcatattgaggagtgtttgctttcggtcagattcagtctagtacatactccctccgtcccaaaaaaaacttaacctaggagagtacatcccctcctaggagaatgaatctgccatcttctcttaggttgaggttttttgggacggaggagtagcttagaaagaattgttacaaaattcttggcaaataggctgctcccaaaactgacagacttggcatccccaaaccaaacagtgcttttatttgaaaaagagctattcatgataatttcatatatgtacaaaatctggttcaacgttgcataaaaccaataagccaaccatactcttcaaattagatatcccaaaagcattcgacttaggcaggggcagatccaacatgggtgcaagggggactcgagtcccccctacacccacaagacccatcgatacccccggagcatccccttcgattttttcaccataaatgataaattaaaggtctctagatgactagaggtgaagaaactgtgtaattgagcccccccacaattttttctttctggatccgcccctggactcaggccctctttatttaggcttaattataagccaacttataagtcgaaaagtctaagtctaaacaaataagcagcttttctgtttggcttttatgaagctataagccactctaacactattaagccaaaagctaggtttgagaagctttttttttttttgcttatgtgaggtagatgtatgacaccatcactaaacttaggacattaaatccactagcttataaatcatataagtcaataaactgatttaaaagtctagaccaataaacctaaccttcaataaagagggcctcagtgagttggacttatttattgacagatctcacaacttttggctttggcccatagatggagaaactggatctcatctctcttgctcacctgatcgtccaaaattactgatgaatggttctacaggacaggaatcttccatgcaagaggttcaagactgctatagggtgatccactttcacctatggttttaatcctcgcaatggaggccttgcgtaagatattacccgcaactgaaacagtgggcctcctgtcccaactcaattgcaactactgcaggtttaggtcttcgctttatgcggatgataacatgtgatcatgaagtatatacatacaaccaagcatgagaaatataaaacattgtcaaacaatgcatcggatgaacgggggatccataaaatattaaagtctaatgagttttgaaatttagttcggcctctagagacaacactgaattcaaacagacctagcacctccatgccatctccgatttgggtgatcttggacttgatggaaagcttatctctctacctttcaaacgcattcggtctcgtatccaaattcattccgagttaacatgaatcgtcaaaacaaggcagtgctgttactgaaacctaacttgggtcttgggccttctaatcactggtggagaaagcctttttactcccggttggtaacccccctatagtcccggttttccaaccgggagtacgaatccgggactaaagatcgctatctttagtcccggttcaaatacccgggactaaagatcggttggtgttacgaaccgggaaaaaaaagaggaatctttagtcccggttgataacaccaaccgggactaaagagagagtagcgtcagttcagatggtgccctttttttccagatttaatctctatattttctcccgaatctagtgccatgtatatccctaaatcaatccccaaatccccaattcaaagtaacatcccaaatcttaagttattataaacataaatcaaatacatcacaaatccttaaaaaagtgcactcaaatcaaatacatcacaaatcctaaaaaatacacacaaatcaaatacatcacagattatgtcacgcccagaagtttcccccttttcttgttttaaaaattggttaaataaattgcccgaagaaattatcttaattaacctagagctaaatccctagttaataaatgcaattaataatcggaaatagcgtggtggaatttttcttgagttccccatgctccaatgcattaacaagatttttagtggaattttcacagccctggaaataattttaaccaattaaaaatcaccaaagtgcaattttttaatcccaggaaaatccttttcctcgttttcttttcttttccttcctttttctctagatgggccgtcggcccatctctctccccgcgctcggcgccacttcctgggccggcccgctcctcctttcccctccccgaagtcctccctccctccctttctctttctggcgccgacaggtggggcccacctgtcggtcgtcccctacctcccgtcgctggagccggagctccaaccggccgcgccgccgccttctccgcttcacgtggagcctacactccgagcccgcacctcgcgcccacgtcgtcgccctcttcccgcatctaccgcgcgcgcgcgcccgcaagtggtgggggatttgaaatcccccaacaccctctctctctcctccacctctccacgtcgccggccaaataggggccatccccggccgtttccgcccctccctcgcccataaaaaccctcactcgagctctctctctcatttcccccattcaccgtcctctcccacgccctctaccgccgtcgcgccgcgctcgccgagctccgccgccgccgcccatctccggccgcgtgccgtcgccactagggccgccgccgcgccaagccgccgccgccgctagctccgccgccgtgtgggccatctcggccaccgcctcgcgtcaccggaaccccaccgggaccccatctccctcgcgagccggtgagctatccattcccctccgtctccagccagccactttggttgtcgcggtcgccttctccatccctaactcctctcctccccttctctaggtgtcgccgccgctcgtccgcccctcctctcgtcgggtcgtcgtcgccgccttcgtcttccgctccggccaccgtgtcgtcggtgagtcctccctccccctcctttcctcaccttcccgcgagcgccggccacgccgctgctccggccatgcgccgccgcctttcggccgtcgccgccgcttcccgcaccgccggtcaccgccgtcggtggccgtgcctcgccgtcgcctcgccttggtcggccggtcggccttgaggccgagccgagcccggccgacgccaccctcgcctcccctttgagccaccgcctggtggggcccacctgccaggcgccacctccttcccttttgagccgctgacctgtggggcccacgtgccggcgcccccttcctctcccctttgagaagctgacccatgggccccgcctgtcggcagccgccccccccccttggatgacgtcagccctgggtattattgcgcaataattaattaaggactttttctttattagtaaaaacacagtttatcttctaaaattcataagtaattcatccgagctccgttttaagtccattcaagtctcagtaaatcaagaaaaatgcaaataatccattaaaaatggttttgtttcctgtttcagtagtcttataccatgttttgcttgtgtgctttgtttgtcgcgtaggtttcggccgtttcgtcgatccgcggtttctcgaaggcgttgctgacgtctcgtcaatgtgagagcaaggcaagtcatgctttacatttgatcatattgtacccaatttacaaacaccctgcatttctattaaatgttgcattcttttacaatgtcatgtgggatgggtcctattacttagccatttattgtttaccatatgccattgataacctgggtatcaaaatgattagatgttggtttaggaaatgcttagccatgcttagctcaactagtacacaaaaagggatcacattattacatagactttgtctattagcatagttttggattggtgccaccgcaatggtgttagttaattaaaatacactgaatggtgggctgtgggtgcatggttttgctggtcgcacccatggcagttaaggaccggttcacgggaaaccctgggagacttaccgtgcttaccgcaagcgggagtgggtaactgcttgatctgaagtatagctcgaccctttcctaggcaccggtagcgagggtgggcgtgatggagttgggtcggccgaggtgttcggttgtccagctgccggattcaccgcggcgcaagaggggaccgcccactgccttttgaggggtgggggtgaaaccttagcgtggtgtggatggttaggggagggttacgtggagggtcttgtcacgatttccccctttgcagtatcatggtgatacttcggggcatggcgacatgtgtggaatcgtgtcttgtgggtacagttgtacacctctggctagagtaaaactattcgaatagccgtgcccgcggttatgggcgatcaaccagattcaccgtgattagtctcacccctagtttagcttaatgaactggtgtagttcaggtggttggttgggcctgttgcaacgtggtgtagcgttggatagtgattggttaatattgattaattactacagctgttttactgctttcaactactgttttgaaatgcctgctttatgcaaaagaacccctagcttcctttggttatattctgcatcatacatcctcttccggtatgacttgatgagtacagtgggtagtactcagtcttgctctcttttcccccacaccagagttgaagttcttctcagttggagccgtctcagagaggttggtttcgtcgctgcagtcaaggtttgcctgtggagtggagtcgcccgctgctgaagtcaagcttcccggtttagctcgcttttatctttcccgctgcatttgtaatcttttatatttttgtaagacgtgggtctgtatgtcaacaattatcgtttgtgtaccctggctggtcctggacaggggtttaatgcacattcagcttagaaattctggttcgagaatttctgggtgtgacagattatacatctcatatccatgcaatgaatcacaaaattatacatctcaatcaatcacaaattatcagaaaaaaaaaagaaaagaggccggccggcagacgagagggcacgaccgctgccgcgcgtgacacctttggccgcccgccatggccgccgccgggcgcggccccgccagctgccgccgcccgccatggccgccgccgccggccaccggatgggaagtgagggggaggagaggtgaggaggaaggcgaggagggggaggagttagatctgtgaagaggaaggggaagggatttgtgaagtgtaggagaggataagggatagggattatatactacatattaaattttagtcccagttggtaaaactaaccgggactaaagatcaatataatttttagtcccggttagtattatcaaccgggactataaagatgatctttagtcccactaaagatcctcggccccctgacagactactgacacgggatgaaccgggagtaaagatgatctttaatcccggttggtgatcataaaatagctgtggtgtttttaaccgggactaaagatcatttttagttccagtttttattgcaaccgggactattaatagactaggcccatctcggaagtgtctccctccacctccacgaattaacactaaaccctagatctattttctctataagtgtctatgtgcaccctctagaacatttgggttttgtttagttgaattttgccaagtgccattcaccttttctctaatcctcgctcgattagtcggcgactatagattcagagctcccaatagttggtgtgttgatttgtcgggtcgattagatctaccacttcaatcagaactatttcttcgtgcttcatcacctattcgtaatttagattgcatcttatcttgttcctgcagtgttctctcatttgcattgctgagatcatcaaccacgtgtcatggttggtatgacatcgtttgtggtgtagcgattgcacgacgttctagacttgttctggttggtagccacattgcaaatgttgtactcgatcaaagcaagaattatcctctgaccagaagatcaggccacgagagagagcttcatcaaactacctccgtccctaagtaagtgttgttatgggttttcgtatcatgtttcactgttcatcttattttaaaaaataatatgattagtatttttattgttattacataatagaacataaatatattattttatgtatgactaaatattagaagaaatttataaattttttaaataaaacggacggttaaacattaggaaaatattttttttctatttcttttgttcgatccccgctcccaatgaaccccatcccttggcaggcagtcaggtcggccggcaggttaggtgcatcgcatcgtcccaagacctgaatagcggtggcggtggagagatatcgctcacatcaatcaccaccacctggccatgctgccggcaggcagtcctcccacgtggcacttgtatcgacgtgtgggccccaacccaacacccaacggagcctctcggaccatatcatcttcctaccggcttcctctcatgtgctccgctccgttcacaccagcagaaaagtctctctgcccacgtgtcaaagcaccggtggatgccaccgtttgcggcgaggccttatatcagaaggcgagcgatacctacacaccgcaggatccaatccacttgcatttcagctcaggaagcctctgctactttgcttggcctgtacagtaatacagataaagacctgcagttctttggtctctttagtgaggactgaggagtttggttggagattgttgaggagatgggcatcgtcgacgttgtctccgagttctgctccgtgccgaggactcgccgacacctcaagaagaggaaacaattccaggtaatactgaacatgttaatccattaatcgcatctccctcttctgtcgatctctgtatatctgtcttccagtcgaatttgtaccatgatagtactagttgacagttgtgttgttggagtggaaaaaacttatgcctatatcctcttcttgtttcagacagtggagatgaaggtgcggatagactgcgaaggctgtgaaaggaagatcaagaaggcccttgaggacatgaaaggtgcttaatcatatttttgctgctgcttcttctttcacacgctctgaaaagcaaaacaagggctcctttagcttttgttctttgttgtggaaatgattgacgaatctgtgcatgtgcgcaggggtgagctcggtggaggtgacggcgaagcagaacaaggtgacggtgacggggtacgtggacgccgggaaggtgatgcggcgcgtggcgtacaagaccgggaagcgggtggagccatggccatacgtgccgtacgacacggtggcgcacccctacgcaccgggcgcctacgacaagaaggcccccgcggggtacgtgcgcaacgtggtgtccgacccctccgccgcaccgctcgcccgcgcctcctccaccgaggtccgctacaccgctgccttcagcgacgagaaccccaacgcctgctccgtcatgtagctagctgtgtgtccccgggacgacgacgaagcagcctagcagggtgtttttgttgccccttgcagctgtaataatattctgtgtgtccagattcgccatccctcaaaaatctttcatagtattatagaagggaggaagtagtaatttttccagctgtagtaatgttctttgctttagatagggtgttgtgttactattggactctcttttgcttgtgcttttggtttctgatgtaaaatactccatcatgttcttgtttggtgagatgaatcttcaaatctgcaaagttgcagatcggttgtttgagcttagcatgattgattggggtgggtgggggagacgtgtgaatatcgtactgtatattcgagttttgggtgggctcacaaggtcggcagcgccgaaaggtttttttttttatccgaggcgctgattgcgacgttctgaactgtagcccgatgctggtgtggcattattttggtggttggatggtcagccgataattctaaactttgaatcaaagtttagtttagttatttttcattacatcaatatgtcatatacacatattagttatatcatctttaattttaaccaaaatctaaactttgcgctgaactaaacacagccaaggtgtactatacgccaagtacgcgctatatattgctattaatattttaaatatttaaattttaaacatatattaaatacataggtttttcaattttattaaattaatataagtaaactttgttttaacgaaagttatatgtaaactttattttgaattcataaggacacaacaattttatttatctatagttttaaaaatcaggattagtatctatattgttgtcgaaatgacaataacttcacgtcgaaggacgtggttctctcaatgaaatgattggatggtaaaagcaatgtattaatgatgaaatttttttggatcccctattacatagccctaaagttttgtgtgagccttcttgggccgcaacacctcctagcccttttgttgaagacgagccccattgggcgaaccccttctgcttcgcgccatggcttcacccaacagagagacttgatgacgaaccttatggcttccattcttcgacttcgccttacagcttcatcctatggcttcacctccaagcgaccccttgtgattttagtcggcgctttgctaatctggtggtttcggcagatttggtcgaaggccctcgtgatatgcctccagcaagcccctcatgggcaagagcgagtagggagctttgggcgagaccgtgcaaatatgtggtatggcatgaggtgccccctttcggccgatgttcctgccaaaacctatgtacacctgcagaagctaacccttgttatttcatgagttctctcaaacgtttccatgttgtttttcgaccttctatccttttcggacgtgagttaggtcacttcttcttttctttaaactcgggttttgggtcgcgtttttcctgttcatgtggccttttactgttcggcccatcctaacaggagttaccattgtgtccatccctgggtgccacgtggtgggctgctattggccggaaggcgaaccgtcgcatgactagggctatatagtccccccgtgggtcgctttcacttttaccccatctatttttacttcccccggctgcgttcttgctctcgctttcaccttttctttttcggccttgtagtcttcgctagctctgactttcatttttcgccattccatcatggctccgcgcaagcctgctccagccgcagcgaccggaccggacccctgcaagattggcgaagactgcaccggcttcctcggcacttcgctgttcaacaaggcggatctggcgaagctcgtcgcgtcaagtacagtggttgaaaagcaagccttcttcgctggcgatgcagtggttcatcgccccgttgatggctggaccgttgtcttcgccgccttctttgatgcaggtcttcgcttcccatgcgacgtcctgctccccaaggtccttcaacttttccaagtggagcttcctcaactgagtccctcagtcctagttcggatcgcgatcttcgactggatttgccaaaccgcggggttcgtgccataaactgatcggttcggcgctatcttcttcgccaccgttcactcaaagatggtggtcactccggttgggacaaagaaaaccgtctttgggagtgtgaacttcaatgttcgcgctgtatgctccgatttgtggccagtgaatgcctccatgccaaagtgggagcggcattggatggagaggtggttctaccacacgaatccctatggagctaagacagacgcgacgaaggcaatccgatagggccggctagtgatctcccctaaccggaagctgaaggtggcgattgatgggacgatcgagtcccgtttcacccttttgcggagaaccgcccatcggttgagctgctgtgatttcgtggaggagttttgcatgttggcagatcaccgtaaatgaggatgaacgggttctcgacttgcctcgccttgttttgccaggaggcgttaatcgtaagtttttgggccaattccctatatgcccatgtaatttcacctaatcccttctacgcccctgaaatttgtttgatctcttatatacccctgagttttttatttggatcccttacatacccactccgttagttgaccattagtttgaccgttagttattgtagaaattattttattgtccttggtatattgttaaaagctagaaatgttttatgtgtaaattatttgagttgtgaaaaccaataaggaataaattactaaatatttgttatgaatttttaaaaataaaacattatttcattaaaataaaaaagatttatcgtaaaaaaaggttctgcataaaatttgaaaattacttttctacaaatatttagtgaaaaaagattcgttgtgaaaaaacaaaggggatgtaattagtttatcacaaattagaaaacaaatttaaaatttttaaataaatttcagatcaaatttgacaaatttcgtatatcttcccaaaaatttaaacctaaataacatttagtttttgctcttaattttctagcgaaactaatgtatggatttaatcataatttttaaaaaataaaaaataataacttttattttttaagttgggcattaaatgattatattgcttttattttgtataagttaatttttttcatatgaaaatttattgggtaggtaccacatatgtataggatggataatatagtcattttaaaatatttagcggtcaactaatggtcaactaatggagatgggtatagaggagatcaaaatgaaaactcaggggtatataagggatgatgtcaaattcaggggtattgaagggattgagtaaattttcaggggtatttagggaattttctataagtttttctaatttgctaactctttatttatctcatacccttttgttctttctttttttttttgcctctcttgtttttttgcctttttgcgcagttctcaccctaacccaggccgaaaatgaggcccgaactctgatcggggacctcaccattcatgagtatagctgtcacgccctaaaaatcctaaatatataaattgttgtttaattggaattattagaatttattttaaaagcctacaagttaaactctaataatctaggaaaattttcaacataaaaatgagctagataaaattttattaaatactttgcttgttcctctattttctagatttttctgggaattatttgagcaagggaagtatttttaataattgaaacaacatttcacaaattattttaattaaaaagttcaaaaacccctccctaagccgttgggccgaattcggcccaacattcctctctcttccgcacgccggagccggcccaaggccgcccgagtcggctcaagccgagccgcccgcccctcctctcatgggacaccgacatgtggggcccacatgtcgggcccttctcctacctccggccggccggccttgctagctcgagccgccccttttcccctccaaatccgcacccaatccggccctttttcttccgattgtttgaggagtttttatcctctcatcctcctctatctttacccccaaaaatcggagcaaatcgttgagtatcttgcccgaatcgaactcgtttccgagtttatctccaaaaccgagtttttgatttcccgagtcgattttcttgcgggaggagtccgatctcttcaatccaaggctataaataggaccccctagtccttctttttcgtttgccccctctcccgtcctctcccgtgacccgtagagccgtcgccgcgtgaaaccatccgccgccgccgctggccgaactccggttgcgccgccacgccgcctccgtcgtcgccgtcgcttgccgtcgccgccgttggtttcgccaagaggtggagaagctcggccgccacctctccttcgccgccggccgccgtagcccgtccccaccggccaacccgagccgccgccgtcgcctcctcgtcgccggccgtcgtcggtcgtcgtttggcacgagggtgagtatcgttgggttcgtctcgtcgtcctctacgtgtacatgtcctccaaaatcccggccaatcaccctagctccggcgaggtcgccatccgagccggccgccattgatgacgtcatcatgacatcatcatcttccccttttccagtttttttctaatagattaaatcttcggaaaatcataactaaataaccgtagatccgtttcaggtggttcaagttgctaaatttttctaaaatcaagatctacatgttaaaaatatccacatgtactgtttatgcttgtttttgtattgtttatttggtttttattagtctttttcttcgttttgcgtgttagcttgtcgtttccatcgttgcgaaggttcgtgagtgcgccggaagtattcaagaagattaattgaagaccgattattgcaaggcaagtcacacagatcccaaataaccctttgagcatgttgaacccgtttaaagctattattttatttcaactatgcattattttcgaatgtcattgggtggtgaacctttccccgttaattaatggcctaagatgactttattttcctatgggttataatttgagtagcatgaaccttatatattggattggttcagctaaatgctatatgtatgtgtgcttagctatgcttagaaacattagctaactaaaggggataattataaactatattatattattttaattatggttatatttaatggtcgatcacgatggttaatcgtgtgatgttaattaattgataaataaaatctggttaaggtgggttgtgagcatatggttttgatggttgtgctcatgacaattaaggactggttcgcgagctactgttgtgaaacatttatcgtgccaaccacaagccagcgtgggcaacggctttatcttttgtatagcatgattcatcatagtgtgccagactgtgaagcggcaagaagtccgtgggggtcgctggggagtccattgcctctggttttgagggggagattatgatccaggaacggtgcactgttttgagttgtgttgtgcaaagggtactgtcacgatttccccctttgcaatgccgtggtggtatttcggggcatggcaacatgtgtggaatcgtgtcttgtgggtacagtggtacacctctggccagagtaaaactattcgaatagccgtgcccgcggttatgggcgagttgagcaatgtttttcgtgattagtctcacacccctcacaataattatggatgttataactggtaataatttgcttagctcctggtttggagttagaactgtacagccgggtatggttgttcaggatggttgggcctgtgcagcatgggtgtgttgctcagtgttgattaaaatttctgattaattactccactgttttacttctcttaaatgttttgctaaatgctgcttttgcaaatgagcctatattatgccatcatttggtatccttgtgcacttgcatatttgctgtgtggtttgttgagtatgtcatatgctcattcttgcaataatcatcaaacctcagttgaagataaaggatccagaaggagaagacgtttggcttataccccagttgagctgcctgtgggagtggagctgaagtcatcgctagatcgttattccgctgctgttttcttttcttttgtaagtatgtaacgttattattaagatggatttgtatattaaattgtcagtttgtgtacctcggctgattcctggacgaggattttatgcacaaattagttcggaaattactacagaatttccgggcgtgacaatagccagctcctgacgcgtcaagtcaccggtcgggcaaatcgggtttacaatggctgcccctagcgcgccctggcgacgcgctccaacatgccggggctgaggacgacggcgaggtcctcgaaccactaggtgcggctggtgcaccgcacgctgaggcagctgctcttggtgtcgcacgagaaccggaacaccgagctctccggcgaggaagctcgtcagggtggcgtcccctggggtgatggccacgtgggacaccagcgcgccgatgacctggtcgaacatccctgtagcgtccaccatcgggtgcagctagccgctggcactacctgactatgtccaccacgctctgccacgaccactgcggcatctcatcgagagccttctccgtcatcttaaccaggctcggcggtgtcgacacctccgccatcgccgctattgctgccaccatgtccatgaactcaaccgtgcaccgcccataaaatcccccaagatgcggcgctggaggagaggatagagagagaagagagataggagagttgaaatgtgggtccaagagcatttttgatatttaatgtgatttctctctcctcttcaaccgaaaattattattttaactaatgatgtgttcatcagcaaatatccacgatccattttttaagagtgtcttccgctaaaagtcacttcggacagtgtcctacagctaaaaccataaagtcatgatctcctgtaacaaaatttgtcaaaaaattagcacaaatgaaaaaaaactaacacagaggttaactaactgtaatagcaaaaaggaaagaaaaacacgttacaatttttttttaactagggctggaaagcccccatttccattactaaaaatgaaacgacaagtacaacagggttcagaagtaaaaaaacaaaggaaaaggctaaacacaacccccttactggagcagcaccctgacaagagagactaacagtttctgcagggcaagctttacagagatcaccagatcacagacaacaagatgtaaagggcagacctaaccgagtagtaccatagcaaagcaaagaactcagcaacactaaactcctgaacttctttattccaaacgtcttgcatagattctccacccaaatcgggaactgaagacttcacttgccacttgtcttgccagcttggctcccaacattaagcttctttgtcttgcctccgatttctgcaagttagcccaattttcaataaaatgacatgtaagatatatcagctcaattggatcattgggccattttttatcaaaacacactttgtttctggacttccaaatggcccataatacagctgccaccccccaccatcacaagttgcttagagtgtttgtcaaaattagataaccattatccaaacatatggtttttatctctagcaggtgttatattcaaggcacacaacatcacattccagatcaatttagcaacagagcattcaaaaaataaatgctgtatggactcctccttatcacagaattggcacaatttatcacattttctccaacctctcttaaaaaggttatctttagtaaggattctgttttttaacaccagccataggaaaatcttgattttcagaggtattttaaacttccagattttttttatatgggaatgccacttgctcccttttaagagctttaataaaaggatttgacagtgaagcaaccatgcttttctagattccaccacattttatcttttattccttcttgcaaattcagaagcatccatctctgtttaatccagtctctaagtttatctccatgcaaagtccttctgaatttgataatctcccatcctttctccttcagttttgcaagggtgatatgtctagtatgggtaatgttgtataaagcaaggagctgcaaattcagaggtctgccaccataccaattatcctcccaaaacagattgtttttgccatctccaacctaagttgaacaaaatttcaggaattcttcctgacttccatcaaaccatgctagaaatgaaaattacccgctttataagtcacccatgacaaagttttttgactcaaatatttttccctgagaatggaaattatagaaacgagcgctcgtcaattcgtcattgataaatcatagaatgtcacatatgtatgttggtatgaataatctagagttgagctcctaattggcacagtccgtaaaaagacattcggccttcatggtaactatagtcctcttaatttttatatgtgtacaccgatctcaagtgaggccaaaagatggacagcgcttgaaatgaagaacgaaattaccggtgggcggtggtacaatcaaggaatgatctgcggaaaaataaaaacggccaccactttactgttctcgattaccggcatatgtagtacaccgatcttaagcgaggccaaaaggtggacagcgcttgaaatgaagaacgaaattaccggtggtacaatcaaggaatgatctgcggaaaaataaaaacggccaccacctactgttcaagatttaatttatatgtatatcatgatttgggatagatgcaattggatggtcagaaaacaatcttcactaaaacatggctacccaataagcgtttaacaactgtccatagctgctcttaggcacgaaacaatctacctgcccaaggtttgcccagcaaaaagatttcaatagttgaaatgggtaaacgaccgcctaaagctctctttcagtgaaataaacacaggtgttcgaaaataagtgttgagatcactgaagatgaagtgccttttcactggaacataatgaccatgagcatattccaccgagggaattgaaccacactagcacacctttcgttttgcatctaattgttaagtttgcaactgttcccacatttgctatccagctcgcctaatggggtcttggaagtattggagagagatgagaagtgcttcctgaaaacgtttgcttctgtcaaaataggaacaaatccctgaaaaataatgaactttccaagctttcaagtgtcaagtacctccgttcttattgttctgctcccttgactgggacatgtattcaaataggtattaaatacatcatctacacctttaccctgcagaaggaaatgtgtcttcaataacaatactaacagtaaaacaaccatcatttactaaagtatgagcagttagccacactaacacagtaatcaagttatgtatatcataaactaggaagtttatagaacaaatctcagctgacccattaccgagagttaaaaaacacaagacattgcaagtgagaatggactagatgatgtaggttgggcagttggtctatggtggattggtggtctagtaggtgcaatttggcgtggctttcctagttggtatgaagccagcagcctatattctcattctcataaaggcacacaggaaaatactagcaactaaaccactactatgcagagctgatctccctggcttcttttcatatttttgttgtactccaatctgaagttacaaaattttccattagttcctttcaccccttgtttcatcagttctcaagttcgtgttttagttagagaacttggactctgccacatctcttaacttcgcttcagaatctgaacagccagtattgttggtctgtgaccattcagttttattcgtttattcagcttttcattagtacttaacaaagaataccaaatattcaaagacaataccggtccaactgagttgactgctgtattttgataatttcagcctggtttgtctagtgtcagaaataacaacataggtaccagttttttgttagtactaacaaaatacgtattagaaactatcatatgcaatgataccttcaaatttctatcttcttcaatgcattcttctagaccagccaatccaccaaatgcaattaaaaggtgcctgtacaatgaagcgctcataaatgacaagatagccatacacccacaatggtggtcctgtgtatttttcagtttatgatgaagaatagagtggattctactttgcctctcatacactatcatctgagtctagaaatcaaccctgaataataaaaacggacatcttccacccctcaaccaccaaaaccagtttaaaatatccccttaagagcaatacaatgtggttataaccaaggttctaaatagaagtgatagttacaacaatggtggtagtgggttactaccattaccaagactaggtagtgctacgaaatagcgcattggaacaaagcagctgcaatagcagctggatagcaacctcataagcaaaatagcagctgctattgcattgcacactgaagtctgaattatggagcttaaatttgtgttgtgttaactcttgttgattacttgctttgtttttttaaatagagtaaagacctaattaaccatatctctattttctttttcataccaaggctccaaaagcagctaccctaatgagggttaaaaaaaaaaagcagctacccaaataactcgacactggtaaattcaggccagaggcaaattatgtaaactatataaaatgatgaaccagctgttcaacaatcaaatcactggaaccatcaaaataagttaaccagtaacatcaccaagtcaatagctggtctgggttcaagaactatctgactggatcacatatattgttgtatggcctattttatagtaagagtctgcaaaacactccctataacaaaaaagaaatggacatgtttaatgcaaaaaaaaaaaaaatcacattcagtttgtatatgttcattttttattcatagaaaaaaatcctgagacactggcaaaaaataaataaatagtcatcataaattatgtcatagcatctagaaacaaaattttgcattcagcagaccaaacaactatggaaaaaactgaattgaattctgaaggtagtccaagggaagtgaaaacaatatacctaaaggaaggtaagatcagctcagatgaactaatgatctttccatgctctgaagtaccaatgatataatcatatccttcctaaaaatatgaaaataattagtaataagtactctttaccctgtactacatgtgattgagctaaagaaaattgtaccttgtatggtgaatcactgaaaactccacccaaatttgaagcataccggaccttatagccccaatacaattccatttcatccctgggagaggaaggggaaacaattttccttttgcaagctagatgaaaagtaaatgacaatatgtcattaatcaatatcaaaataacagacaaaattcaagttgtagaaggcaagagctaaaataactgaatggggatataagtatgcctagtgaacaggaatgataaaatgaagcgacgcattacgaagtgaatccaaagagcacacatgtgaactgaaaatagtcactctgtttttatgttacataattaaaaaatccatccattttgctctgcagaacaagcagaatggtttacttgaaatctgtagtaacgcatgggcactatattattcatatgagaaataaaatcctgatagttgttgcagattttaaccagtcattgcaaatggttaggaaggatacttcagggtatatggattaaagaacatataccgagtaattcagatactaaaaagttctagacgaagaaaaatcaatagagccacatctgaagcctgggtcaagtgaataaatcatttacctgttgtaatgtcacgattggtacccatggcaatagttactctcttccctggttctagcatttgctcaaccagaacattctgtgatgaaagacaattatagtaagtttattggatgagaacgtacattatctaatacatgatccacaaaggtgtatatgatacaatatacattacagaatctgagaatcaagtttatcatgttgagtacaaaaagatttgctcagaggcagacatgcaactatcaatataaagttgctagacttgccaaagcactctggccaggcagctatcagcattgaagctatcccatgctgattttcatgtttcaccattctcttacccttgccccatatgcagttatgggtaatggccatggcatgcctctttggtgcaaagatatctagctgacattttgacagcttacagttatgctatgctatccttgccaaaaaaaaaaaaaaaaaaaaaaaaaaaaaaaaaaaaagcagtatgccctttgttttggcccagcttcagcgtatattgaaagcagccttactgggagtatagaaaattcaccaagcaaacctatattacagaaaaaaaaaaagaagtattttgttggaataacaaactatgaactcgtttgttatgtgtttggtatgacaccacccactagcttaactttttttcattcaattaggctaagtttacaggggttaattcctcggagtaaaggaaagataaagatagttgggtttatgaaaaggaaagggtttggttttttggaaaggaaggaaagtgtttgctctttccggaagtaagagaaggactaccttgggtaaggtaggacttctcggagtaagggaaagcaaggtgatacgtgttcctagcagtagttaagcgctattgttgctagggagcccatgtatgggggtatgcgcgtggaggaaaacgcccagaagggcaatttttgaagccctacggcactttagggtaggtttaggtactctgatacctaaaccagaatttaaatgcatttaaacgcatttctattagtgaattaattattcgattcatgcactgggttagtttgtttggacaataaccatattataacccctttgtttataactgaacagatattttatagtctaagccgtcaggttacaactgaacggatatttaattacacaagccacttgagctaaaaaatagtatgtgaaaaaaatttggataccttactcaatccgacatcaacaaatgtccccattgaacgatccccatccaatgttacgcctgtctaaattcattctactgtaagcattctgttgaatcacacatgaaaaatgtggtaacaaaaacttttccgataccagcattaaaataggaatgaaaaaacagtcgaaacaaatccaattatgctattagtactcatgttcctttttttagttgagaagcacaaaagggtgccattctaaattgaagccttaacaaagttgagcatgtgggataggcagtcctcccccaagaagtaattctacattaacacaaccaacagctcagccattcagtaacacagcaggatcaaagagcgtataaagtttatttttccttttagcatgaactacgagaattgataaagtccaaagcaaatgaattgcatattgtgcatgtaatgaatttctgaaagctacgaagaacagataaaacaactgcacaattcatgggcatactatataatatttataaaaggtgcagacatggccacgcatgacagaattattaaacatgatgaatcattcgaaataccaaacactgcatgtgcttatgcatagttcaattgatgtgctcatatacatatagtttcattcaaagatgtccctaactagttaaatatgaaatttacaacttctcctagttttctttttgaccgaaaaacagtagcagatctctagaacttgtcctaaattaacaagagaccgagaggtaagtcgcatagctcctataaatctaggaagacaaacttcatatttttctagttaggtaaaaaagttaaattacattggccatgtgatatttactttgatttctctctcctatttcaatccgatatactaaaataatggtaggagtgtattatagcaaagagaaaattcgctctatgcacagaaaaaatggcagtaccaaaaatagcacaaaacattcccccattcgaccagaggcacacgccactagtttttcttcaatttgtagcgcttccgtcacattttccgtccaagtgattggttagccaaacatgaacttgggctcctcggctaattgaacttgtccacggtggtggctgtggtggggtggccagcagcggaggagggggtgcggccgatggagaaggtgtttgcatcgctgatgaggtcttcacataggtgtggcttatggagatggagaacacagagaggtgcagcttgtcgtcgacgcgtagcagttccctgtttctctctagaaaaaaaatcagagaggaaggggccagtggtcatcacgcacagcaggaattgagtaagaagatgagacagagatgtgaagaattcagtgctcggcaatgcaaatcaatggtgtcctatggaatttaatttttgcaaatcaatgattgaacaggacacaacaaactagttcatcatggggttcggggatgggaaggagtcgttagccgccactgtcatcaacgaccttgatcccatgtgccgtcgcacggcgcaaactgccagccgccgcatgcttgcctgctctcccagccaaacgagcatgaactgatgaagaacaggaatggtccaacccaaccaatcacgtgtgaatacagagaggactaagggtaaatttgtcattttctgtccctattcacatggaaacactcgtcttgcactgcagttttggtggaagtgctatggatggaagaaaaacgagtggcctgtgctaccagtcgaaagcggaaattttagttccttgtttctgtgctacagatcgaattctctatagcaaatagccagaaaactagagtacccatggccgtgacatgattttagttccccacacaacaaatgccgacttcgccaaccatatacgataaaagcaattcaacgtggataccaatagcactgcaagaagagagagatcaccttcacgaaattcagaccactcatgcttgcgcaaatggtgtggtgcatcgagtgggggcagcaacccctgcatacaagaagcgacacggatcaatcagcacctccaggaaacccaacatgccgatgatgcaatcatgttcttcagcggtctcaccacaaacttcaagttgttgtgcatcgggaaaaggcgtcggcgcaggtattgtggagtctccagatactgtaggatgcgaacaaggaagcgcgcgccactctctacgtcatcgccgctgttctccactgaggaattgctgtcgaagaccacaacctcgtcgatgcggaagacggtcgccgcgcgggcgatttgtcctgccagctgaaacagggtaggagctagagccgcaagaactagcaagggaaggtgagaaaggatggatactgacgagggtggcgagctcgagggactgggcgttgtcgatgatggatccggcgacggcgatgctcaccgtggtcttccgattcggaaccgccacgtcatctccgttcttcttctgttgcagctgcttcttcctcttcttgtcgtggacgatttcttcgtcagccgctgaagcctctgcggctccgcagtcgtcctttcgcttctttttcttctccttcttgcaccgggccttcttggaggccgctgctgcctcggcgtctccggagttcattgcggcggcggcggcggcggcggaggcgtaggggggactaacacgagaacacctccaggttccaggagtcgagaggccgacgaaagtagggtagtgcgtaagggcccctcatgtgccggccttcggccagcgaaggggtttgcgtggagtcggactgttttcggcccagcgataagtctactttatgtccctcagtaccgtttgagtttcattgtatctctcaaccgtaaaaggtggagaagtagaaatagaggctcattcagattggtcgcccgatcgaatttgagaaatattgggcgctgacgtcagcgtccgatttacgtgcagaaactactttaaattgatttttctcttaaattacttatccaaatcataatccgattgcaccattaaattcgttgcaattaaattttcaaaacaagaccacacatggatatattccgacgaaaaaaaattagcttattattgaattatttttaaatattgcacaatgttccactaggtatatcggaattgtttcactaagtagatcgaaaatgtttcactcgtttaaatcgggtgttgtttcaccttatgtaaaaacaatgtttcaacaaatagcgaaagaatgtttcagttcgctgcaacattagatctatacatagtgaaacattgtgagtatactaggtgaaacatttttcggtggaaaaaaaatataccaaattcccttaatagggggtttccaaaatatatggatttttttgttgcaatggaatgtttcgttcactgcaacattagatctatacatagtgaaacattgtaagtacactaggtgaaacatttttgatggaacaaaaaataaactaaattcccttaatagagagtttctaaaatatgtgggttttttttgttgcaaaagaatattttaattcactgcaacattagatctatacatagtgaaacattgtgagtacattaggtgaaacatcttttgtgaaaaaatgggagggagaagtgggtgggcccaccaggtgatcacgtgggggagcgcccgatccggctcaccctgcgcgggtcacccggggtgaatcattatcgagtataaattgtccctcattttttattaaaaccagtacaaatcgataatatggaataagttcacactgcatcccttatgtttgcgcattgagtttaaatcacatccttaaaccacaatactggaaatcttaaacctccatattacaaaaccgggttaaataagatcctaagacggtacggatgattgttttggctgacatggcatcctagctagaaaaagaaaataaaaaataatatgtggggctcatatgtcggaggctttcttcttcctccaattctcccctctcttcccaatctcactccacaacggcaaccgctggggaaggaggggcggctgaagaaaagagacaaggcgatggtggcgttcgagccaaccaaaggtcgctctcgtggcgcaaacagctcgggctcaccttggttgctgagctccacctcgttggggaggccacaccgcccgctgggtacgacgcaacgacatggcggaccaacgccaaagatttcacggcaacagaggggatgaggtggtggatgacgatggtgacctcaaggctatgggagggggggggggagagaaagcctgagcaggcagtggggatgaggaggtgaaggatgatagcgagctcgaggttgcagcagtgacacggggagaaggggggtgaggggtggaggagggagctcgagtgagccggagggaacaaggtggtgggacgatgtgggcgagctcgagacgtgggtgagcttgaggccacaacagtggctaggggagcctgagcaagcggcatggcctccccatgcgaggcggagcttggtgaccagtctggccgccgccattgccttatctcctctctcctgccactatgaccgcctctcccctcgctgccatcagccattgccgcgaagagagatcgggaagagaagggaggtgtggaaagagatgggaatagaggagagaatgattggaggaagaagaaaacccgtgacatgtcaacccccacatgttttcaattttttttttggataccacgtcaaccaaaacaaccatccataagcttctttcatatcgtgactgaaaacctacaatttttcgagcgcatgaaatctagcaaacaacacaggaatttaacaaagggagagatttgcacgtgtttgtgtacgatagtatgttttattgtgccacttccgtgtaatcggaaaaaaaaaagaaactgattaagcttcacctcacctctcatcctcacaaacagtacatgagaatatttcacctgtcataatcccaccacgtaagatgcttccacaaactgtacatgagcacgatgaaacaatcaagctgtattgcacaccctccatcctaaaaaaaaattaaagcacaatcaagctgtattagaacatcacaaaatatcgatggagaatgtaaatcttgcagtttatccatcaacacgatcacaagttaatacttcacgactgacccccccaaaaatttctcatatactcctaaaccaggaacgaaataatgacgtcgcgacttggaaaagttagatacaaacagccgtacaatgatttaaaaccaaaacaggaagttcgagttccttctttttcatgttcaattctctgtgtactaaatatatgatgtcacattattacattgtcacacattctgcaaaacttcaataatttcaatgtctaaagcatatacttccttccgtttgaaatggtcaaagacttgaagaggcaaaaagaaattctactaatttcgttctactcctggattcttgatggttctccaattgcatcttccatacgttggtaccagtcaccaatttgtgtatgctcaaccatatcttttccagctgtcaagtatcggataggtctcaaaacaccaaatactgcaagatctgccaagttaggcttggagccacctggataaatgcaagttaatatcagtgcggagtaacaaacttgatgcatgtggattttcacccttccaggctgttttttcccttttcccttcctttatggaaaaatatcatacctagaaaatcccttccatcaagggcttccatccatgtgttggcagcatcgtataatgaagcacgcgcatcagttatattgtacttcttctttagcttcttagacaccatgtacattgctgcagcaccagcatacttcacagcaaaccgctcagtaaaactgaagttgcctgcattacagagttcgggtgcacatcgtcaaatgttgcactaacaaaatcatgtgtcatttctgctcaaatgattaaaacagttagcgaacagagcaccacctctgcacccaattttacgtttttgcctagagatgaagaaatctagtgttcctggataagtggatagcatggcatcttgaacttttattttttagttttctagtttgaatataattggagatgaatcatatcttactataaagttatcccccactaactccttaagcttaacatgcaaaggtgccacatcatcatccactaacaagatgctacacatcatccactaacaatcatcacatttaaacaacatgcaaacatgctatatctttatagtttttataatttaagagcttttcaaataaaaatatgttaaattatcatccaacataattcatataatgtttcaatatatatctttattatgttttatgatatcctatatacttatatagttcatcctcacttagttagtacttaaatgattaatctatggtccaaattatctttctccttttttcctctaattaagtcatatcacatcaattgtttttagcctttttttactggaattgtttttagcctttagatgattaatctacagaccaaactatctccctatttttcttcttccataaagtcataccaccttactttttacatttgaatcaccattctacatactatttaaatttaaattatcataaaccatattaatttacttaatctgatgttatctagctatcttacacattctttttttattgttatcatactaaattcccgcagcaatgcgcggggtttcacctagtatagtaaacaagtaaccccttacatgaggggattttgctgaacagtgagcacaaactaatcttccctacactgttctttccatgcacctcatgttctctcaactaacctccgctatcagcagttcagcactatgttagtatggtacctcgacgattgaatttccctatatctcacaggtaaaatccctgttcagacacattatgcataatgcttttcatttatggggcatccattgacaatcacgctgaacagtgagcattcaccaaattgtgttatctccaacatttagaaaattaatgaactatgaatggagagcacctgggttcacaaaatcaaaatattcatgccaagtatgttccagagagatcctatatgtaacctcactgtaacaccctaatttgcaaggtgcaggccccatgtacacactgcattccattctagcttcatgtaaaaggttaacctgaaggttctatggttggaatgtgtaggtttatttgttatccttaatacatctaaaatctctatgtgagcctaatctcaccaaaaatacaccacgggtcacacaggcctctagtacaaagctggggttcattcacccctttctttagaagctgatgaacttgtcagcacattttcttgtttattcctgtgttactccgataaaattcaatcctattacaaccaaatatcaacttgttaaaagccttcgatggcagtagatagtgcacgaccatgtcctatccaccccatgaacccagacacatactcgtgtagcacaaggtttatgctctgatgtcaacagtaggaccctagctttcaaaatccactttggcctggttcttctgaggagcagggacatttacatagcaccccacgtaaacttctgttcttgattcatgtaaaagggttcccaaaggtgctatggctcaaacatgttggccccaacctatctaaactcaccatgtaagactaatcccaccatcactgtacatgggccacaagtgcctctactacaggaccagggtgttacactaacttataaaaaggggtttagcgttaatgattccactcactctggtctcaaatacttcttattttgaataagcatctagtcaaacatttaaaagtagtgtcaacatcttttaaagattatttggatacatgagaatcataaatataaccaaaagaaagaaaatatagcagcacacagacaccaaagttaaaagttccaaggaattaccatgttttgaaatataatcaaaagattccaaggcctctgaagttgtccgatatatatttggcgacaagacatgcacaaggtgctcatcaacccacctaaaccaataattcaagacaaattatgttaccgtagataaactccagtttgtaagaatgttaagagagtaaaatgttggtcactcgtgcaaccagggttcgccatgctacttctagaggaatccagctcactccatcaagggtaaagcctaaatgcagccaatttagtggtagtcggcttttttgtttttcatctttcagtttgtgaatcctaccagaaaatgcataactacccctaatacaagataataatggacttactggttgtctctagccttggaaacactactatgaccagatccagagaaaaagtctataaagtaatcatcagatcataacggataagctcttagtttcatcaattaattttagtggtaaaaacacaatgaaataaagcaaagaggatagttgatggccatactgattctgcctggccttgaaacattatcaccagatccttgggaaacatgtaactataaactatcagatcgcagaaaaaatgtagtaatagtgatggctatgctgatcctgcctggtgttggaacattacaatgaccagatccagggaaagaagtctatcatgtaactatcaatgcataaacagaaaaaactgatggacaaggtttttgttcaccgattgatttacattgtaaaacaatgaaacaaaagtaaagaaatactataaaagtagaacatattgcacatactaatgccatataaatgattaaaaatttcaagaggaaagtagactttaaacaatatttgtttctagaaataggagtactataacattaatgatttgagaagctagaaccaagacctgaaaaaaaaattacaaatactaatgccacataaacagatgcaagtaatggagaaatacctgcgccatttttcttcctcttcattagtggctttatcatcagggcggaccctttgctgtaatatattgattatatctaccaacaacagatgtaacaatacgttaactctggagtttaacacataaaaagttattttacttaaaagttgaaaccacaacaatgtaaaggaaccagaccggaataaaccaatatgaaatgaatgtaacctgatgaatcaaccagctgttcaccatctaccatcagtattgggaccttcttgtactcagaccacttgatttccttcttgctcaatggattaacttccacaaccttgtagggtatatcatgatagtctaggaaagctgaaatgaagcaaatgaagaatctttcaactaaaagaaattatgccagaacagagagatcatcaatgatttcagaataacaagtgaatgatctttagcaagcaactttcaagcttcagaaatctagaatacctctatgctctaagctactgatatacagatcacacttacaatcaggattgatcatagactcacagtacgatcacacttagttatcgaagtgtatatactcatacagcagataatttgtgaacccattgacagatgacaaccccagtcccaatagcattatgaagtttcacgtacagtaaattattacatcatgctgccaatgaatcagattgctgtgcaagtttgtaggtgagggtgacacctgtcaaaaaagggatggctgatgtactaacaagtaatgacagttggacaaaaggaaaacaatttttacaacaaattctggaaggtctgattcaatgaataaacttgaccaattcttagctgggaggctcctctcttttgaagttatgcaaaatgtaccgacagtccttaaacatgtcatagatgggcacagatgcacagttggacccgtgatgatacattaaattaagggcttaaatatgcaatttgaaagttcaagaaccataatgatagaagaattgtactctactgactatgttaaattacatactgctacctaaaaacgcttagcttgtaagtttttcattaccaacaaatcaataattatcccctcaacagaaaatcaggacatagaacaacacatcatggtaccccatgaactatttccatgaagctaaacacaatactaccaaaactcagaccttgagctatttcaggagggatggtttgcctagctgggggaaaccaacaacgcttgactacaagctcaaggccaagtttgcctcggattacacaatcaacctaactcgtttcaatgatttcaacaactttcaaggtattttgagatgagaccaaaaggctggaaaaggctcagaataaacttttttgtcgtgtgcaagaacacatgcaatcaagttaccatgaagatttgtgctcactttagttcaggctggtctctggaggccaaatagggctccaaatatgccctttttttgtatctctaactcaaattggacttaaatactcatttcaaattgaacatgtatcatacataaagacaaatactcatttcagacaataagtagtgttatatactcaatcaattcaaattgaaacacattaagcaatgaggttacttgttcaaaacaaaccaaatgtagcttggcagatgccattttgtatggaacagaatttctctgaccactaaggcaaattcatagtatggcatgctctttgcaagcctctagtaaaggatcacttgctccaaacaggcaaacactttattgtatggagcaatttcgtttctgcccctactttgatgtagtctaatactgattttacccctactttttatggttttcgtttttgcccccaattttttgaaccggacgatcgtcttgcccctattttggatgctgaagttaacggtgttaagtaattagcaaaaggacatttataccctcttctattttttttcattaattgtgtttttgcttccattttatacatgttgctttggaactttatttttgtgaatgcatttaaaattaaatgacgcacattgactaatataacaattaggacagattcagacctaattgttgtggcaatgtgcatcatttaattttaaatatattcacaataataaagttccaaagcaaacatgtataaaatgggggcaaaaacacaattaatgaacataaataggagagggtataaatgttcttctgccaattacttaacaccgttaacttcaccatccaaagtaggggcaaaacgatcgttcggttcaaaaatgtgggggcaaaaacaaaaaccctaaaatgtaagggtaaaatcaatattagacatcaaagtaggggcagaaacaaaattgccccattgtatctattcatccatatgctccaagccctaacaacaatagcaccaatttataattatttttctcaaaattgtcaactgattctggaaccaagagatctcttgattgttcatcctcttgggtctccacattacacatttttcaatgctcaaacatgctaagaccatagcaaaaatccctaacagctcccaggctcaggtggaaacctcaagcatgtattagtcaatgcaacaaggtaatgactaataggtgacatggcatgggtagcaggactacactacagtgatgtcatgaagtctgttacataaaacggaacaacgaacacaaggaccctgaggtggtcagttcaatgagtgcatgtgaactgtaaggtgacaagaagcacaagtaaagccactcagtgagtggcagagatggcctcatgggagtgatccacagatggcctcattagagtgatctggcggataatagcataatgcaaacaatgcaaccatggtaactaaattaccctccattggaatgttccccacactgatatgacttatgagtgcatggacaagataacaggcccaacagaagcttcacaaaggggacaaactcaggtagcagtatctggtgagctctgctgtggcctcaaggaagaacagtaaaggcaactttggtgacaccagcaagacggtgttagtgagaatgatagcaatggttacaaagcaggcacccaattttcttaaggagtgatggaatatgttccatatttttgaaatggacccaatgtattgtgttagtttttttcccttctattagctgtactttggttaaacagatagaagtggttttcttcacctcatccagaaatcttgatgctaactgatgggagcttattttctgtaatctactaccttagaatcaattctctgtgtcgaaagatagttcccttcaaatatccttcaccttctgtaaagcatcaacaaacctatttcagatgacacctaaattagcgatacttgattttctgtgttttccccattcttgtaattctatttatctgttccaaacagccctatcagcttacgagctaaagaaactatattgggctcacaatgtgaatagtcctacctgtgcatagggacctcgctaactcatattgttcaaaatattttcattcacttttttatctaaaaaggttggatagatgaaaaagaatgaaaaaggttttacaagcaggtattgcttggtttgctaggcttagcactggtcatccagtcgttgtgcaatcagccttggtgcattctcagcagtgctcttggcattaaatcctgggtagtctatggacacgtatggattcagtgggatgtattctacatttagctattttcaaagcaatgaaagtagagaacactatcaaaaggcggtgaaacttatgttctgtagatttatgcattgtccagaaacattgttggtccgccaaactcatgacaattgactgtcctttaacttctatggttacttgaatcctcccaacctcagaaacagcttctacagcagcctcccaaccaaaatacaaattataatctatattctcgatagtaatcattaagataaaaaggcaaattacagctagtgaactattttatcgtaaccagatcaccacgaaaagtactttttatcaggtctaatgcacatcgaaaacgctagattggaggagtgcacggaagcaggagcacatcacctctgactttgttgcagaaggggcaggcctggtactggtacagcaccacgttctgcggcagcagatccatgggcggcctttccttggcctccgccgccgccatcgtcgcgaaggtcagggagaaggagaccgccccagcgattccagctggcatggcccgcgaggatgatgatgatgatgcctgggatgggggcgacggctggacgcccaatctcccgccgcccgccgcggccgccgccgtggaggcggcgtccccatggagagcgcgcgaggagaggagcagcgagcgggaggccagagcttgcgccgctcggattgacctcatcttggcaaacgaatagagcggggctgttagggttttggactggtttgcctcgccggcgccggcggaagaagagacggatttaggaattacaagggagatcctggatggtgctggatggaacgcctaaaacccttgatactttacgtattagtacttcaactactattaaattgtgttattatcgcggctaagggcccaatgacggatcggttttctaaatagacttttgttttcggaggatacctttgcgctcgttcttcttggagaagaagaaaaaaatacgcggaacagttgggttcgcaggttaacgacggatgacgggattgttgtccacggctcaacatctacttccctctgtactataaaaaaattaaacctaaatctaataacctattcaaaatcatagtaatataggtatgtttagtttttttttatgtaaagtttttaaagtatacggacacacatttaaagtattaaacatagactaataacacaaacaaattacagattccgcctgtaaactgtgagacgaatttattaagcccgtcattagcaaatatttactgtagcatcacattgtcaaatcatcacgtaattaggctcaaaaaattcgtctcgcaatttacatataaactatacataggggtgaaaacggagcggatattatccgatccgatccgatccgaatccgtccgatgtgaggatatggtaaaaatttttagatatccggccagatgcggatgcggatgcggatatggtatcaacgatatccgacggatgcggattatccgatattttaatcggattatccgatgtaatgtttggcggataatccgcacctttcagaccacacaacaactctatttagcccattttacatcgggcaacccatctagcctatatagtgtaacctaatccaatcctcccctaaatctctctctctctctgcgactcttctctcggtcccttctcctgctcccacatgcgccgccgcatggcaccataggtgcgccgtgccatcgctacagcctgctggcgccaccgccgccgctcctccttttagtccgccgacagtgtgttgtgtgctgtttgctgtaagcagtgtgctgtatggaactagtgtgttgtgtgctgtatgcagtgtgctactgtattgtgtggctgtgtgctgtatgcctatattgctgtatgcctcattgcctcatgcctgtcatactgatgagtgaactactgaactgaacactatatttttaaattttaagcaacgcagtgaactgctgaactgaacacttatattatgtttttgatggatgtgttatattaagcaaaattatattattgatgtgttttggttggtttttcctagagagctgagatcatgttcatatgttgtttggccatcgtattgcggcaattgtattgccgccctcttgttgtatggattgaatacaaacttgacatccgacaactttttgtctgtttccgaacagagtccgcaccgactccgcaccgaatccgacgtccgaaataatccgctccgcatccgcatccgcacgtcatctgcactcgctccgcatccgcttaaagaaaatggtttaggatatggtatagctattatccgtccgaatccgctccgttttcacccctaaatgtacaattggttttttcctcacatttaatgcaccatgcatgtgtccaaacatttgatgtgacgtttttggccaaattttttttatctaaacaaggcctatatcatatttttttattatgtttgttttttatgagacgaaagaaatacacctttaccaaaagcaaaagcataaggttctcggttttggacatgtgaatatgaaagaaacatgatgatattaggatcctgttgggtagggcttcaactattaaatttaatttcaagagttaggtctggactagagttatgaagcgcggtttaaacccagctttacctcgctagtttattttgtgatgcacttcactccgcttcgctcccttgttaggtagagctgaaactatttggatggactctagctctaagttagagttgaaactctgcctaacaagtcctaggtattgggtagataagcacatcagcacgtacgaactttcaaacacacattgcttaaaaaaatccacgctttcttgtttaggagctacttagttttagttgataagggtgtgcatttggtttcctcggtttggtttgatccgtttttctttatttggtttttctaaaatgccaaccaaagaagagcgtgaaaacttaaaaatcaaaccgaaaaatttggggcctcatcgtttggcttttttctaaataagccaaaacggcttattagagaataaaaatgaatttgtaggtaaagcttttatacatgtgtttttgtgacttaaaagctaatgctgaaaaagaaactacgttgaaaatatctcaaaatcaatatcaaaattaagtttgaaaattcaaattttggctttttctttagctgaataggccatccgatgggagccttttggtgtactcgtcatcattttttactcaagaaactgccttctcccatcgttgcgggcttgagacgatgatcttcactcgtgcgatcgcgtccacccacatgctcatagatctgcccttgcatcgaggttgagctctcatgctggagatcagcactctagcaaacatcgagctccaatgtcactaccgatctaatctggcagatatcaagatcctacgccatcgtagaggatctacttgcatgcgactcatgactctggcaggaggcagcaaatttccttggttgtgcagtccttctctagcactgtgcgtgaggcaagcctctcctgcaagtgaagatgaagaggcgcaaggcatttcccctcgtccttgctttcagtgcggtttccaatggctcgcttgaaagagtcacttaggcttacaaagggaagctagaaactaaaccaggtcggattgtgtgatacctggtcgaacagttcgggttgtttttctttctttaccaaaacacactgagggagacccccacggtatatattaattttttgaagtttatatacaaagatggtagaaagggataaaaaggaaaagaaaacataattacagaatatcatggaagtatatgaatctccctatgcctaagtaaatgaaggctcaaatccgagataagatttctcttccaagaagcaacggaatgctgaataccttgaaatattaggccgtttctttccttccaaatattccaagtgtcgaaacaatatttcggtaatattaaaatgggatggctatcaagcttgaaaaatggacggtttaagagacatgaggtttatacaggttcaggccttctagatgagaagtaatgcctactcctgtctggggattgatccgccgagtatattgttgatcgtatgatcagggagaaaagttatgcccttagagtcacccggatccctccttatatagagggaggagccggaattacaagatacaacccatgttcttaacggactaggcttgtacatataaattacaatcgtaaccgactaggactatcggttgtttccttgatacataagttgacataacaaccaagtcctttactaaatatattctatttctatatggtacccctatacccagtcggatatacatgccgtgtgggtatggggtatccataatctccacagtagcccctgagaccttcgcagacgacgaaataatcttctcccgagtcatttaacgaaaaatcccgagtgcttcaattatctccgccttggcctcctgagtgcttgaattaaaggctgtgaagggcttaaaaataaaaaaaaataggtgcatcgactggatgcacttaataggtgtagcccccgactatgtgattagttgaaaaaaactaaacatatagtcaaggttgaaataaataaccagccgagtggttttataatattaccgaagtaattaaatattaaagcatttgcgactccgtccgaagagtttgccgactgctttaattaaattattaagcttactatgaaacatagaaaataaagatccgagtgataaaagcactctaaagatctatcgtctatgaaatcattgtcatgattaatatttgtgatgaacaattggctttgcaaaatgatttaatcaaagaattggtttgaaaaaatgtgtgaatgttggtgtaagtgcgtgtaactaatgtgggtcaggttgtgatatctgtgcccagaaacggttgttttttctgattgtgtgcaggtgacttgaggtcagccttggtcaatggtgaggaccgagactatgttcagggaggaacagaggtctagtgcggtcaggataccatgtgagaaggtgactagagtcaggattcttggaggtcaacttcggtcaacggtggggatcgggactaaactcggggaggagttgaggtccagacggtcaagatgccaggtgacgaagttggatacgagatggcgcatggtggatggacaccatgtgggagagatcttcacaacgggcttcacgaggtgtgcgtgcaagcgtaagtgttcgcgaaggaaattgagtgataatatttggaggtatatggtgctacagtacacgaggtactgtagcatgcaggttatatgtatgcatgtacggtgctgtacatgtgcagtttgctgattggttggcttggaggtttgcatgtatgcgttggctgtttggaaggcagcaggcagcatgcagcgtctcggctcagccaggaagggagcgagaccaagcaggaaacggcaggcgtgcgcgcgagttggagtctgactcggttggacctggttcggcaggtgcggctgagagtttggatattataattgactagcaaaagtgcccgtgcgttgcaccgggtgatcagggagtgtgtacagtgacaaaaagtgttgtttggtttagacaactaatctgctaaaaaaattatttaccacgaacgtctcaagcacccgtgtcaaatcaaagatttaaatcaagattgactggttccaccacaagaaacttatccggttaaactatacccactttgcaattgtgggaatatacatgtgtattgttacctgagaaaaatatgtggacttcaacaaatcgtaaaaatcaatcttattaattttgtgagagtgagtattggcttttatttacaaattgtatttgaggtcaaatattaataagtagacattaaaaaaatgaaagaagattagacggtgaggggaaaaaataaaaaaataaaaaaaaagagcgaacaaggacaggtcaagaaaattttattatttaaacatttttaataaatagatgctcgtgttacgtgtgttgcaacgggtaaactaaaattataataaatataaaaatattagatcgttaggatttagtttttatgatatgagccctttaaaaaaatatattccttacataaaaaaaagttgtaaaagaaaggcccattagacttaaaaccaaacaaaaattaaaaccaaccctataaatctctatatgtgccggttatatggtatacttgtgctgtttttttattcaaatacagagtgctcatttttttttaaaaaaaaggcccgtcagatctaatccttatccccgagagagcaagcggagagcgagcggagcaagcggcgcctcgatccttccgtctcctcatcttctcgttttcccgacttcccttatcctctctctcctcccttcattttcctctttctcggagttctctctactgccgtcgcaaccagcgacgccctcccctctcccctcaccagtgcgctgcttcccctccccctcgcacggcgccctccacccggctgacggcgccctcctcctctcggtcttctctctcgctctcctctctctcggagccaagcggcaggcggcggcgcaagaggggaggcagcgggcgacgggtggcggcggcaggtggagacggtgaggcccagcagcagcgggaggcggtatcggaggtgatggccgcgtccgcccctctgctgcagcggcgggaggagcggtggccgcccagaggcgccctcccaccgctagatccggcgggaggaagggctccggagctgcgccgcctcgccatcctccccgccgccacctaatgcgtcggtcgatccagcggtggcggctccctccgccccctctcgccttcctccggcggcggtggcagcgtcggcggcagccgcgggcggatccggcggcggcgggcggatccaacggcggaggctccctcctccgccgcctctcttctccctccggcggcggtggcggcggctgcgacggccgcggattgatagcgtggcgacggctgagggcagcagtggcgacggccgaggtcggatccggcggattgtgatgcatattgtagttcttcttggacatttattttgtgattttgtgatgattgtggttgagtgatttggttgtgccgattttgggaattgtttctcttgtatccgattctgagagggattgggatttgggggctgcgggcgaaggcggacagaaaaaatcaacgaaaaaaaaccgggccaaaaaaccgtgaaaaaaacggacggcccaaaaaaccggacaaaaaaccgacgaaaaaaaaaccggggtagagaaccacgaaaaaaccggacggcaaaaaaaaccgcgtgtgcgttcaggaaaccaccgacggacgaaaaagcctcacggaagccttacgaatttttttattaggtatagatttagaaattgagcatagagtcctagtgtgactaggagttattctcctactttgagtaggaggttttcggtataaatagagagggagcgtgagacttccctgtatcgcttttcagagtgtggagttgatagtttagttagggtttcgagtttagtcgagatttttgtaaggagtgctgttgttgcactatgtaaacatagagagaagcaataaagttatcatgtactttgagagttcttcgatttgtgttttcttgggttcaggcggtagggaggcgatctaaccggcagcgtgcgagcggtccgactggcggcgacaggactacgtcgagatttccatcaatttgagggtaacttttatttccgctaaaagtttttgggtttttggttttccctaccattcacccccctctggtaggcttggttacttgtgttcgatcctacaagtggtatcagagccttgttttcttcccccctctgtttgatttttatcgatctagagtttttgccatggctactcctgttaggttttcaactatgcctcctgttttcgatggaacggattttactcattggtgtagtaggatgcaatcttacattatggctaagaattatgatatttggagaaaagtttctcatccttttgtgattcctgaagttattaatactgatgctgcaaaaactgagtttgaacaaaattgcaaagctcgcaatattcttttgagtgggatttctcgttcggattatgatcgtgttgctcatcttcaaactgctcatgagatttggattgctttgagtaattttcatcaaggaacaaataatattaaagaacttcatcgcgatcttttcaaaaatgagtatattaaatttgagatgaaacctggagaagctttggatgactatctttctcggtttaataaaattttgagtgatcttagatctgttgattctttttatgatgctaattatccataatctgagatttcttgtcactttttgaatggtcttgacatgtctatttgggagatgaaagttacatctattcaggagtctgttaacatgtctactttgactttagattcactttacacaaaattgaaaactcatgagatgaatattcttgctcgtaaagtcgattctaagtctagtgctttggtttcatcttcgacttctttggatgttggtgcttcttcatcggagtcttctgttcttgctttatttaatgccatgtccgatgatcaactcgaacaattcgaggaggaggacttggttttgttatcaaacaaattttctcgagctatgaaaaatgttagaaacaggaaaagaggagaacctaatcgttgttttgagtatggagcacttgatcatcttcactcgcattgtcctaagcttgagagaggaaagaaggaagatgatggtagagtcaaagatgatgacgtgaacaagaagaagaacatgaaagagaaggagaagaagaagcattgtatgcagtggttaatccaagaactcataaaagtttttgatgaatcggaagatgaagatgagagcaaaggtaagcaagttgttgatctagcttttattgctcgtaatgcaagttctgatgttgatgaatctgatgatgataatgaagaaaagcttagttatgatcaattagaatatgctgcttacaaatttgctaagaaaattcaaacatgttctattgcgcttgatgagaaggattatactattgagattcttaatgctaaaattgctagattaaaatctttgattcctaatgatgataattgtcaatcttgtgaagttttattttctgaaattaatgctttgcgagatgtcaattctattaattgcaagaaattggaatttgagattgaaaaatctaaaaagttgagtcttcttttgctcttggatttgctttacatgctagtgttgttgatgagttgattttgacaaagaatgttttgaaaaaaaatacaaagttgctttttgtgcaagttctttggtcaatgctttatgtgcaaataaggcaaaacaaaacaatggtgctttgatttctcaagattgttcaaagtgtgttttgaatgagttgaagttgaaagatgctttagagcgtgttaaacacatggaagaaattgttaaacaagatgaggtgttttcttgctcaacttgtagaaaacaaaaaggtcttttggatgcttgcaaaaattgtgttgttcttacacaagaggtttcttatttgaaaagttctttgcaaagattttcttatggtaaaaagaacctcaatatgattcttgatcaatctaaagtaagcacacacaatcgtggtttaagttttgattcttatgcttatcattctagacatcctcctgttgttttaggtgttggtgctagaagtggtaaaattttgattgaatctgagcctaagaatattgtgtttaaatctgctggcatcatgtctactttgattgcatcttcttcaaaatctactgttgagcatgcgaaaccttctgttgatgcaaaaccattgatttcaaaacgatctacttcacaaacttgtcgtgagaagtatacttgttctttttgtggaaaagatggacatttggttggtttttgttttcgacttgcccgcaaacagaaaaaggaaagagaaattgcttttgcaaaacaacggtggcaaaaatcgggtttttgttcgaggagcacagttagaccgcaggtgaaccggcggtcagaccggctgccaggcccggtcagaccgtagggacagcgacggtctgaccggcctcggggcagtttttcgcatacttcaaatcggacttttgtgaaaccaaaaggtaagttttcagctaagtctgattctgattttgtttgtgcatatgtacctactggttctattggtcgtgtgactcagtgttggattccaaaatttcttatttctaaccccaacacggaggcctcgacatcttcttgttcgtaggtattttggtggcatactccccatgtgcattcaacgttgagatgacgattgcttttcatggtaacatcaatttacttttggattgacatatttttggttctacgctctcgtttattagcttttcatatgctagtgtttgaggtagtagtttttgttaatacaagtggatacatgtcaattcatgagaaccttggtgatatcattggcaattggatgtctttttcaaaatctttaatttcttcttgatctttcttcggggagaattggaggttaatttgagggggagtttgtgctttttcatgcattcatgtttatttttatgcatttgttctaattctgaaaataaataaaaatgagaaaaagaagagctttgttttatacctctagtatattcttgtgcatgctagcaaaataattgaggtatatttgttgctatgttagcttatatgcatttttagtctttatatgaagcttagatattgcttttaagtgagatgatgcatgacactaattcttttacttgaattaagaaaaatatgcaatattgatgctagcatatggtttgatttataaatgctttatatatgtgctttattgaattgttattcctcacatacctttgtcattgctcattgcgtaagagaataaaaaatatctgtgagagagaaaaaaataaataccgaatccttggaaacagtcttgacgacaaggacgtattcgatgtgagcaaaataatgggtgccgaatctctggaaacagtcttgacgacagggacgtacccggaataaaagagaaaaatatgagcaaaaaggctcaagaaaaagtaaaaaattctcttgattgttttgtgctaatgctaatttgagaaagaatgataaatgcaataggtatatatgtatagtgtttatttttcaacctatgtgcttgtgaatatattgcattataaatcatttgaaatcatgaatccttattgttgatttgagcttaattgtaatatctttgatttatgtttatactatagtgcatgcttgataaatagctgatgaatttctcccttatattgctacacatgatcatgaattgcttttggtacattttaaagctctcaaaaaaaaaattagaaaatagaaaataataaattggttattacaagtgataatcatgatatcattgcatatgtgctttattggttattatttctcttttgcattcttgaagaaatatacaaaatgcatgcttcttgaaagggggagaattgaattgtgtttcaattttaaaaatagtcgattttgtgtttttgtcgcaaattgatgggagaagttcttccttttaaaaagggggagattttttctttttcacctttgtgatttttgtttttatttttcaaaaacataaaattgcattttggtgatgttgccaatgtgttcatcaagggggagattgtgaaatcattgtcatgattaatatttgtgatgtacaattggctttgcaaaatgatttaatcaaagaactggtttgaaaagatgtgtgaatgttggtgtgagtgcatgtgactaatgtgggtcaggttgtgatatctgtgcccagaaacggttgtttttctgattgtttgtgttgagattatagacatataatg

SEQ ID NO: 5283 - DNA, 53279 bp, Oryza sativa
aaatgaagattgagatagagatgaaacagttctaagtggtcgtagagaggggtgtactagcgatgatacttttgatgttcgaagtgatgtacatggtatgtttggtggtggtccgtaagatgaagcaaaatcatctcttccacttgaacaaggaattgagtgttgattcgattttgtttgtagtggagatagaaatgacaaatctgtagatgttgaacgaagcagattacgcctaggggataatggagaaaaaatactagatgttgacaaagaaagaaaagattttctcttgagttccagttgagttgattcatttgcatctgtacttgtgttggcacaagttggatccccattagcttgaaaactagatccttgaggttgcaagtttagtgaagacagattagagggctgaccatatgaatttgatatcgaagcctccattcccttcgtttgctcttcaacacaattagtatttgaaacattaagtagatcaatcttttgcaggggagaatttaaatcatgataagtgcccgtgctatccaaatgaggtttcactgataatagaagtcccaccctagcattctcctctgtggaatcaggtactacaccaattgtggaaccgataatagatttttctttcttcctattcttttctggtttgatcattatgctattgccataataaatgcattcttcgactagattatccccttcattctgttttagagtaaccagaacttcttcctcattgttagcctctgcatgtgtaatggtttcagaattgtggaccacatcacttaactcggttcctattgtatctacctctattactggttttgaagttgtgacctcagatattatgacctctttgatcatttgtatatcctttagactattagtttctgatataatgacctcctttaccaacacattttctatccccgagtcttcattggaatccgtcaatatttccttgttggaattgttcttttctactatgcagccatccactttacctccataacaacttgaattcatagtatctctatctccatcagttgtatttgctgaacttgacctcactactctagttatgttgttctgtataatatctccttcagcagatgtacatttttcatctgacttttctagtgacaaaaccatgccatcaattttatttttttgagatccaccaagaccaatctccatgtcaaaatgggaaaagggtgcagttttcattagttcagcacgtggagaacactctgtggaagttatagaaaggatttcagcatccctctgcccctcttgtgagtcaagattgctgaaaatttctactgcttcaaagaacacgtcgatagagccaacttccacctcgtcatcatagtcagatgcaacttctatggatgcatcagactcaccatcaaactctgaaaagagtacctggttcaggcatgcactttcatttacattttattatgttgaaaatagtatttcacatgtatgcaagaaaaattatagcctacctctgccttgaatttttttgtgaaccgttgttcagcatcccatgacacatcaatgttttcaaagttcaacggtagaatgtgagattggataaaataggtattgaacatcacccgaaacatcaacctttcatcttctaggctatcatcaatatgcaagcattcaaggacaacatctccttgcacgcaggatccaacatttaacttcactgatatattgtctgcctgctacaacagttaaagaataactaaaacaaatagaacaacaattgagataaactgcgattagtggtacctgtttgtaacgcctagcgtgtttcctaggctttgatggtggcaacataacattgcatcttttatcaacagttagaaaatcctgcccatatacacgaactattggcctacaaccacctacaccatcaaaattgggtacttccctaagaattacacaatccaaagtaaaaggaattggttgtataggccattcaagctcatcatccattttgcatatgtactgtagataccgaagatgggaaggttgtggatttagtgttgttaacatctgaagaagttcctttggcgcttgcttataaaccatgactagagttctttcttccccattatactgcttcatatatagaaggagacctgcaagcataaatgccaaaaccggccaaccgcctttctcacaatgcatgagtagaaagttttgctgcccttccagcataagccacctctcgctcaaccttaggaagtggaggaccatctccaaaggaagcaatgggcatcctaggtactggcagggatagtctttaactgtgataccgtaaagggagaacaagcctgaaaccagactttttccttcatctctgaagttaaataccatcaatgaagaatctacaaactgctcacgaagttgcaaaacaatgttgtccagataattcttgtattcaaattgttccatggtttctgtagagaagcaacagtcgaatactgcaagcataaatatttcaatcaatttctcttcaagtcaaattggattctagaaggcatcttagctaacattttagtaacactgcagaatgttagcaagctacttttcccctgtgaaagaaacattagcaagctactccctccttaccaaaatataatagcttctagcattaaaaaatatctcaaaatatagcaacttgtacacctgcttcctcttctcaaccaatcagagacatttctcaattaatttcagcacctactttcccttgtgaaccaatcataatttttttgctatttatttctacatactttcttaatacttgtgccgaactccagacgttcttgtatttaagaatggatgtaatatctgtgaagctatcacataaggaagtagttgttttatttacataattaattcagagaaaaaaccgatatgcatttcgtagacttttcaacaacatattaaaaacctatataatccatgaaattgtattatctaggttgataagtaatattaccgtatctattaattgagtgaatgtacaaagcagccccatttccaaagctagaatcaatgacacattacacaattccaccaattccacgcaacctaacccttccatgttgctgcagcgtttccccagatcctcctcagcatttgaaaagcaacaacattgcaggaggaagaagaagcatgggtttaccatagacgcggtcggcgatctcgaggagtcgatccggtggcttcctatagaatagcctccgcaacagcgccatgccctccctgccgttgccaccgccgtctctggcggccaagcctatgaccggcacccttccttccttcttctaggaacaacctccatgcgcagcacaatgccaccaaccaacacactttcgtagcaaatctgtcttgcaagagatcaaactccaccccaatgcgccgatgaaatttggccggaaagaatttcgcttccgcttctgactcgaattttttgctggattattatttttttacgataatgcttccatctggacgttggatgcaagcaaaaaaatcggaccccgcgtctaccatgcaaaaccaacaccacccatctgcaagtttgcatgcaagctcatttggtcgcccgcgcctcccatgcaaaaccaacgttttcgtccactgcaagtctgcatgcaagcatgcacgcatttaacaaggagaaggctccagaccaaacacacgagcctcaaatgatgttttccctaaactatgtatctttatttaagatctgatttcaccattgtatttattgaagataaatcattaaaaaatgatctcctatgattatcttttgaggaatataaatgtttcaaccgttaaaattcgatgtttcatgcgtgagagcgatgtgtttcacgtgttttattttttatgtctattccagttcttaggatatttcactggtgctcaacagaaatatttggaccaactgattttttttaagaaaattagggacatgattcatttgttttttttttgcgcattggtaatcctcacggtgtttgaggtcgcagccatggaacacaaggccataagtgaggaggagtaactactacggaaccggtcatccgttacggggcaaaaccctcatctgtgtcagaaaagttcatggtcagtgatgtgaaactatcatctgtatcgggccatgctccgacaccaatgatgcatgtctctgtcgggccccaaataaaacccttcatggataggttctccagcccgacacggatgactcatccgtgacagcctcaaattgagctccaataaagacgttgccctcacattgatggtaggtgtttagagcccgtcaaggatgaatcatccatgatgggctccaaatggaacccgacagaggtgttgcccccacctttgtcggcatgtcttagggcctatcacggatgataatccatgacgggctagtagtgcaacccgacaatgtagtacattctggtgacggttttgcttttgcggcccgatagggatgaggtttttcacaaaaaaattaaatttgttttattggcttgcctcaggcaaatgatagccaagcccactacatatcccaataacccagcaatataatccagcatatccttgctcacattcacggtcacattcacacaagtttcgcattcacaatcaaattcacaagtctcacacattcacaagtttcacattcacattcacatacaaatatatacatttcacattcacatattgaacccacattattatcacattcaaattcaacaatttattacctttctttccttgccaaaatgtgaagcatcttcaagggacaaccatgcatatttattgcaacatgtgaaataagtatgcaatttgaaagaagtgataaatatattacttctaacataaatgtttacaagtgtacatagataaattaaacataatcaaatagtaattgttttccaacataaaaagtcatgacttaatcatatttttcactcaaatctgattaactgatcacgataaatcatctagtatggtaggtgcccttcgaagatataacttcatgtatgatgaagacagccaattcttctctgatacggcgaaattgtgctctggaatgttggaaataacattctgaaagaggcatcaagttagtacatatcatacgcaaacctaattttatgtaatatactaatggccgattttataaacccatgaacctcaggatccaaggaggtcacctttctagcgagaatcttcatctgatgacatacatgaaatacacaggtttcgccggtttgtttcttgcatttgtagttatcatggtgatagaggtcgggtatatcttctcggtgccgaccccctttgttgacatatttctcccaagccgcattaaagtcctccttcatagatgtaaagttgtatttttttttcttattttggagttaaggaagtataccctactccatttttcacttatccaatggaatctgcaacgttaatatactggaagttgaagaccacacatgtgtagtaaaatttaaaattcctaacgtagtgtactattcactgttgattgtgtgctaataagatgaagtcttcatcctagtgggcccttaagctttcatagaagtaattaatcacatcatccaagtgagattgaagttctgcctcattatctcattatctgttcacctggtttttgttcctccgtgcctctttcgaacgtatccttcaaggttcacatgtgtggtcaattagaagcattctacaagtattaatagtatgtaagtttggtgttatttgtacttacaatgtgtagcactttaacaagccggtgtccactgctcgtagcttatagaggtaaaaaagatccgagaaggccactgcaaaataattttgttgccccaaggatggttcttggtcgtggtaacctactatggacgtgtccctcatcttgctcttggagtttgttttctccatgtagtatctatgcagcacttggcaagcagaacccattttggctaactcatggtctgcaaccaatggcacctgttgctgaaatgtacctggagcttgttttttggagtaacgttgacctccttatccagatctagttgtttgggaggtaactacggctcttgtgcctttctttttccttttgatctatctcttgcatgatgcgcccttctttgcaccatcggtggagatgaaatggccttggtgttttgcggaggagggtgaagtttggccatttcaccgaagtccgtaccatggctctcaaatggagcttcgatggccagaggaggtgaagggacttttgtggaagaatctgggcgaggtggagctggagctaaagttgtcctcaaagtgaccttgatgatgatgaggtcttttagccattggatgaagataccacgggattggaagttgccagttcatccaatcagcattcaccatgtcaacttgtactttgacatgtctagccaccaaatctgcaccgcgaactcttgtttatggagtaggtttgtatggttagccctcggcagcatgacaacagaatgtttgtgtaaccctaacttgtaggatgcattgggctacgccctgcatacaatccagaaaaaaatattagtttaagttgtacgaatcacatcagctacaacgagaactactattcgactgagacaggtggatgtcattctggaatcccagttgacaaacaactacttcgccgctgcaggggctcacttgcacttcttctggatgtccgttgtcctcgttcctttttggctagcatctcttcccttatcctagcctcaattccgtgtaatttttcattgaattcatggctaagttcactattgacggtccttaaatcataatatcagaccgtcaatacctgcatataatgaaataaacacatggtatccaacttagtggtaggtgttattactaatcatttccactagtgttggtgaaatatatgtatgcaggtaatttgaggagaaaacacatccgtcatgtgacaaaatgcacctccgcgcattcaggacgcgtttagacggattagaggcccaataagtcaataaaaaccatttagaattgggccaaaacatagcccaggttgtttggggcccattaaccaacctcccgaccgaaggagaggccgggaggagagtttttgggttcggccgaacctaccagttcgggcggaccaatcctggtgcttcctgtcatctgctttcacctggacggctcgaatttctctcctaaggcggttgcagcgtgttttggtcatttcccatacccctaaccgtcatttggagcctatataaggagctcttcatctcacttcaagcacacacaactttgagctgaattacaagaggctctattgtatcttttgtacattagaaataggtagaaagcgaggggaagctctgaaggagtgcccggaagtttggcgctcatccgacttctgcctcgacgagtgtagcttcctaggaggaattctgaaggagtactggagtatcggtgagtactggagtactggccgagtagcttcctagatggctacgaaatcagtcttggctttatagccatggttcgagagaaaaccttctctggtagtatcggtgaaaatccatacctccatcttcaggactttgagctagtgtgttcgtgcctatctatcgtcggcatgacacatgatactcttaagtggaaattgtttcctttttctcgtagagatgaagctaagcaatggtacactctatctgtcaagaaattccactgtgaatgggaggagcttaagtgcaatttctgccttactttctttccattaacccgtgtaatcaatctttgagtagacatcctttcttttcgacagaatgagaaggaatatctcggtgcagcctaggccagtttctcactgttaactcaatctggcccagacttgtcgttacccgaccacgtgttgttgcaacattttcggtacgggttagacaaggagtttgccgaaaatctcaatatttctgccggaggatcgttcgcacacaagacaaccgccgaaggaagagaactcttagatttgatcttagagaacgattctttcggccgaagcgaagccgtcccgaaggtcgagattattcatgaggaacctctgcacgtggagttggaacccgactcaactgtcgaatcctcatcccggtcgcaggagccggaggaagaagaaattcatcctccggaaatttcattccaattcgaggaggatcttttcgaagattattagaacaccttgaattattcctgagagaagagaccaccgaccaaggtcaattctaatgaacctcttgataaatctatgcttaaagagacggtgaagaggttgaccatcatcatgagtaacaaatggttaagagaaggagagctcttatctgaatcgattcagatccgatgcccctcctcaaccattatgtgtcacattggaggtaattcggtccgtgctctgtataatccctctgttggtgccaatattatgtccgcaacctttgcattcgattgcttaggggacagatcgttggaaccaaccgtcagaaccttccgaatttccacaaactctactaccgaaggtttagggattatctctggagtgcccacacggcacaacagtgttgaggtcatattagattttcatgtgtttgaaatatatgatttcgacatactcatagggcatcccatagaaaaactcttagatgtgcccgaaaccggtgtccttaacctgaaaataggaagaattgccacctccgtccctatgttgcaatcaaccaattctttgatggagtctcttcctgttcctgagccaattgagggagtgatggctatttctccattcgagaccctagagtctattttcgatgaatccatcgaagaattcaatgaaggggaggatgaaactggagaaacgatggatctgccaaaaacggatctgccgtcacgagccccaattgagctaaagcccttaccgtcaagcctaagttatgcctttctgaacagcgatgcggagtctctagtcattataagtgacaaactctctgagagggagatggcccgacttatcgccattttagaaaagcatagtgctgcttttggctattccctccaagacttaaaaggcatcagtccgaccctttgcactcatcgcattctcttagaaccgtctagcacaccatctagggaacctcagaggaggctaaataatgcgatgagagaggtcataaaaaaggaagtcttgaaactcctacataccgggattatctatcccgtaccatatagcgagtgggtcagccctgtccaagtagtgcctaagaagggaggcatgacggtcgttgaaaactcgaacaacgagttgatcccgcaacgaaccgtcacgggatggagaatgtgcattgactataggaaactcaacaaggctacgaagaaggatcacttttcgctgcctttcattgatgaaatgcttgagcggttggctaaccattccttcttttgtttccttgatgggtattctagttatcaccaaatccccatctatcccgatgatcaaagtaaaaccacattcacgtgcccatacggaacgtatgcatatcgaagaatgtcgttcgggtagtgcaatgcacccgcgtcatttcaaagatgcatgatgtctattttctctgacatgatcgaggatatcatggaagtcttcatggacgatttttcagtctatggtaaaacattcaatcattgtttggagaatttagataaggtcttacaaagatgtcaagaaaaggacttggtacttaattgggaaaagtaccacttcatggttcgtgaaggaatagtcctgggacatcaaatctccgaaaggggagttgaggtggacagagcaaaaattgaagtaattcgacaacttccacctcctgtcaatgacatgggtgtccgtagcttcttgggtcatgcggggttctacaggcgcttcataaaggatttctccaaaatcgctagacccctaactgccttgctagctaatgatgttccggttgactttgatgatgagtgtatgaaatcctttaaaatccttaaggaatcactcatctcagcaccaatcatccaaccctctgattggtcgctgctgtttgaaatcatgtgtgatgctagtgattttgctgtgggagctgttcttgggcaaactaaggatagaaaacaccatgctatcacatatgctagtaaaacgttgacgggagctcagcttaattatgccacaactgagaaagagctcctagccgtagtgtttgccattgagaaatttaggtcttatttagtgggggctaaggtagttgtttacactgatcatgctgcactaaaatacctgcttactaaaaaagatgcaaaacctcgggtaattaggtggattcttctactccaagaatttgacattgaaattatggataaaaagggagtagagaattatgttgcagatcatttgtcgcgtatgcaaatcactaacatgcagaagctactgataaatgactatctacgggacgacatgcggttgaaagtcatagactctgacccgtggtatgcaaccatcgtcaacttcatggccacgggtcatgtaccaccggtagaaaataagaagaggttgatctacgagagccgcaggcacttgtgggatgcaccttaccttttcagagtctgctcagatggtctactgcgaatatgcgtttcgacagacgaaggcatcatgatcattgagaagtgtcatgctgccccatatggaggtcactatggagcattcaggacacatgcaaagatctggcagagtggattcttttggccatcaatgtatgatgacacaaagtaattcgttcgaagatgcactagatgccagaagcatggagggatcactgctcgagatgcgatgccactgacacacaaccttcaagtcaagctatttgatgtatggggcatcgacttcatgggaactttcccaaagtcctatgactgcgtgtacatcctggtggccgttgactaggtgtcgaagtgggtagaggcagggccgcagacgccaagcacgcccgccggatgtttcatgagattatcttccatcgttttggaactccgcggatggtgataagtgacggagggtctcattttatcgataagaccttccaaaactgtttgcaagaacttggggctcagcaaaaaattgccactccgtatcatccccaaacaagtggacaagcagaaatgagcaacaaacaaatcaagaatattctgcaaaagactgtaaatgagatggggtaggcatggaagaacaagctacctgatgcacttttggcatataggactgcttataagatgcccatcggcatgtcaccatactaacttgtctatgggaagacttgtcaccttccggtagagttggaacacagggcgcactgggctatccggacttggaacatcgacttgaagggagccggatagcacaggaagatgcagttctctgagctagaggaatggagggacaaggcctaccacaatgccaagatctacaaggaaagaaccaaaagatggcatgattagtggatcaagcacaaggaattcaaggtaggggacaacgtgctgctgctcaactcacgggtgaagcttttcggacatagaaaacttcgaagtaaatggatgggtccatataacatcgtcgatgcttcatcacatggagccgtcacgctgcgtgacaacgaaggtaacatctttaaggtaaatggccattgtttaaaagttttccttgatccgttagaagttgatcatgacttggatgttgtgaatcttgtctcttttagcttctacccggagtctttaggtccccccttgatccgttagttttcaatgccatgagtccttaggcctccctctagttatcttaggtctagctttcatgataaaaataaaaaaataaaaaaaaataaagttggctccttggtcttccaaccatgtgagccctttttgcttcactcttgtctttctttttcttttttgtgtccaataaagcctctcatatacgaagacaagtgtgggggtgatcttgcacatcaacgccgtaacaaaagcaagatcaccccagacgagctatgacaaaccacacacgggaaattgatgcagttagacctagtgaggggtcagccaaatctccagttcggctaaactatctctaccaaggatcattttctattttatacagagcgcatgtttgcacaatttttcctttggacatccattctatcttgagtttaatttgactatcaattctaaaatatcgaagataattaaactcaaactagggatggtacaattagagttcatggtctccctgaaaatagcatgcatgcctattattctttgctcattacttgttgcttgtggtgacttatccaatagggaccccatgctatctaagtaattgatgaatgagatatagtctgatgatagaaattctgctcttcatgttgcacacttgggaattttataaaatgaaaaaaaacttgtataatgatgctaaactgctcattgatatttttattcccacttgagccataggttgatcattaataattagcttgctacatacgctgcttgtcattacattgagcgttgtcaagttttgtgaccctagtgaaatgcttttcatactttcatggtcaagatcacacacattccacatacacccacctattcttgacttctacactgcaagttagcattcctcatttgtcattcatttcatccatcaaataaatactcatacaagttctttcaaaaaaaagttgagagagaggcatggctatgcaaaaagaaagaaaaaaaatgctcatacaagtattgagcatgatgatgagaaaaaaaagaaaaagaaaaaaaagagatagccatgcactcttgaaattttcaaagagaaataaatggaagaggatgtatacaaaaggagttattgattcattttttttccacccacaaatttaccatacacatacacatacacatgcacattcttgaccagaaagtatgttttgtatttccgtggatccattatttgactttgcaatatatgtgatgcaagtaatgctctactcttttccataccctgagctccacaaaagccttattagatggtaggaaaagaaaaggcacaatcatatgccttgtgaggaatcatacactttgagcgatcgaaagaatcaatggaggagcaaagcatagttataattttgtgttacctcaaaaaccacaagttgttcttcatgaaaaattagggtgacttaatgtcaagattgttccatttctcaattgctcaagatcgcatggtagacactataaagatcgacaagtacaggtatggctttgaataatttgtttgcatgatgattagttaggaagtcataactctgttgtagagtccatagccttcactcgggatgagcaaaggttaagtgtgggggtgttgttgacggtccttaaatcataatatctgaccatcaatacctgcaaataatgaaataaaacacggtatccaacttagtggtaggtgttattactaatcatttccactagtgttggtgaaatatgtgtatgcaggtaatttgaggagaaaacacatccgtcatgtgacaaaatgcacctccgcacattcaggatgcgtttacacggattagaggcccaataagtcaataaaaactatttagaattggaccaaaacatcgcccaggttgttgggggcccattaaccaacctcccgaccaaaggagaggccaggaggagagtttttgggttcggccgaaccaatcctggtgcttcccgccaactactttcacctggacgtctcggatttctccccttaggcagttgcagggtgttttggtcatttcccatacccctaactgtcatttggagcctatataaggaggtcttcatctcacttcaagcacacacaactttgagctgaattacaagaggctctattgtatcttttgtacattagaaataggtagaaagtgaggggaagctctagaggagtgcccggaagtttggcgctcatccgacttctgcctcgacgagtgtagcttcgtagtaggaattctggaggagtactggagctgttggtacactttgctctaggttcagagaacttcttctattaagtaagcattcgtgttcctttcttatgttatttaattacttagtctgagtaagatatatttccatctttgcaggttcattatttagtatttatactaagtgctctagtactaggactccggatagagaaggaatttcctgcgcaagtattagagaagtaattaataacttaggcctggtgtctaggttagagattacctttgtttgttgtgtatcccacggatttgtcagaggtagacggcaggtggtgacagccctgaattccgtcctagtaatcctccatgttcgggtacatcatagagctatagccggaaccacactgacagaccagcaggggtcggtgcccgtagcaacagataggaaattacctttgcttagcttagataattaaaacacagagaaagtcctctctagcctgcctacctatagttgttgtccttggatcgtcttagccctaggtagattacacacattccctgagtttgatatccttttggggtcacccgaaggtgaagtgctacagcggtattccgtgcgcttgtggatttatctttggtcgtaagaaataccaacattcacccatgacctcccttacaatatgttctctaagatgatcttctgtctgttccttagtttgtttaacctcccttacaatctattctctaagacgaccctctctttgttccttagtttgtttgcgcttcctgtgttgtgcgttgtacttggccatcccaatgttccaaggaatgttgcatcctgtccctctagtccggccagcctgttgttggtatttcttaacgatattactagaaatatgaattcccagcaatggcgctagaaatggtcctggtatatatatggtttacagaaagaatccgcaagcgcacggatttaccattgtagcatttcacccgggagtattctaaggtatcgtatttatttaatcgcaagggaagattgtaagagagaactatgctaataatatatatacatgccacttacataatcaaagtctaagcatgggttaaaatatttatatgggtagagtgacacgaagcaaagcactcatatttcttctttaatcatttctgaactaagtggaagaagaaatagaaaaaacaatcaattcctataattctaatatacactcaactttagtctacatctactagtatacaaccatatagccaataccccctaacagtgccctcctggtgcttcgagagactaccccgggttgccgagtttcttacgacaacctaccatggccgtccaacctaggctaaatacggaggagtaccctccctaggaaagtttcttaggattagatactatcgtggaggaatacccgtactgagctgtcacaattagcagcccacctttactgactcgtagcatataaacccagataatgatacttagtaatctagacaccctgtctacattattaaatactactctacatccctcgagatgacatagagcaaccgagtaatcggacattaaacccacaccattgcacctctctggtaggctaactatatgactgtaccaatacaaacataaagtaaagacaatacttagatgaactaaagtatcgagagcatatgaagaagaattgatccagatctacctatcaatagtacattgttctttacttacagatcagaacaaaaggtgagctcatttctctctaagtctatgtgtgaaatatatgagaatttgatgctacataatatttcgcacttgagagattggaacccttggctggcataaacaacatgtgggtccagtcggaggtgaccgttgtagcggcgtacatgaggaagatcaattgctattctgttcatgaagttcatggagaattctgcattgatgagaaggctttcaacatgaatggcttatatactaggaaaggttatcaagtccactttccatcggatcaaacggcatgtcattccgagctttctaccaacggcaatctcaagttgaagacatcatgtgcgggtagaacgggcaacgcgcaagtaacaacaatggtgatgaacgtcggctttgaacggcatgtttggatggagttatactatcctatggcccatcttgggttgggaaggagtccatctataatttctccatggattgaagccttccaaagcaaggagtttctagacaaggaagaaaagattcagttcggactcggtttgggccagcctggatataccaggactaaaacgcccgtttctgtctcgtccggagtccgttttggacgtgtgagcacttgttgaaaagctaacttcatgacacacttggtggatagggcctaggacacaaattccttctggtttcacctcaagagccaaatcaaattgacggtgctgcagagaggtttctatattgtgttgtatttgattcgtagttagtttctaacacatgtaatggctatatatgcctttgtacacgacccctgagggcagaccaagtttaatcaaaagaaaatttgcagcaaatttagtcttgttcttcttctagagtatttattccgtggatgacaaatgtggtatatggtggaatggagtgtatgtgtcacgcctagagattagacaacccgaatcaccggctatctgtgcatttaacctctatccaggcatcaagcagagtacacagatgataatttgatacagttccacgtcttacaaaaatataaaaaaactcagaaaagcagcaaaaaaactaaagaccatctaaacttattcttctcagcaaagggaagcttccaccataatccacaggcaaaacctcgacgtctggcacaagcctaatcttcatagaactcaccatccgacaaattctctgcctctgggattgggaaaaataaagcaaggctgagtaccaccaccgtactcaacaactcataccaaggggaaggtatcatgcaaggatattcaaaggaatggctgataggatatttgaagtaagaagcagcatttataaatcataagttgaaagcagtaaaatagtagataattaagtagtattaacatcatcactatccaacgctaaaaccatgttatgataggtccaacccaaaccacctgaactacaccagttcattaggtcaaattattaaggtgagactagtcacggtgagctggttgaccgcccaataaccgcaggcacggctattcaaatagttttactctgattagagtgtacaactttactcacaagacacgattccacacatgttaccatgccccgaagtaccaccgagatactacaaagggggaaatcatgacaaaccctccatatagcctcccctaaccaacacacccacctccggtttcacccccatccctatacaggcaatgtgcagtccctgctcgtgccaaggtaaatccggaaggagcatagaccaaaatccaggtccatctgtactccatcactgtcgtaggctctccggaccttccattataattgagagatgaaatgaataactaaaatcatcaaacaagtacaatgaaatatccgacgcctcaagagaggaatattggagacattgctgggcctttagcctgccagtcaacttttgcctgagatgtgctcgtcaaaccactcgaaggcagcgaccagatgtgttacacattcaggagacttgacaaaaatggctaaagatctacaacatctcaaatattcttaactcatactcatgtgaatctagctcccaggatgtgcactagactcacactttcatctcaatcatagatatacatagcaaacacaattaagatgaaagtgattataaactacatctactttagttacattggccgaccggccaaataaataatagaacaacggaagcttgtctacccaatccacaagtgcaccgactagcggtttaccctagaagaagcagtcgattacctgcatcactcaaagactaagtctaaacctgcaaacaaaaggttaattcaacagcaagagtcagtacattatttctaggacttgcctaacactctacttgcaaggcatataatcaaagaaggcatgatatggttctttttagcataaagcaagttttatttgtataaaacatttccaaatcagttttgctttcaaataaatttcagcaagcaagtacttgacatattgggcatcaaagtagtcattaatcatgtataaatatacacctcattgccatccatggtagcaaggagatcattcacaaatctcatcacattttgaagttaaatttcagaatttagaagaataaacacaagtctatactcaatacatatccacacgccgctcatgaccgcgagcacggctaatcgattagttttaactctgcagagtttctacactttacccacatgatgcgaaataataatcatgcaagagcatggcacgcgataaataaatacccgatttattacccgcatcaaagcttttccaaaattcatgatttagccttacaccagcacgatacgtgttcctccatcctagtcatactggaaatatgacctagaaccgttaagtggcgggcccacgccttaaacttaatgccatggtggcggacacaacgggaaccctccacgtggcacaataccgttgtattggacacgcttagtcacctaaactaccacttcggggtaaatatgaagctcctctaaattattcaaactcatacacaccggcctaccagaatgtaaggctaaaccataaataatttactaagcttgggctatcccatactagcacatgtggttgtactgtatacgaaatgaactgacattgagtgaagtccttaggtcggtttgggcgcacactctccccctatcggtacacatctaatcaccatatatgcaccgcttgaggcccaaacctaaaatccatgttttccaccattttatttatcgaaataataagtattaaagttctgtccagattatttaaaaatcaattttcatgtttgtaatgagcccataatgacaaggaagaccattctaagcatggctaagcattatagtaacctagtgtcaccaaaactcatatataaagtggtatagtcatattgctcctaaggttatgaatgagggatatagatatatgtggggttaaggtgataatgcaaataataggagtttgtctaacgagtttaacaaaattttaatttattagtgtacaatcgacatgaaagatttgcaaacattttcaataacctctaaaacataggttcaaagtgatcaaagagagggagctgggacttgccttgcaactgaaaaatgtcagcacctaattcacttcttcaccgtttaagcaatcatctatacaaagtacacattatgcaattaaacaccgaaatatgcgaaaattccaaaatgctctaaaatgcttgatttgtgcacaatggataggtactggtataatatgaatttaggtgaaagaatttctattttatctctttttatttgagagttatgaattttagaagtttgctcggtatagggtagtatttatttaggtactattgtgaaatgctgttgtaaggtgattcttattaagtttatgtttgctgaggtgaagatatgtgttttctaagactaacacatttggtttcataatttagagttaatatgaattctttatgtattttacaagttttagtgtgttctaggcatatagtctttatgtgcacatggctttggagatttagatccagaacttgctctaacttgctagtgttgtataaaatgagtattttagttaactaatctaatcttagttcataattttagagtttatattattttactacacattttataaatacggatgttttatgttagttacttaacttatcaaccaaaagattgttgcatgagctaagttcatctaagttttggtagatggggatggaactatggctccactggtcctaacaagttttattttgatttatttggagctaccatgcatatatatacttattcatatgtattgtttaaccactattatgcgtttagtacctattcttccaaattaaggtttagagttatggtctgtacaaccaaattaaggtttagagttatggtctgtacagagggtgccataattcactctactaggttgaagtatattacttgctggttctacagaaatttggttcacttcatttagactaaagatgaattttctacaaattttacaatttaaggtatgctccatgttgcttattccttacataaatgcttaggggttcttattatactgtaagtatgtctttttattttataacattgaagtgcacaactctgtaattctatagaacttgagtttactcaaaaaggatctaagatgaattttatataaacttctaaatttcagcttatgcaaaactagttattttaaagataatagttttagaggcatttgatgtaaagtatgtatatgttttattttactttgtttttagggaacatgttggtggatatgtagaaactaagttttctctaaaatgagttgaaatgaattttgtttgcattttataagtttgtatatgctttatgtatgatttatcttagaccaaatttagaggctacatttgtactgtgagtgcaagtttttatgaaataacactaatttcatgattcgatgagttaacagtaatttgtattactctaaaacgagttgttttcaatttgttaacgattttacaagtttacatgtttttctgatgaaaatataaagctttaggcatttcatttagatttttccagaatttaaatagattgggtccacaggtcagtctcaagccaatatgcagaaaggcccttagtgtttcaggaaatcaacccgcagtcctgtgactgttctgtgtgtgaggtaggttttacaaagtagtacctagagttttgattcttctcaatcgaggtccttagattgagctgacacagagctagccatggccgagctcattctcgagctcgctggcggcaaacggcggcagatctcggtgtgcaacctaaggagaaaatgtaaaggggttcaaggtgaggctataggtggtattcttgcaagcattggtcatcgaaattaatggcgacggcggtgcgagcggcggtggttctcgggtgacggtgcatgtggagctagggcattgatctaaatgtttatctacatgcatgtgcctctatgggatcctaggatgcttaccgagcgtccaaagaaacttggcgaggtccagatagcgatgaccacgagcagaacgactcggcggcggcaagaacctccaggttgaacggcgacggctcaatcggctccaagaacaatcatgcatgtatgtccatgaggttattgaggccagagagatggtgtgtgcacgagtaatcgaataatggctcactggaggaggcggaatcgacaatggcgacggcgaccggaggtgaagaagacggtgggccgatctccgcacttgttgcgccattgcctgggattttttgaggggttttgaggaggacttcaaggagaagatgttggcgcgacggctcggcttggcttggtctacagcggttggaatgacgacgagaacccgacggctggcactcggtgttcgctccggagcaacgatggcgaggtccacgttcccgacgatccgcggcaccaaatgggatgaaacttagaggaatgaaatcagcttggagaggtgataatggaacgcaagtggaaaggcgacgaccgcggcacaatgtcgacggcgacggccgtcgtcttcatggccgatggcaaggatgagggcagcggaggcgaggcgatccctctctctcgatttggtctacacagaagtggtaatggagaggaggcgatgcagctaggaagagttgaaagcgagctcggcgttttgaggatggcgacacgtcgtgtacacgtgtcagccacgcccagaacgcctctcctccctctctcacgcctgctggtcggttaaaggagttggacggggagagggcaagcccaagtggctgccaagcgggcccaggtcgtggtaaactaggtggaagagagaggtgtgggtagaaacatgggtgagtttggtttttggacgaatttccggaattattttcctcctctaactttgtagcttcgtaacttaatgtgtgataacttaatgtgtggaccacattaactagtgttgattttactggaggtagatgattatacctagattccattttatttggttgcacttaaaaattatggatagattactcacagaaattaggagaagaggggctctttggaaactagtttggatttttaggagacctaaaaatagaagataaattctggaaaaaaaatatatttatttattataattaacctagtatttgaataaattattttccctatacgcttccatgcagctaaatgctcttttagacaaagtatggttttagctgattaggaattataattagtctattatttgagtggtttgactgatttattcgaggtataaaatttagttatgaaattataccaaaattacagtgagttgtatatgttaagtagagcctacatgaattttcccacgattttatcttgcacgaattattttagataattcgcaagacttatgtcttatatgtgtttccctttcctaaatgcatgtaaatgtttacaaaagttatatttggactctcaaaaatggaaaagttagcttccaactattttgactggaaacttttaaggtctaaaatttggatatgttataatcacgcccacccttgccaacggtgtgttagctagaaaagatatacttaagatttagcctggagcgcatctggcatgtggttagtacgagtatatcttccagtgattcctgagaaccggtcgttaattgtcatgggcacaaccaccaatcaaatcatgcatgtgcccacgacccaccattatagcatattttaattaattaattatataccaaggtggtataacatcatcataaaaattaaggactaaaatatagtgaatcccattgtgagctagttgatcttagcatggctaagcattcctaaaccaatcatctagtcaaattaatatcccaggctaccgatgaatcagggtattcaaaagggctgagtatggtaaattccatcccacatgacattataaaacaatgcaattttaagagaaaagcagggattttgcaagtacgctcaatatgatcaatgatatccatatgacttgccttgctcttgagctgacggaacctcagcgaccactttaaaataaactggagcgacggaactgctggagtctaaacgacaaacaaggcacacaatgaatacaagttaaaagctactgaaacagcaaaagaaaccaattttaatggattcttgacgtttaacgaatttactgcaatttgaatgggttaaaatggagctcggatgaattagatatgaattttacaaggtgaactcttttattactaataaccgaaaaaccttaatcatttgacatagattattgcccaaaaggaaatatgatcaaaggatagattaacattggtgagcgaaccttacgagataccgactcaacgagtcaaatctacgtgacacgggaccatccaaatgatcaaccgaaaccggcgaacgaaaccggcggctctgaatggctctaaactaaggaacgactcaacatggatgaacgaacgaaacacggggcgacaccttgttcaaactaatgagcgagtgactcaacaatggctgcggctaaatcggtaggctagacacgatttagggtaaagcctcggtacggcaaacgataggccggtaggaatttgtggttgcacttaggtgttggtatttctgacgatcataaataaacccgcaagcgcacggaatataccaatatagcacttcacccgggagtattcttaggtatcgatttccacagggaacgtgtgtgctaactccggttcaggttcatccaaagacacgaagctatggataggcaaaggatagagaggtttcaccggtgaagaacaatgtctacggaaagcttaacttcaatcctaatgaggtacttcgggcactggccagctcactgctcccagatatcgctgtactgcacacccggacagggaggacttagtgatattgagggctatcaccacctctacacccacctcacacctactgtgggatggggagcaaacatcggaaatcaactacctagacaccgcatctacgcagttaataactactctagtgtttataactcactaaagcaatcactatagtttagttgattatagtgaacgatgatcccacactctgaataggaactaaccaataaataattcttaaagagcaaaactaaattattcaaaagatatttcaattataatcagagtaataaacagagcagaaagaataagaggaggattaccgacaactccggagctcctccgaaatcttctactcaactctctccctaatcttgtataaaataaagtacaatagatcctcttataattcagctcatgcttcaagtgtgtgtttacaagtgaggatgagaggggtatttataggtagagaagtgccttgggagtgtggagatgctccaagcattcaaagagcatcttctctcatgtgttgccaagtgtcccattctgatgacggtttctaccggtattaacgccataaccgtcaaatggaagtggagcactaccgaactgaacttgggcctaggccagcagcctctgtcagggttcggccgaaccctagccgactccattaacgccgattttcggcgtggacattcattttgggcccctcattctattggtatggatggaaggcccatttggaggtgtttaattgggtttctgggtccaaaactccatatgttcatatacgcttttgattctcctcctccttcaggtatatttcttctcaacttaggtagtttgtcacttgcatacgaatatacacgaacactcgtggaaattgttagaaataaaccctacaactatgttggatgtttatatttatggttttatgcagatattgatggcttaaattttgtatttaacagccgtcaacaaacccacacacttagctctttactcgtcccgagtaaaggttaaggattaatatggaataaaatttcccaaaatataatacaagtacacaaattattcttagccatatctgcacctgtgaactttgagtatctaacttaccatcttgggtaattgataaatggaacggtcatgactcaagtccttcatgttcctcctgtcaatctcttggggttttcatatattttcacaaagtagctatactcctcaatggactttctctcaaatcactcatgtggtttgatttgtggatcttcaccaaggcatgtttgtcaaaatgtctctattctaaaaggctagataggtggagcttggtagggatcaattggggcatacctgcatcacatattgcaaagccaaaagaccggacccaaggagatagcaagtcatactctctgatcaagaatgtgcatgtgtgtgatatgtgtacgtgtatggcaaattctgtggatggaaaaaggaaaataaaagacaacaactcctttcgtatacatcctcctccaattttctctctttggaaatttgagagagtgcatggctatcttttttcttcttttttttttcatcatgccacatactttgtatgagcaagttttttttctctttctttttgttttcactgctccatacttgtatgagcaaggctttatttctttttcttttgcatagccatgcctctctctatctttttttcttttgaaagaattttggaggaaaaggcataaatgacatggagtttttattttgtggataatagataaaataaataatggaagagagatgctagcttgcagtgtagaagtttagcataagtgtgtgtatgtggagtgtacgtgatcttgatcatgaaagtatgaaaagcatctcacacgggtcacaagaatttgacaaagctcaatgtaatgccatgtagcctaaacatatatcaggattttgtaatgagaatcatatatggccttggtaggtaataatatagtcactgaggagtattgctcgaaaagaatttttgattttcacaaaataaatcccaagtatcatgacagttggacatgaatttctattgtcataaccatatcacatatatcaattacttatattagcaaggttccctatgatagatggttgttcacaactaacaagtgttagcaaagaataaaaagtatacatgataaatcattggaaaattctatctgttgagtgttaatgcttcaattttcatttggagccaaactaaattgtgttcaattttctaccaaagtttaactcacaatcatgggaggtgtggagattatgggtaccccatacccacacgatatggttatccgactaattataggggataacttgtatctatggaatatgtaacggatcatgacatgggtattacggtattacgtttccttgtatattatggaatggcctaaagtcctggtttgctaattttgtaaagtagatttagcaaaccgatactgcattggttaaggtttctatcttgtaatcttgccccccatgctatataaggtggacaggaggtcctctaggggggcatattcacatatgatcatcagatcaatactacacctggcggattcaaattcccaaataggagtagggtattacctctcatcgagagggcctgaacctgtttaaatctttgtctccacatccatccacttttaggtctcgtgcgctaccccattttattgttgccgaattcttgtttcgacaggaggataaggaaggacacctacaaacctgactacacggtgaaggatgacagcaccgggctaggcaaggggcgagagaacacttggttcggccaacccagctaggacatggttctggctgctgagttttgtgcgtgtccgtgggacaatgttcatcatgttgtccaccggggtgaaataccggtgagccaaattttattcaagtaactcaaggcacatgaagtgcctaaattttttttttatttattttcatattttttcatggcaacaatggaggttatgggtaacttagcagggtggagatatgaggcgcggatgcacaaggtgtttcagatacttaccagacggatcttaccaaacttagaactgaattgaatgcaacgaagttttgcatttgttctacttggttccctgtgcaacaagcttcacagctttctatgataccaaggagcgtgggattggtgttggagttattgtacaccgctccttggttgtcactttattccctgcaaaaggttagtggacaacaaatactagagggactacaaagaattggaaagattttttcatagcctcaagattaattgttaacatctacgctaaaaaggaattggattcaaaacttaggaagcatggatcccacaaatttgccataattttattttgtcttcattttttttcttcgagagacatttcttttattctttaaaacattttttttaatgttttattgttcaccaaattttcattaagcaaaaactcatacaggacttacagataaaattgcacgatcataacaaaggagcaattgacagtatacttactttgcaccttgaaaggtgatgtgttactctctttgcatgtttgcaatttattgatttgtttcccgaaccctgacttacctctagtgtgaattgaacttgaggactcacccatgaatttgaaaactttcctgcagggggttagtccacaaaagatatgcatctgaaagttcattaagcaaatttgactccatgtctaatttgattaaagcagactatctaaacctatagatgtcttgcgcaaacacccaaaccagagcatatgcaaatagacacaagaaacataacccatgtatgctcaagcctcattcaaataaagataagtatgagtaaaagatgtggtgaatctttcgctaccttttgtatacctaagtgtacttaccgccagcacgatgtgtatgttgaattctctggagcggtgctatggtcgcatgtaattgtcgatctcccatcagtcttgatgcggattgtggcaagggaaggctgatgaggacacaactagctcgcatataaccatgactaccttatgtattagtcaaccaaaggtgcatatgttctacattagatttacttgttatatatttgaacaaacgttgctacacaatgagttttgtgtgttttcgtttgcagaggtagttgcttgggcgaaagaaaagagaccgagcataaggaatgcatggatgattgaagaagttgattggggaccaaaccaagaccttctcctagtcttctttcatctcaccacgtcacttttggtccatagaagacaagaaataaagttccacacgttttgggttcggattcaggcctcctgatagcaccaacttcaaatggacctagccactgatcaagaaggaattttggggcccatgagtacttgttggaaagcttatggagtctaatttcagatggttttggtcccacgtcaaaattcctaccgggctgccgggaatctgcaaaacaagccatgtacctcatccaatctgtatctgatttcggttttgggccttgtaattgtgtcgtgggctcccaagggggtgtgcgccctagggcaaccctaggacgtccctaatcataattaatcagtagccgtcgtcgtttagagttgggttttgcttagattattttgttaagaacagtttcgctgctagatcggtttgtggaaccccaaattcgagtgcttaataattcatatgcaattgtgttgcaatctatcttgttcttgcttttgttcttctattcgcatgcagggattagccttctcggcgaggtcaaccaggtttaggcacggttgataaccagaggagacgtggtgctgcgattgcggggcttagtagcgtattcgttcagaagccagatcgagttgtgtcgcgactccgcccaaatcgattgtttatcaatacctatcggaagattaggacctaactccctcatcagttggcactttgaccacaccaactcaggcgagtggttcggttatgcacacaactcgggtgcatgaaccttatgccttgaaggcgtgttccattggtagaatgctgtagagacgtagggtgcatctctttttgggcaaatatgcaagttccaactggagtggagtagcaaacacctagaaaagaagagggcgtctcctcttgcttgtgtgcgagtaggtgctgcgggagcgagaacttgtgcacaactaggagtggatgaaggctaaccaaggcggcacatgagctcaagagaggggctgggtgcagccaagaagaataatagctactggcgaggtgtatagccagaaaagactcgcacataatgcggtctttgatctagatcgtcagccctcttgctctcttcctcttctcccattcttttttttcttcttttcttttgtctctcttttctttcttttttttttcttccacacttttttcagcaaggtaagactaacaccagctttaaaccaagatggcctaggttgacgaaacccgccaggaagagcttgtcgacctccctgcctcacacttggacttttgtgtcatgagacgtcaaaaaccaagtatgtgagactgggatcttcataaagtgtgttccaacacatgaacagttgatgtagctcccatgttcttaggcatcgtacgtctctcgttcttaatcttcacctgaaatggttcttgcttttattggaaagaaaacttactaagataatccggggtgtctcccggtagtgttttgtttgtggtcacaagctcaaccattgagacatcatgctgcaagattagtgtgaatacaaatacgagatttgcagtatttatgatagttaaaagcatccacaaccacacttcaaaacatgttagaaatgagggtcgtaaggtggttgtggtccttgtacaatgaagtggtactaattggacagtactctggggattccttatgagagcatgtatcttggggaactttgaaagagaggctttcatgctcatttgtggagttcgcatcctctagagttgatgtctcaaacttgtccttggcctgaaagttctccattgaaagaacggggttgtttcttgacaactgtcgagaacaacatcttgagggccaaagggacaaggctttcgctcgattggaggttgtgatggtggttctatggagtgtaattcaaaagtctcgccagaatcttctttttcaatgaaacaaagatcatcctgttctagaatagattcaggggacacatgaatctatcagggggatgcctatcaaggttttgtcataatcgctatgaggatcatccctgaatttaggagtgcaacctggagcttgatttctttggaatccggagatggctccaaggaggactctttagtcagactttatgatattgcgggcttagattcaggttcggcaaaagaaggttccttccttcctgacacaaatgcctctggacggggctcaacacactacccggcaaaggaggtattttccgatatgcgatcgagaatttccttgccttcgcgggagttttgtgcatgaatgaccctccaacagttatgtcaaggtagaatgcagactccctatctaaacccatatggaaatgttgcaatagcacgtaatcaggtatagaaagggttgggccagactatactaaattagtgaatctggactaggctgcacaaatcgattctctatttatctgctgaaaactcagaatttctacacgaagagtagtaatacgggttacagggaaaaatgggaggcataacctgtctcgcaatttctcccagtcactgtttgcacacccgacggtaaatatgtaccattgtttcgctctcccatgaagtgagaatggaaataatttccaccgaacagtctcttgcttcatgcctcgaattcctgcagatgatgtagcggttttcctggcctaaaccatagaaagatttctccctaaccatacggatgaattcgagacgaatttcattgccaggtgttaaaataggctccgatgaaggaggtggctcgtaaaattcgccctgaggagcagataattggaaaatagattgcggctccatcggttgagaaggtttactggaatacttctcggggatagcaggggtaaaggtagaagtaagaaaaataaaaaggatacgaggatgaacaaggttcggagatagacaacaatcgttccccagcaacggcgccagaaatgcttgctggtatttcttacgatcacagataaatccgcaagcgcacggaatataccgatgtagcacttcaccgaggagtattctcaggtatcaatttccatagggaacgtgtgtgcttactccggttcaggttcatccaaggacacgaagctatggataggcaaaggatagagaggtttcactggtgaagaacagtgtctacggaaagcttaacttcagtcctaaggaggtacttcgggcactggccagctcgctgctcccagatatcgctctactgcgcacccggacagggaggacttcagtgatattgagggttatcaccacctctacacccacctcacacctaatgtgggatgtggagcaaacaccttaaatcaactacctagacaccgcgtttataactcactaaagcaatcactatagtttagttaattatggtgaacaatgatcccgcactctgaataggaactaaccaagaaaaaattctaaccgagcaaaactaaattactcaaaagatatttcaattaaaatcagagtaataatcagagcagaaagaataagaagaggattaccgacaactccggaactcctcccacttcttctactctactctctccctaatctaatacacaaggattagattggaaaggaggaatcttagtggaagtaggattgggagagggggagggagttggataggagggggagggagttagacaggagtgggtggggtgcagtggcgcgcgcgcgacaatggagggagggaggcggcggccgagctaggagagggggagatggggaggaaataaaagaaaggaagaatggattaggactttcccaaataggaaaaatcaattcggtgcggcagcttcgaattaaatatatgatgtggtctcgctcattttttaaggccgttttaggaagagaatggaaacgatcccgcaaacaaaaacagacacggttcgccatgcaaaacgaaactacgaacagagaggggagtgaattaggcacaattcacgaccaaaggcacaaggaagaattattattaaggtgatcttgacacttttaaacttagcaacactgcctgacaattctgattattaaatatattgttaattagggttttctcctggttaaccaaagcaatttctatagatcatttattagtgacttggaacctaagggaagggaaaactccaggtgtgacaaacctatcccccttaaacagaatcttgtcctcgagattcggaagaactggtgaagagatggggatgggtggctttcaactcatcttctctttcccaagttgcttcatcttacgaatgatggctccactatagtctgcaaaacctgatcactttatttctggttctcctctcactggtctccaaaatacatgtaggcttctccacataagtcaaatcctcctgaatctcaacattatctggacttgctggttcctcaagcacacttaggcatttcttcaactgagatacctggaatacatcgtgaatgctggccatgttaggtggaatttcaaactgatatgccacttcacctctacgttcaagaattcggtatgacccgatgtaacgttgcaccattttcccttggtctgaaaacggtgcactcctctgagcgacataactgtaaggtacacttgatcaacaacctcgaaactgagctctctccgatgattatcggcattgcttttctgacgggattgggcaatcgtcaatctctccctgattgctcttactttcacttcggcctaactcaacacttctgtaccaaacaactgacgttctctagtttgatcccaaaacagaggcatacgacactttcgaccttaaagtgcttcaaacggtgccatgtacaaactagcttgataactgttgttgtatgaaaactcagcatacagtagattcttatcccaagatccaccaaaatcaagggcgcaaactctcaacatatcctccaaaatctgatttacttgctctgtctgaccatcggtctgcagatgatatgctgtgctaaagttcaaacgggttccaagttcctcttgcagcttatgccaaaactttgacgtaaactgacttcctctatcagacacgatcttcttcggcacaccatgcaaacagacaatcctcgaaagatacaactctgctaacctctttcctatataagttgtatgaaccggaagaaaatgtgccactttcatgagacgatccactattacccaaatagaatcatgacctgatgatgtccttggcaatccggttataaatccataccaatttcttcccacttccattctggaatctgaatagactgcaaacctgctggtctctagtgttctgcttttactcgctgacatacgtcacggagtgctacgaattctgctatctctcttttcatactgaccgaccaaaacttctccttgaaatattggtacatctttgtgcttcccggatgaattgaatattggatctggtgagcttcactaagagtcaactccttcaactctttgttgtcaggcacacacaatctttcacccatccatatcgttccatgttcatcctcagtaaaatctcgggctttatccactcgcatatttttcttaagctctgctatctctggatattttgcatgcgcaacgagtgtcggctgtgcttccaaagcggcaacaaaaccatgttctacaattcccaaattcagacgttctaggtcttgtatcagttgagtacttacttcttctaagcatgttgcattgcaataatttttccggcttaacgcatcggcaacgacattagctttaccaggatgataatctatacacacatcataatctttgatcaactctaacaatcggcactgacggagattcaaatcgggctgggtgaagatatacttcatgctcttatgatcagtatatatatctcagaacgattaccaatcaagtagtgtcgccagatcttcaaagcatgaaccactactgctaactccaaatcatgagtcggataattgtcttcatgtgtacgcaactgacgcgaggcgtaagcaacaactctaccttcttgaataagcacccatcccaaaccttgacgagatgcatcacaatacacttcaaaatcctttctctgattgggcagaatcaaaattagagcggacactaatctcctcttgagttcctcaaaactctcctgacactgcgaagtacgaacaaacttttcctctttcttcaacaactgtgtcattggcttggcaattctcgagaaattctcaatgaaccgacagtaataccctgtaagtccaagaaaactcctcacttgcatcactgtcttcggtggaatccacttagtgactgcttccacatttcacgaatcgactgctactcttttagtggtaataacatgccgaacttgacttctttcaaccaaaaatcacacttgctgaacttgggatacaactaatgctccttcatcttctccaacactacgtgaagatgattcccatgttcttccttagactttgaataaaccaagatatcatcaatgaaaaccacaacaaactatccaggtattccatgaacacattattcatcaaattcatgaagaatgtgggtgcattggtaagtccaaacgacattactatgcactcgaacaattcatagcgagtcgtaaaagttgtcttaggaatatcctcctcgcgaattctgaactgatggtaacctgatcacagatatatcttcgaaagcacagttgctcccttcagctgatgaaacatatcatctatccttagcaaagggtacttattcttgatcgtaacatcattaagcgctctataatcagtagacatcctctttgtcttgtctttcttctcaacaaaaatcactagagcaccccaaggcgatgtgctgggtcgaatgtatcctttctgcaactgctcatccacttgcttcttaacttctgccatttcttcggctgccatcctgtacggtctcttgtagatgggagctgtacctaggaccaaattgatacggaactcaatgtctttctttggcagcatagctgtcgactcctccaaaaaaacttcagaatactcacaaaccacaggaatgtcttctaactttgggacatctttcatgacttcatcctgttgttcactttccacttaattcaagcttacttctttcttctgaataaatggagattgaattactaccacttctccatttcaattaaccaacgtaattgtgcggcttgcacaatcaataactcctttatgtcttgtcaaccaatccattcctagtatgacatctaggtctttgcactccagaaggataagattggctagaaaaggtgacccttggatttctatcatcaaagaggaacaaaaactaactaatgttaagctattacttggtgtattaactttcatgggagtactaagttacacttttcttaacccgtgtacccaaacaaatctcttggatataaatgaatgcgtagcaccagaatcgaataaaactgtagaaggaattgagttcacagggaacgtacccaaaaccacttctgacgctgcttgagcttcctttgtagacacatgataaacacgagcttgaacgaccttgggtccattgcgcattgttttagggcacttatttgcaaaatgtccggtatctccgtagttgaaacacataaggggcttttgttctgacttcttctttggctggtggggctgcaaagcttgagactgggcgggcgcggaactggattatggttgttctgatttccactgttgcctcggctgaaatttcctagctgatatggcctgtgctatcgaacaatcataatagtagaaccactgtgctgtccataaccacagcgatgcttctgctgtccaccttgctgaaacctgaactgcatagctttcctcttgcgatctatcttgttacgttgatcttcctaacgaatggtcctgtccacaagtctctcaaaatcagcatagtctttagaaatctcctggttagtcaatgttgacggtccttaaatcataatatttgaccatcaatacttacatataatgaaataaaatatggtatccaacttagtggtagggtttataactaatcatttctaccagtattgatgaaatatgtgtgtgcagatattttgaggagaaaacacatccgtcatgcgacataatgcacctctgaacattcaggacgcgtttacacgaattggaggcaaaataagtcaataaaaaccatctaggattgggccaaaacatagtgaaggatgttgggggcccattaagcaacctaccggccgaaggaggggccgggaggacgtttttctagttcttgaaccaatcctggcacctcccgccatctggcttcacgtggacggctcggatttctcccctatggcggttgcagggtgttttggtcatttcccatgcccctaaccgtcatttggaacctatataaggaggtctccttctcacttcaagaacacacaactttgagctgaattacaagaggctctattgtatcttttgtacattagaataaggtagagagtgaggagaagctctggaggagtgcccggaagtttggcactcatccgacttctacctcgacgagtgcagcttcctaggagaaattatggaggagtaccggagctatcggtacactctgctccaggttcggagaacttcttctattaagtaagcatttgtgttcctttcttatgttatttaattacttagtctgagtaagatatatttacagctttgcgggttcattgtttagtattcgtactaagtgctctagtactaggactccggatagagaaggaagtttctgcacaaatattagagtagtaattaataacataggcgtggtgtctaggttagagattacctttgtttgttgtgtatcccacggatttgttagaggtaggcagcaggtggtgacagccctgaatcccatcctagtaatcctccacgttcggatacatcatagagctatagccggaaccacgctagtagaccagcaggggtcgctgctcgaagcaatagatagaaaattacctttacttagcttagatatttaaaacacatagtaagtcctctctagcctagcctaccaaccatcagttgttgtccttggataatcttagccttaggtagattacacacgctccctgttcgatatccttttggggtcaccctaaggtgaagtgctacaacggtattccgtatgcttgcggatttatctgtggtcataagaaataccaacaagcatttctggcgccgttgccggagaactgttgttaattttttggtcatcctcgtatctttattttttatttttttcttcttttattcctttccttgatggagcaacccacaattcaaaatctttctgctcctcgggctgatctttgtattcgcagaacagagtgcgtatcggttgcggaggcatcggctgaagtctgcattggctgaaatggatcggacagaagatagccgatttcattgagatggttataaaaccgtttctggacggctgaaatggatcggacagaagacagccgatttcataaagatggttataaaaccgtttctggaatcgatcaacgtgctacacaaggattgccacgatggagataagctctcagatatgcaattgtatctattaattatgatattttaaatagttccttagagatatgtttgggtaagagtctgccgtaaagacttatgtgtatcttagagtttgctagagataagagtcgtgtccggcaaggacctatcatgtatctcgggtataaatataaccctaacccatgtaattaacaacaacagttcaataacatttttggtgcatcgccaccctttttacttgctttcaataacagttcaataacaacaacagttcttgctttcgggttgagctgcatcgatttcaatcttcaacaagaggtaaacttgtcatggcggcttgcattctcgtgattagtgcttccatctttatgacattctaatcttgtatatgtaaatcgtcgagttatcatatatgctctataatctttattagttgcgccatctaacctgcaatcggctggtttctactgctagagagtagccgatagatttagattttgttattaatctagattatatagcatattgttgatgtaaaaaggaataagttcaccggaggtccctcaaattgacaccgagattttttaaggtccctaaactagaataccagaaatgtgtacccctaaaattactaaatccgtccgtagaaggtccctcggcagtattgactcagtttttgcccggttttgctgacatgtcgcgctgtgggacccactagtcagtccgccgttggggagttaatagacggggttaacggaggggagcgcagctagccagacctccattctctctcctttgctcgaactctagctgagctgcgaccaggaggcgacttgaaggcgacggcgggtttgtcggcggcggcgagctggccatggcgctggcgacgagcatcgttttcgtccaaacgcgtggcggattccaccccggttagtaccttgttggctcggcattgcgtgctattgtagctggtactgtgttgattttgggggaagatttaaaatgtggtagattcgttttttgtttgggattcggtgtagaggtcaagtagtatattgtcccatatgctttaggtgtagtaatgcttttgtatacccatgtgaatctgggtgggttagtgttggggtggtccttttttaatcggtgttaggtgttaactaggtattagggatctggatgtagtgtagttttaatagtagagtagtaaagtgcttctttttttaatttttcagagctggcagcatggatcccttcggcactctagcagttaggttccatttcaatggggaatttgttaatagagggagacagaagttgtattgtggggggagagaagcaatgtcatacatagacagggataaagtgtcattacctgaactttttggacacctaaaagatcactgcaaatttgtggatgataaggtgtgtgggttcatgtctgactgtataagtgagggtagtgtggttgaggtgtatgctgacgaacccattgtaattgatgttgatgaagaggaacacagtgattatgaggctgaaatggagttggatttggatgaagaatcagaggaagagggagatgaggataaggatggggatagaaatgtgaaagtgaaagataagggcaaagctattgtggacaaagggaagggcaaagctgttgtgggtgctggtaaaggtaaagcaatagaagtggatgaaagtgctagtgataggaggattgtcatttatagggaaaggtcacctttgagggaaaatgcacctataagggagtactcaccttctagggatacctcacccataaacactatcctaccttctgacagtgaggatgatagtgattatgtaggaggagatgattgcccttctgaggatgatgaagaggctagggagatagaaggacactacaaagagttgaagaggaagatgagagctggaaaggttcatgagctagatgaggttgtgtttgagggggtttaaaagtcagtcagctagaacagctggaggtccaaaagatggcaatgacaccccatatgcagatagtgatgatgaagactcatatgatgaggttggcagtgatggtgagcttgttagaagaaagggcaagtttccaaggtttcagaagcagccaggggttcctgtttttgagctaggaatgaagttcagctctaagcatcagttcaagaagaccattataaaatatgccctggctgaaaggaaagtgattaattttattaaagatgatcacaagagggtgagggcaaagtgtgattgggctagctgtccttgggtgtgtttgctgtccaagactacaagaagtgatagttggcagattgccacttatgacagtatgcatgcatgcccaccaaggagggacagtagacatgtttcatctgttaggatagcagaaaaatatggcaagttcattgttgataaccctggttggccactatcccatatgaaagcaacagttcaacaagagatgtttgctgatgcatcaatttctaagcttaagagggccaaaagacttgtgatgcagaaggcatttgatgtgaccaagggccagtaccagaagctttacaattatcaacaagaactgcttaggaccaaccgtgggagcactgtggcgatcaacagagtgataggtattgaaccacctgtgttcaaaagaatttacatttgccttgatggatgcaagaaagggtttatggctggttgcaggaaggtaataggacttgatagttgcttttccaagggatctacaaatggagagctattgtgtgctatagggagggatgccaataatcagatgtacctaatagcttgggaagtggcctataaagagaacaatgaagaatgtgaatggttttgtgacttgctgtgtagtgatctgagggttggtgatggaagtggatgggtcttcatctctgaccaatagaaggtaatgctcctgatccactgtttgcttttatgttctgtcaattctgtcattacacaatgcatacctaatgtcttgtgcatgttactatcaaatgcagggaataattaatgctgtctctaagtgggctccagaagctgaacacaggaactgtgccaggcatatctatgccaattggaagaggcacttcaatgataaagtgtttcaaaaaaaattctggaagtgtgccaaagcatcatgcagaatgcttttcaacttgccaagagcaaagctggcccaactgacccctgctagagctcaagcaatattgaacacacacccagagcattggagtagggcttggttcaggttaggatttaattgtgactctgttgataacaacatttgtgaatctttcaacaaatggattcttgaggctagattctttcctatcataacaatgcttgaaaccattagaaggaaagtaatggttaggatccatgaccaaaaaaaatgttctaatagatggagtactgtcatttgccctggtatacttaagaaacttaatgtgtacattgctgaatctgcattctgccatgctatatgcaatggggctgacagttttgaagtcaagcataatgagcataggttcatagttaacctagatatgaaggagtgctcatgcagatattggcaattgtcaggtttgccatgtcctcatgcaattgcttgcatctactatagcaccaacacactagatgggtgggttgctccatgctattaagtggaatctttcaaaaaaaacctatgcccattgcctgcagccagtagagggcatgactagttggccagatgatcctagagagcctctcaatgccccaggatacatacagatgccagggaggcctaagactgaaaggagaagggagcctaatgagccagctaaacctaccaaagcttccaaatttggcacaattatgaggtgcagatcatgcaagcaacctggtcacaatagcaagggctgtcacatgcacagtggggcaggtggtagcacatctgcagctgcaacatctgctccaggaaatacagtcactgcaaataacaacttagtgttgtcaagcacacctagcagcattgcacaaagcaggaaaaggaaggcagctgagctcagtactagcacatctgcttgccacactaggaagagaacatctcctacaaaaaaggtatgtcagccagtcctcattcaattaaacttttgaaattaacattcatttgctaacaacacttgtttcttttccttccagtcagcaaacacaaacagttcacttgtgaaggttgcagccagtgctaggctggcaactgaaagaggtggttcaaccagtgtgaaacttcaggccatagtgccacactctcaatgttcttcttctgcttcaatgaggatcacttctgagaaagcaagtgtttatgtgcaagctcaagaaccagccactaccaagcccaagaaaacacctacaggtccactgatgctgattcccccatgggaaactgacaagctgtgatgccatattgtgctaactatgcaatgttatgtgctttttgtgtattttggcagactctaagccaactatgcctactgtgaactttatgtaatttggcagactcttagccaactttgcctatctgtttagtttctgtaatttggcaaactgcttgccaactatgctgtgatatgtgcttgttctggcagactgtaagccagctaagctatgtggattgttatcatctaaattgagtgactttgctcaaatgatgtgtcatagcctaatctgatatgagatggtatttactgagctgatctgatgtgatgaattgactcttatcaatttgttatgctaaaatttatgtgcaaagttacgaatactcagccactgcaaaagatgatattcagtcacaattcaaccaaccactgcaaagtcagctcaaatatatgcaatgtcagtgtcattactgaatatcaatcacaattcagccaaccacaaatccattcacttaacttagatagtcaaagagcacagctcagtttcttggcaaaatgcagcaaaatgctttcagctaccagcattttgacacatagattaacacattgcacctcacagctgaactaaaatcatagcaaacaacacaagcatgcatcccaacgacatcagtacaagccaaactctctgtttctctagcctactgttacttgctctcatagcagccatgttagcttcattctcagctgccacaatcctcaattgtgccacttcattcattgctacccctaattctaggcactgctcttctacctttggcctcagttcttcaacacaatgttgcagctcattcttctcccttcttagcgataacacggcttcatgaagatcgttcaacagctccctcaaaaaactacttgttgcaggctcataccagtcaaaaaaatcgcagccggcgccctgaaaacattacatcccaaatcacccaaccatactgccagctcaaacaaaaaccaagcaagcaaacgaaatcttcatcactcacccgattgcggcatcggtagtaccatcgaccagggttgtccacgctcccggaaattcaccgggccggcttcgcaccacatcggcacatcaccgccggctgataatcatagggcccaactcgcgccgggatgggagcacgactgctgggatgcgacgaccccgacgaccggtcactgcaataactcgccatcgcctagcctcacctcctcttgtcgcccccgccgccgccgccgccgcttccgccgccgccgccgacctaagctagggtttcagctcgagaagaggaaaatgtcgcggcaacgcctggaaacagcgaggacagagcctttaaccccgtctattaactccccaatggtggactaaccagtgggtcccacagcgcgacacgtcaacaaaaccgggcaaaaactgagtcaatactggcgagggaccttctacggacggatttagtaattttaggggtacacatttctggtattctagtttagggaccttaaaaaatctcggatttagtaattttaggggtacacatttctggtattctagtttagggaccttaaaaaatctcggtgtcaatttgagggacctccggtgaacttattccatgtaaaaacacgaggcctgggagatctgcttaactccagtgtaagtccagaagcttgcctttaggtgtatgagcgtgccagttgatttgatcctgcaatcaacaagaaacaaagacaaagaaacccgggttaaatccataaacgatagccgatcggctaattgccgatgaagtatcatttatcttggagccgatgtcatatgtggatcgatcggcaatcatgaataagtaagaaagaactaattaaatctactcgatcagttgtagatattaacaatatataatccttatgtcgctatatacttaaatcaagtgattgggattgatctgtcgccatgacgagacagtataaatcacatagatcgaagtatatgttaacaacgagactatatatgttcatagcatagccgatcagatagatctagcatgtataggctaatactccgataccactctatatcaagatattaaggcaagtagaatacaccaaacaaaagcctaatatacttaagggcagatttaacatgtcaattaagcatatgagaaaatggtagttaaatcaggtaagatcggctgaaactctgacgctaccctaatcggcagccaaaggcagcctagagattgagattctaatcatcactcataagattaaactcaactgatgcagctataagtatgaaaagaaggacaatatctagacaatcaagtcgttggatgtttcatagagtggtagatatcctatataatctaagtcagcatcgatatttaacctaatcggctgccttctagtaacagacgttagccgattagaggttagatagcgatattgccagagattatataagatatatgaaaactcgacgaattacataaacaagattagtgtatcataaagatggaagcactaatcccgagaacgcaagccgccataacgagttttacctctagttgaagatcgaaaccgatgcagctcaacccgaaagcaagaactcgtcaaaacaaaatgaaagtaaaaagggtggcgatgcgccgagattgtagtgaacgtgtgttagttcgattatatggggctcgggtctatttatacccaaaaattacaaaatatgtccatatcggacacgtttcttatctctaacaaactctaagataccataagtctttgcagcagacttttgcccaaacatatctctaaggaaattacataaaatatcctacttaatagatacaattgccttcttaggactctatccatgtgtggcaatcatcatgaagcacgtcattctaacccgacaacatatgccgtgtcatattgtcggattcggctcaatcggctaaccctgtccgactaacacatgccccccaagtccagaattttggataatgtttcggatttgccatacgtcgactgcgagagaatattgcacttgccgttttccgaccgttattccaacgctttaaatactaaccgttgtccccgagaaatctcacaccgtttcctccgttttcaccgccgaagcaaactccgtcctctctctccgatgatcccctcggtgcacgaagcgattcccaggcgatttcctctccggccaactttctgcccacaacgatgtagacctccgccagtccatccgccgcatcttcaaccgagtacgcagaggtaagtttccattggctagatcctctcttttcgcatcagattagttttccctttccttatcttgttttcttcttctctgttcttttggatccgtagcaactttccaatctgatcgcagttccgagtttgtcgcataaaaaccactactttcttggtccaatcggcaatcccaatcccactgagtttatcattggtgaaaccaataggatccctttcagattagctaacccgaatctaggtcactggaagaatacttttaaatcttggccagccctcgagaaaacttcacccgagaaaagctggaccacatggtacaagcgtgtatcggctagcaagcaaacacactgggatgagattggaatcggtcaagcacttgcccttaccatagcgaattcggctaaggatgaacccctaatagctgccgccacctatttctcgtccaataccatcaacgcctttttgttgaaccaagggccgatgacaccaaccctgatagatatcaccatgatcactggtctagatgtgacctcatcggctaaccctacgagtctgaacaccaagaatcaatatgacttcaagaccaagagcataggcggttggtctggttacgtggcagcatatatgggccaaggatctgttactgctcaagaacacgtggcctttttgctcatgtggctagaaaagttccttttctgtggatccagttgtggtcctacaaccaactggcaatttgtagccgaggctctagaatcaaaaagacaatttcctctaggcaaaatcatcctcggctacctataccaaatgctgaacaatgcatcgactaagatagtcgtcggctcagtagttggagcaggtggaccatggtggctgctgcagacttggctgaatctggtagtcatgaaagctgtcaatcggccatccgtgatagaagccgaattcccaagactgcagccgattgtagaagatgatggagaagaaagcactcatcgtagatgcatgtcatatggagaatatgcattcacaccagccgatgctggagcgaagttatcagccgagctgctcaaagattggttctgcagcttctatgagggttttcaaaaagatgctcgagtttggtttccttatgaagattcagtgcatcttgatctcccatcagactttagattcgaagatatcaacaatgaaaaatctcaaaaatctaaagaagtcttctcagctgcgattagcccatgcattcttcctgtcggcatacatcaagggaggaacattcaggtttcctatgaattttatcactcgatgagctctgccagaccacttgggatgggtcaactaccaatcggcttgctctttgctgataaaattcaatgccgaggagaaatctcatcaaccttgatgatggatcggctgctgaatatccaaggacctcctttgggcagcattgaaaatatagagctggcaaggttcaggagcaagaactttgacagatggtggggtgaatggaagctgtatttgttccaccaaccggcctcaatatatgtgacagatctctttcctaatgttatccctcaggtaaaccttgacttcattaatttcttttgaacaattgtcagccgattcataacttgactaatcttctcttctgttttgcagacaacagaatcttctcctccacaccaaagcaatagtggcagagatatagagtatgccccaggcctcttgccaaatggtggttgaccaacccctccagttatcagctatcatgcccccaagaccgcaagtctgcttcaagggcagatgatagagccagccgataccggcaggaagaggaaacccagggcaccaacaatcgatccattagttctggctcctaagaagaagactaagaaacaaaaacccaaggtagctgatgatctgcctgccctagatccatccattgagcaagccttggatgaactagagattgaagaggatgttgacgaagctgcagccgaggtaagtgatacagaaagaactccatcggcttcacctaaacagactcctccgactccttctactccagctcacttctctagggtaaacagctctctttaattccttcttccaattgttttattcatagttgattactcataaatcttgtcttttgcagaagaagaagttcgctgtgaagaagaaatcggcagcaacccaatccaaaccaactctgccggtaagattcttctgaaaatatttcagttccaatcatactctatgtggactaacatctattttctttagcctcctcctcctccttcacctcctgtacagcatatgtcaagtgaatgaactccatttgctgtaggaagccacaatattgaggaagcagaacaaccagccgctcctactatcccagtaagtttccttttgacacaaggatttagatcggctatatctatttggcatctaattctctttgaattatttttgcaagccttagccgatctgttctcttttgatatcaaggactacttatagaagaggacaccacaaacaaacccttagctcccttatccgatgatgtgaagaagactcttgaagatatttctcatcagctagaggcatcttctctagacaccttggtggtagattgtggatcaattacgactcggctacacgaagttcaagctctgattcctgaagaactagccgatgtcctcactccagctgcttatcttgaaaagcatcaattcaaactggagaaatgacacgcccagaaatttagcccaaatttccagactattttgtgtattaaatccctgtccaggaccagccagggtacacaaaaagacaagtaatacacagttccaaacgtaaataaaagcgtaaatacttacagaagaggcacttagtcctcacaccgaaacgaaagcagcagcagcggaaaaaggctatcctagcggggcttcagctccactccacaggcaaaactcaactgaggtctgagccttggtcttctaacttcgtcttcagctcagaagcactacacttctgaaaaagggggaataatagcaaggctgagtacaaccaccgtactcagcaagccacaccaatgatgcagacgtgcaaggggaacacaaggacggtttgtggctatttgtataaaggcggttgtaaaacattttattgagcaaaacagtaaaactgttgagtaattaaggtaatattaaatctccactgatcaacgctacaccacgttgaacaggcccaaccaacccacctgaactacagtgcattgggttgatttattaaggtggaactaatcacggtgaatctggtcgaccgcccataaccgcaggcacggctattcgaatagttttactctgactagaggtgtacaactgtacccaaaagacacagccccacgacacgtttctgtgcgctgacatgccaccacgaaataccggaaagaggccgtgacaggacccttcgcataaccccctctaaccgattgcaccacaccttagggttcgcccccgtccacagcaagcaacgggtagcccccctctcgtgccgcggtgaatccggaagccgatcagccagacaccccggccgacccaactccatcacgcccaccctcgcctgggtacattggctagacgaaagctacactacaagcccagccgttgcccacgctggcttgtggtaagcatgataaattcttccagggtttcccgcgaactggtccttaatttccatgggtgcaactagcaaaaccatgcacccgcagcccaccattcagtcgcattttagttggataattacgaccataaagcatggccagatgtctcaagcacgcagctcattctgatactataaaggtctaatactgtaattatcccatcaactgagctagtggtaattaagcatggctaagcatatagttctagctaggtcacataagtaacatgagctagtcgatttattacccaaggttgacaaaagacagatatcaagtaaacatagcacaagcaagcagataggtagtacccggatcccatgtaattagcaagacatgcatgtttatttgtaaacggtaaaacatttataaattgggatcaacatgctcaaggggaatgtgtgacttaccttgcttcttcaaaacaatcttccgaactcttttcctcgcgaccgtggacttccaaaacgacggattctacacgttggcacgcaaaacaaggaaaaactctaataaaaaccaagaaaacagtacataaaaagtaaacaaacatgtagatcttaattttagatgaattttgcaagttgaatggcccaatttggagttcgaatgaattagatataaattttagaagttttgagccatttaaatggatttctagaattattatcgaattatgacgcaattactatttatttttcaaagggaaaaggtagtcgctcacgtcatcgaaggggaggccggcgccgacatgtgggccccagacgtcagtggctacaagggttggcacacggtggaccaagtccaccgcggcccaggagacgccgtggacccggaccacagggggtccacgggcggcggagcggcgccagccggccgagaggcggcggcgcgcggccggatggtcgctgacggcgatggccggcaaagtggagatagagggagagggagggatgctcaccgagcggacgggacgatgaggcgaggacgggaaggcagtcggcgacgaggattagcgacggcgctcctcggggaggcggcacggatggcggcccgacggtttccggcgaaggcagagaagcagccgaggtgcatgtcacatcctgattttcgctttaggtttcataaattatttaataaattatttttagaatttatattaaatgttcattaattttcaagtgaagctaaatgtaggaaataaaatttcctaaatataaagcatggctggatttagttttcattaaattctccatggttaattatactctctgaaattttctcggatttttcggagctcaattcttaattttaataatacaaagagcagttcagcaattatttaaataataaattaatcattaaatggtctgattataacgttgttaagtactttgagtgtccaattagtttcaggatttttcttgaaattatttgagcattggaagtatttttaacaattcaaagatcattttggtgattaatttaattggaaaagtaattaaattccccttttccttttcgggccgaattaggaaaagtcctctcactctcggcccagtctcctctcagcctgcagccctctccctctcttttccgaagtccatttcttgtccctccttcaatcaggccttggaaaatgaagcccagctgaaagtctgtattgccctccctcctgctacagtgcgtcttcaagctccagccagccgtccagaggccgtgttcttcccgagagccgccgtgtcctccatcaaattcgatgcatccgttgcttcccttccaaaattgattgcaaaaacggattcctctctatctcctctatcttatctccaagaactcccttaaaattcgttatctatctcacgaatttcagtcgtttttatccgggtgaactcgggataaatcttaacttccttcaccgaattcatccgttctcgagccgatctcctccacctttgcctacaaatagcagcccctcggcctcctcttcggtttccctctgtttcccgaagttttccctaaccctagccgcctccccacgctcgccttctctctccaactccggccgccatctccagccgccttttcccgtcgcgccggccgttcccgatcagtgccgccacttccctctgctccgcaaggttgatctctaccacggccgccagttcttttgcgccaaatcccgccggaaggttgccgtcaccgtgaacccgtgggttgttgccatggtttgatctccactcgcaccgttcgtcgtcgccttcggtcgccgccgcctccattggattcgcagcaccgaggagaagcccgttcacccctcggttgtcgtctcctgtcgctgaaactccgccgccatcatcgatcagtaccccgtcgtcactcccgttctcgtcgccggccatctcctttgctgttcatcgctgcgtaagtgttagtaaggatcgtcgtgtcctcctcttcatccccgtgctctcggtttccgccgttgtgccgccgtttgccgtcctcaccaccgaatagagccgccggcgtcgatcccgcatggttgccatgtcatcgccttgttagctgccgtccctaccatctaagtgtcacgccgtctctcagatcccacgtgacagccatctaaaaccttagatcagatcaatccgagccatccaattttggtcgactaggtcaaagttgatctcagccgtccaaaatcaatataaatcctgttatcccttttcaatggcatattagttctttttactatatgtcgtctactaaattcattccaataatttccggaggatggtttaggcttatgtctcagttataaattatatgtaaattgtttaattaatttggaatagtcttttctttaataggtttaattggaattaatcttgtaaaattcataactaattcatatgaagtcggaattaagtggttcaagtctctaaattcatctaaaatcatgatctacatgtttgtctactttttatgcactgtttatttgtttttttattagtctttttcttcgttttacgtgttagcttatcgtttccgtcattgcgaaggttcgtgagtgcgtcggaagtgttcaagaagattaattgaagaccgattattgcaaggcaagtcacacagatcccaaacaaccctttgagcatgttgaacctacttaaagctattgttttatttcaacttatgcattattttcgaatgtcatcgggtggtgagcctttctcaattaattatggccgaagatgactttattttcatatgggtaataaattgattagcttggaccttatatattggattggttcagctaattgctatatacataattgcttagccatgcttagaaacattagctcactaatgggatgaatcaaactacattattatttatggttatatttaatggtagctcacgatggttaatcgtgttatgataattaattgataattaaaacttgacaatggtgggttgtgagcacatggttttgaaggtcgtgctcat

SEQ ID NO: 5284 - DNA, 5662 bp, Oryza sativa
  unsure (1)..(5662): unsure at all n locations
ggaaaaatacatttcatatgtactaaaaggcacaaaatggaggagaacggggcttgccagccggccagcttatactgtcgatacggtctggtggtagtatattttgaaatgtccgtgcgcattggattcgtttttagctatgcgaggaaggcgcgcctttttgacagccattgccgttgttaccggtaccggcgcaagtgcagtgccgcacgttggcccacgttgtttggcagctcgtgccgtccccgcgccactgctccaggaatgggcagccttgcgccagcagtttgcaacgcagcgctagctttgaatcgcgcagctgagtgcgtaacgctgaggaaagaaatgaaagcgaaggggattgtggtgggtgatggcatttgtctccaagcaagcccgcaggctcccactgcgcggggcaaggcaagcaggcagcggcaggcaaggcactcggcaagcaagccccttcccttccccgggctttgctctgccagccggtttgtgcagaaaagttagcgcgcacacatgaagaaagcactgtctttaccctgcatgcaactgacaaaatgtggcagaagcattactactgtcccatcgtaccagagaaaaaaaaatgattagcccgttcacaatgcacttgtttgagatatgagaaaaaattgaaatgagagtaccggacatcaaacgagataagccattaacataatattaatcattttaaattttaaaataaattcatataatttttaaagtaaattttaatagattttttccgttcatgaagcgtgtgcgtttcttccctccggcttctctcgaacacttcaaatggcattcaatcccaacctgttggctataagatttctctccacatctgcacctcgtgtgcccctaggaagcccctcgcactaccgcataagagcaagtttaggccatatttagttcgcaccaaactttccacaaactctcaacttttcatcacattacatcacatctaaaactttcctactcacataaactctcaactttccccaaacttctccccaatttcagaaactaaacacggcctaaggcttacatactacactattaataactggtctcacatgtcatacacacacttcgttttggagttcgtgctacagctggctacaaatctatagcccgctgcttctctctctcctcatttatcttattaaaatatgtttgcagctaggttataacctgctattgtacctgctctaaatacgacttccccaaccgcccctcaagccatgtgacgtgttccctcctcccatacacgagtgtatggccgggtttagttcccaactttttcttcaaattttcaactttttcatcacatcaaaactttcatacacacataaatttccaacttttttctttaaacttctaaatttagcgtggaactaaacacaccctttatctctctccgccgagtcgtttcgttcctcacgcatagcccatccatccctcgcaggtgatgacttagggcacccacaatgtggatgaaaagtgggtagtaagaccccttactacctactttaccattgtgaatatggatagtagagcagataataactataccaggcaatagcactactacctggtaacaagcataaaaaaatattaaacttttttttctcactcactctctctcttttttatcccatcattgctttacatgtaggtcatatcttactacccacatattgtatattgtgtgaggtagaaacaactatgagtatgtttagatttatttggaatgacaaatggaaaaagtgttggtggcaaaagttttgacgttgcaaaaatactagttggtgtttagatgcatactaaacttttgctattctagcacttttcggtggagagagagagagataaatagtggtcccaaagcacgttttggcacaatttgctactatggactagcaaatggcaaatgataaattgtcaacttttactagtagtgttagatccaaaatggcaaaaagtgctctaaaatggtaaaattttggaggatctaaaccgggcctataacctagttttgtgagtcccatcttactacccacttgataaatatttattgattatgcccttgggggagggtggaaagaagtacggctaccaggaacataccagtagggaggaggacacatcaacaatgttgcagcctcaccaggagagggtattagggctttttccttgttcttataaataggtcgtttttgtcaaattcgatctcaccaaaggcctatttgtaagaaagaataattgcattttaacattataaaaagaccctcgacgtacatatttttgacgccgatcccttttgtgttagcaacttaccaccatgtatcagcatcgagagatgatctatttttatttttttatatacgcattttcaaaataaaattttaaaacaactaaattataaaatagtcatgcaggatatttcggttggttccgttgccacaattcatccatcttactagtttatactcctcacttatatatatatatatatatgtatatatgtatatatctatatatgtatatatgtatatatgtatatatatatatatatgtatatatgtatatatatatatgtatatatgtatatatatatatatatgtatatatgtatatatatatatatatgtatatatgtatatatatatatgtatatatgtatatatgtatatatatatatgtatatatgtatatatatatatgtatatatgtatatatatatatatatatatatatatatatatatatatatatatatatatatatatatatatatagatctatactcctagggagtacgtactccctctcccatccaccgttcatttgatcgatcagatatgtactccctccctcatcataacgggtttggctcggtggatccgattagtttttctaattaaaagaccggactgcttattccgtaatttggggtttgctcccaacaggccaaacagattatcccgaaaattggggttttggggggcggcgcggcgacggaactgcgcgacgacggaccagcgattcagctttcggggttttgggggtcagcgcggcgacggaccagcgattcagcggcgactgtgtggctggcggcggtacagagatagcagtttgttccttcctccagtgatgactcctccccttcctccagcgatggatcctctctcaacaacatgtgttcctgaagcagaagtaatcgatctagagtcggctgaatgcaggagcggggcaacaatggcaaaatcgatgggccatagcagtggatttcatccaaagcagcaggttagtattcgtttatttttgtacggcaagatcaagacacgttgcctaaaattttcttctttgccgcagggtcacaggaaaattagtttgtcaccacagtccaaggtatgccacctgaaattgaatacatgtatgcctgtagagagggattaggtgtagttcggttcatgtactctctcagtttcagatgctaatttttccccttttagtgcatatgatggttttttgggtggatgaagttaatgctgttttagcccccacccccataaagaaaaatgtagatggtagtacgtactgaattttcaacggtatatactcattttttctttggaggggaactttttggaatctgctagacggtattaagtattgatttttggtgtggcagggttcttactgaactctctggtaagcaatagtatatactgaatttttatgtggggagctttattctctactttattggacgatagcatatactgcattttccacatctatactgaatctttccacagtgattcatagactgaactttgatacgcaccagtatttactgaatttttcatagatatactgaatttttctatgggaggctttgtactgagctttgttatacgacagcatatagtatgtactgaattttgtatgtggtacatactgaacttttctagaagatagcatatactgcatttttccacatatatacagaggcttttccatagtggtttacatactggaccttgttacgaagaagtatatactgcacttttacatagagaggtatatgctgattttttacatacagtaatattctctaaactttgcatatactgactnttctttcagtgcacatgatttttttttaattaagagggtacacataggtagaatttgctacgcagtattttgtacttcatctttccatacatatatgagtgtatgctgttttttttaaaaaatagaagtatatgttgaaattttaaatacactggtccatgtagtattgtctatttatgaaatgaaaaactaattatctgcaggctttgaaggtttctggcacaaggggcagcctaaataagactgctgcacgggtggtatccaggtatcggcaaagcagagttttaaatagacagaagaaagacaacactacctttggtatcaactgcaggtgtcagcccaaatgcgtagtgaatatcattaaagaattcgatgataggaagaaggagttgattggtgaagttgggtttgatggacttttggatatcaagcttactaaggtaaacaggcagtttggtgcatggctactgagcaaagttgatccgaaatcatgcgctattgttaaagatgtcaaccaggagttgccattcggtcctaatgatgtgaatgcagtttttggcttgccatgctcaggtcaacctattatcccttgctctcaagatgaattggatgggaagaaacaaatattgtgcgaaatatttgagataccaaacttttcacacctgaaaatatcactcttagagagaatcctaaagaagcagtatggttatcccatgacaatagatgaaaagagggttttcatggcggcttttgtgctttatgtcacaacgaagcttttggcaccgcaatcctgcgcaaacttcatatctcctaggtatattatggctgtttctgatgttgacaatataaaacagtacaactggtcccaattcgttgtagatgaggtgaagaaagcagcagaatcaatgcccacctgctttccgaataaggctcaactatccattaacgggtgtatcatctttctaatggttagcatttaaaactgacttgttaatgcagcatacaatcaacacacatattgtcattgtgaatcatttttgcaggtaaaatatttgagaaatctccagttccggaaggttgggatcacatgtgttaaaacatgtcacatttctcagtttgaggatgatcaaattgctaggatgattcaacaagatgtagttagtaaacataacccaggattccccttccctcgttatgggaaactccaggtatgtacgataccctggctgtaatatgcctatttctggctgcaaaatttagctaatttccgatatacatgctgttcagttgatgaaggaaccaagagaaaacaaccccatgtgccagagctatctcccctaaacttatgctccggttcgaagatcccatctagagccattgatggcggtaaaaatttaataaaattcctggaatcacacttctcttcgttagacgtacgtggaactgtcgggtcacaggtatgtcaaccatccgtatgctatgttacttg

SEQ ID NO: 5285 - DNA, 1378 bp, Oryza sativa
cggaggcagagcttccccccctctgccgcatcgccctctctccctcctccttttcccccaaagtggcaagggggcaaccccctttctctcccccccttttcccttttccctcccgccggcgtcatcctccccccccggtcgccgtttgggccgcgaccgccgagcgctggctcgctcccttgaccgcccaaggtcggtttccaaaccgacattgccgtcctataaacccaggcgccctcccttccttttttcccctcccaatcttccccgtttttcacccacgccattgccgtccctctcgccgaccgccgccgtcgcgtgtgccggaggagccagtgcgcgctaggacgcggaaggggactccgggcgctcgtcttcttcctcttccccggcctgaggccggagagatcactcccgtgccgtcggcctctcgtcactgcgccccatcacccccgcacggtagtgcctccctccgttctccctcctcgttccatctcctccccttagactcgggtagtagcacgagtagcctccccgtagctagctagcgccgccccgaccgttgctgccgctcgccgtgtgctcgccgccgtcgccgcccgtgctccgtagcacccgttcgtcgccggcctcgctcggcgtagctccgccatatccgacgctagcaacagactcccggagtcgcgtagatgctctagctcgcccgaatcggtctcccgtcgcgccgtcgccgtttcccccttctctcgccgccggttgccgctaccacaatccgccgccgtcgagcatcccccggcaaatccgagccgttggctcgtctcccctcatcccgtgcaaccttccggtgtgctcgctttcgcctgtatcgccgtggttcgccccgccgttcgcagccaccgtccgccgtccgttccggccggcgtcttcttcaacctcccgccggtccgcgtggcaaccacataggcaagccacctttgaacatcttgagcctatatttgaacttaagtatgttgcttgaaaaatattatgcattgataggattgcacttaatctacatgtcccgtctgcaaggcagattggcggacctacctaacttgttgcagttgacccctccattgtaattattataccatgttcccttgtaaccacctagttacgcctcggtaatcgtgcactctgcacgaatatcgacggtcgccttcaaacttaaaatctgataaacatcttgggtaaaacttaggttttacaaaacacttggaaaacccgacacctgggtcggtgcttgcgaacctaaatgaatttccaaattcgcagaccggggaacgtaccgggtgtacggttccccgctcttgcacttaaggaccgtttccttagaatt

SEQ ID NO: 5286 - DNA, 12603 bp, Oryza sativa
  unsure (1)..(12603): unsure at all n locations
tcagatcgccacaaccaaaaagcactccacgaggaactgcaaaggaaaaaaaaaggaaattcagatgattttccacccatctggacaaaagattcaacccaacaaatgatgaaaggcttacagttgatcaggagcacttcaagtacattatggggcggtggaagagtggccatttttgagccctgcaaaatgcaaagataaatgacttcagtaagcctttaacaaagtatgacagtatgtagttcacgagtatgctttagctatgatgagaaattaaggttacctcccgacagtgataatttggacctgggagctgagtggaatagaaagtaataatccgcaaaaattgtgaagcctagaggaaagaaaagaaaaacatcattgttacatcatgattataatggttgcagagataagttaaaagacatgggacagccacttacaactaaaaaggccagcaccctgcgccagagtagaacagtgtagaaacgtttgctatgataaataaaagggtgaaaactccactgcaaaaccataaagattgtcagtcaattacactactttatgatcaagcattacatgcaagtagcttaaacaaaccaaattctgttgatgcggagaggagcaaaatacataaacgcctctgctatactacaacacaaagaagtgcatctcacattctcaccattttaacatcttaattgtacagaaaattggtgcaacaaatagcttcgaaaaacattttttgttcttacagatcatgcagacaagaccttactaaaaggaccaaactaccatactgtagtacatattggaggtggcaataatttatcggagagcaattgattaacccatggtcataaggtacaaaatcacactaagctaaattatcaaattactttttcactttcataaatcaatctggatagccactattttcaaatttatttctcactgcagctctttcaaattgtgttgtttacttgtcaatatcagcagggctgtcattgccatttacactacaagatttctggctaacttattcaagatataagaagaaagggtcattacaaaacatacatcattaattatcaaatatgtatgaactatgcaatagatgatcatatgcagtgaagcaaaatagccacctaccaacaggaaggaaatgaagatgaatgtgaacacgctctcactaacatatcctttgtcctgtccaagttcctaaaaacaaagagaagtgccaccagtggcaggaacaaatcagtaccattgttctttgacagatatgagattaatttttaccaggtcacataccggaagagccatgaatcccaagtcctggagcagtggcccaggtcgatgcaagtaatgtactcctcgagcagccagtccatgaatgtactaattataggtaaaaggatgcatgaatttccaatatcatccattaatgaacagataatattatgtaagaagtaaatcttgagaagatgatgaagaacaataaaagttggacattttattttatttttccacgctctcaaaaagagaacctgtagaaaatacaaggagaagaaagattttatttaggcgccaaccggcatttcgcattgcaacctatcaagccatatgggaaatcaaatctcacgctttcccaacagttagtttcattctttctccatcgtgtacagaaaaggactgtagatcttactgcgctctaaaatgtttactcatctaaggaagtaaatcaattataataacacaaacatggagaaaaaaagttatatgaaatcaccacagttgagtcagatttctagggaatggagcatgtctgacagggagcagtatcacaaatggaaccaactatgtcaaaggattgggtgcgcgattttattaaatatcaagaggataggttgcacctaagttcaaatgaattcatctcctatatctcaactcaaaatagaaaataatgcaagtcctattatcccaaaatgttaattgcagtattatttctgaggtcaacttatgatatttaattattatcttctcataatagagcatatcctgttacagtacaagcgaatatatctgatgacaggcccatgaatatccaattcatttccagaatggcattaataatcatctttagttcaataaaccaacctacaagttgtttgcatgagcatgattacagtttcgaggagactacatgcaggacaagaaacatcacagtaactgcataataagcgcgctgattttatgaaaagaatttcagaaataaataaatacttgcaaaatctagacaaacataagaggcaatttatctaacatattttacaagagggaccaatagcaagctaattgtctcaaactctctaagcagggaacttttgaagaagacacaaggcaacaatttctccccatgatatgacatctatcatggtatattgcttttgaccttggctccagctcaaccaagattgccagtgcttgaactgctttctgtgaatttgcagtagttgctcatccaagtatccaacatttctcaacaagctctggatttttttttctactctgaggacatatcacataaacagattgaatcatacttccatccccaatactcccctcttgattaacaacaaactaaattcacctaaactgtgcagacatatagttttcatgcaaatgttcaatcagccacacccttgctcgaggtgaggtataatttaccacacttagttcatacaactaaaccctctgggcagtgttgacacagaattcgtaccggtccccaaatccaactctaaaattagcatagattgtacgatgcagagctagctaaaattgccgttcaaaaggggtcgaccacgtgctatatcaaaatttttgaaacacacagaaaatagcagtcaagaattacaaagcacgccacaaatatggcaattatgcacacggagccacggaggataaaaaaaatcaaaggaaataaactgaagtttacctgaaacaccaatccggcaaggagcaagcgccacttctcgaaaagaagctgcagctccaccgctatctccgcacacaccttcctccatagctgcacaaaggcgggtaaaaaaaaatcacaaaccatagctagaacatcccaaccccatgtgccaacgaatccacaccttggtagcctcccgagcgatgtaaaccgccatggccgcaactcccgctcctcgcccgccgcctacaggtacaccctggagggctcacacccatgctccgatccgcgcatcactgctgggatcacggcatctcgtcgcagccaggacctcgccacctcctcgggaccgccgcgagatcgccgcccgccgagcggaggaggatccccccaagcagctagctccggggcctccaagagggggggggagcggcgagcggcgcgaatgcaattttccggcgacgaggcgagtgagggtgggggtggtcaggctcaggccgccgcggaggagagtcacgcggcgacggcgtcgacggtttgaatccgggaggggggcgtgcatgcgcggctttcggcgggcaggactttgtttaaccgggcccaaaggggggtaaaaatcccaacaacacaaggggggcgctttacaacgtgctgcgggaagatagttggggacagcttctttctcgagctcacatacactgggcgcgctggggctcttaaagctaaactggaccgccattaagcggagtagttgcgcttctctttcctttctttttcccctgtttttagaggattgcgctattttttttggttaccagtgcttccaatgttccaagaatccaagttccagctcatctagggttccattcatggaattaaatgtagtagtatcatattatagaaaatngatactagatcgatatatgtctcacgaaatactagtgaacgggaaattcaagaaaatgtgaggaacattcgtcttaatttttgtacttcctctgtttacaaatctttgatgtttttcgcaatatttgatactccctacgttccataataaggcacaaccacttttagtagatgttatataatataaggcatgcatgcaagcatgcaattaactatggcatcttctccattaaattattacttttttaaatcttccactctcatattatctgatcatattggatgtatgcattatatttattaggatgattcaaactacaagatgataataattattttttggtctttatgttaagagtggttgtgccttatattttggaatagagggagtatagtttttgatgaatttgttcatcaaattcgtgttaaaataactttgtaaaatctaataggtttataacattacgataataccctccaaaataaatcgagaaattattaatagtcatagtttgaaaaggtaatttgaaacaaaacagtgcattagtttttacaaccaattaccatagaaataccaaaacattattatttctgataggtaggaacagacacatccattacgtagggtgagatgactagaccaaccacgacctgtgacaccaacacctccagaaacatgccctagtatagcgtatagccaccgacccgacatcagcccattagatcaattaggtactaccttccgtcctaaaatatagttatttctagcacaatactttgtcttaaaataaagctatttttctacctatcttctcctctcaaccaatcacaaccattctttttcacctaatttctcttttcaaccaatcacccacatttttcaatcattctcacctactttcttaatacccgtgccaatcttaaaaatgcttacattttgggacggagtaatatttcatacacgaggtatcgatcatcatatgatctttgtgtatatgattgcttgtcttcatttctaactcgctcaatcttttttaatgcatcatcaagtggggtgattacgattcatgtgctacatgccgtgcacgagcacagctacgcatttgctttctgcggtttgccaatatcattgtagaagttctttggtgtttaaatgtattgattataatctgtttttatgcgattataatataaatataatatattttacagcaaaaataatataccctacaagatgtctttgccaatgatctccgtcgtcccatgtgcgccatacagttgtatgattgtatctgccactcggcaacaatggagccgcaaagagcttttggaagaagtttgcaatgtcctaatgacgtatttatcaatgttcaattagacttggctacggcagccaaccagagcctaacccggtttactcaaacttggcctgcacaaattatttagtttggcatattttactgttagtatcaattaacattatagggacatttaagtatttaactgatatatacgtctacattctggtggtgctggggaattcttttttttcatataaatcttcagtatttgtgattgaagatagcacgtgtacttgtttattccatgtattgaccgttgtccgctgtgatatcaacaaatgtacgtaccccgatactatacaaaacaattaatgtgtactctcctatgtagcacaccacaaattctttattgaaaacgaagcatagaacattatatagaggccggccggtgccatccttctctcgaaggatcaaactttgctaatccatcgttccatcttctgtgctaggttggcaccaagctagcgtacgctgtctatccgcggaataaccatccggtcatgcaaattccaccttccttgtaataccattccaagtcaaagctcggagaatacgaaagggaaccaagccaagtcttattttgtcattccgatacctattttccccatgtgaaattcgaatgttctcaacatgactcgaaactttgatactactacctgttaactgctttctcatgcagatcccagcgatccggatcggggttcataaaaaaaccgacacagctggagatggaaacatggagaaccaaacaaccccaagtgacgcgaacgtggtggtgatcacacgctgctacgggacaagccgatgacaagtgcacgtctgcgcccagcaactttgacatgtgccgttggccaagccaaatttaatactccgtatcatacacatctgtaccgaatcatctgcgtagcagtatcatggcgtatcatgcacacacgtggcggataagctggcttggacggctaaagttgtacgcgtccagagcgaggaggtgatgaaaattagaggagaaaggttgcagtcgcggcgaagcaagatggacaagcagacgccacaggggcacggcgagaagccgcggtatttgcccagatgggcgcctgttttgttcgaacccgacaggtgctttcagccggaaaggcgaggcatcatcatccgcgtcgaagacgcgtagcgatcggtagagccatcaacacacgcacgctgcggtctcgatcatgattcgcactttcacagcggttcgtttctggcgttttttttttctttttttgcgagcacgatcacgatctcagctagctagttttacatccaaaactagtactgtcgtgtacaaggaataaaatggaacggttttggggcaaaaatccttcttttccccaaggagagggagagttttgcacataataagccttcctctccgaacgaacatcaacatgagagggattgaaactgacacaagatatccagtttgcatcaggtttgatgaggatggagggcatttgtgttccttaaatgtaaggttgtcaggaaatgctggcgaattttgaatatggagcaaattcggttggatctccttgaaaatggggagttttgaaccaacagttcaagagaacaaactgaaaagataaaggtacaagaacatatgaaagtggaactatccaccgcagttgtttcgcctacatcgttagtccttatcagacgctgtatatcgaagagaaccttgtagtgctctgtacacatatcaacagacaatagcaactatcaacaggcgacaatcacccagtcgtcattattacttcgaggatcaggatcagtaaatcaacttgttgataaatagtccccaaaatagacgctcgtggatagcgagatgacgagagatttgacaccgtgacgaacagatgattccaaatgttcactgtcatatcctgttgtgtcgcccaactctgtcaaagaatattcaggtgtgatcagttgaactaactcagatttttagttgtgtcaaaaaaaaaagaacttagattttagtaggctgcgagggcccaaagcaaaacaaatactatgactgcttaatgatgggcctaaagccatcagtggtcatggcccaaatatggattcatgcagcacaaacgggctttagaagcgaatagtcctgacatagcctcctcaccactgggccagaaaatcagagactcgagcacaacgcccgaccttcccggaggcggacctatccatatcggaaagcatgcgtgcatccactcgaataacgtaaggctagattgcactccaagtttttatcgtgtgacttgggccccggaccagcctgccgggctgccggccgccggcggcgggcgacggaaggaataatcagcttcgggcacatagggtgcggtgcggatgcgtgcatgcacgtatccactgaaccgagccgcagccgcgcgcgcagtgggccgtcactccatcgatcgcgtggcctaccggcagcacgacccggcggcacatgcaataggatgaggagaagattgctcgcaaaccaggatcatccgatgaagtgattagccccggaccaaatcagatcaaagaggattgctgacgcgagcatgtagtagtgtagtactactcctctgttgactatagcatcgggtgatcgatggaacaccgtatctgattctgctgcactatgctgatcagctgatgcggtccacacgttggcacgttgctgtatattctgggaagcatggcgtgttctacgccaacacgacgacaagtggctgactttgtgtagtactccctacgcatttcaacggatgacaccattgattttttttatccaccttcgaccattcatcttattcaaaacttttgtataaatataaaaacatttatgtcatgcttaaaaaatatttaatgataaatcaagtcacgataaaataaatgataataatgtatatttttttaaataaaacaaatgattggtaaaaagtcaacgacgtctaaattatgtatgcaacacagcagccaaggagacacaagagagtcaaataaagctttggcatccgccaccaggacttctctaaactggtgacaggtgggaaatcaagatactccctccgggttgataatacttgtcgttttggacaggggcacagtcttcaaaaagtaactttgacaactattttctattataatatatataaaaatatcaacaaacatatgattttattgaagtacttttaaagattaatctacaaatatggttttcatatttttaagataattattttagaaattatttgtaatcaaagattttaaagtttgactttacccttgtctaaaacgactaatattatcagctcggatggagtatataattacctatgaaaatacttcctccataaaaaaaaactcaaccttctaaagcattcgcttacaattagaggagggccgccaaggctagagaagataagataattggacacaggttaattccagcaccaaatctatcaggcctgtaagctcctatcgcagggctggaccatggtcccaactcccaaacgaaagaaacagaaaggctcacgaattaaaaaccggattgtctcactagattctggttgtgtgcattgctgacctgttgtcaataccggtcccctcgcagtgagaaactaccaacaccaataatccatcgctccgtgcatcctggcctcctggggaaagagccgatggcccaaggtgatggacaaatttaaatgcaagtccgacagaaaacagctggtgcaactgtactctcgtactcgtacacatgcacatactcctacctaggagccaccttttccgctttgtctacgttcaggcgctcgtctcggctctcttggcgggcagcctcaaacgctccaaagttttttcacgtggttaacaaaataacgctccaagctagtatttgactttgtgagcaatgaaaaatgaaaaagacttggtaggtaagcacaaaggctccatttgtgttccgcagacgtaattcggcttttgttaattgccatggtagtcagtctgccaggcctccagcaatcagccatgagagcgtgacataagcgcagaacataatcaagtttaaatataaccgattacagttgactaaacacattggagagaattcttctattcccgcctctgccatttcaactttcttcacaatcacaaatattccaggtccgggtcttgtctcccaggctacggatagtaccgccaaaacattttgaattctccagtacacagagtgcccctaggatctccagtacaactccatcaaatactagcctcgtagcctgttgattcaaaaatatgtttttctactacttgagtcgtacacctgcattacgacgctccgctgctggatttgatctggagaacggagagagcaatcagaggatgcaaatgacgcaaccagcgcgacaacgagccgagaccaatcgatagagagaaagtggccgtggcaccgcccaactgctggctctcggcaacctgacggccacatgggcgccggttgcaccagctcagacgcaacgcaaaacccaacctttccaccgatcacgacagcctaacaatatgtgctcgcctagctagcctcctcgtgcacattcatcagtcatgacaccaagatccatcctactagtactatactgcctaccgtacggtgcagcaaagcaagggtacaaaggcgccttcgaacaggggattaggagggggattagtattagtagtagtatcagctttgctgtaaaggcatcgttaagaaaatccggatttcccaacaaggcgccgggcaaggttctcttttaaatttgaacagaacccgaggtttcgttcgacggcaaggtggtacaaaccgaaaacaaaaggacttggcacgccacacgagataatagctttacaaattgaccggtcagaggcctgcccggccacggccacacgacacgccgcaacaaaagacgacaggaaacagccagctgccgaaacggaatccacccaaaactctggccaaacgcccggcttggcaaggttatctgtatcctaatccacacgattatataccgagtgcccgagcctaaacgatatttttcacatgatcctatcaaattttagagagtatatccagatactgcgatcgctatgaaactatcaaatattatttaaaataaaataaattgaaaataatgggaataaatatactaagtttacataaaaaacaattaaatatattaaaatcaatattactagccacctagtcggacgttgcgcgactttagatacccattttaaaccccctatacaagaaaactcttatactggaaatgttataataggttggtttgttttgaattttgatcattaagcgtcattgatggattacctaagttgataagcatatggcctcaactatatgttcaaaattttattacacaattgatgttgtaatgtacaattccatgttcaatataaactcaaaacaatcctatatcccatctatctattcacatgcgaaaacatatttgtgctgcttgtagccaatatgctccttcctccgtttcatattataaaactttctagcattgctcacattcatatagatgtcaatgaatctaaatacctatatatgtctagattcattgacatatatatgaatgtgggcaatgctagaaagtcttgtagtatgagacggggggagtactgtttaagtaaatataacaatgactataaatcatcttttactaattcaggaaaataataataggaaaatattactttaacacttattcctttagctaggaagttcttcaaaccgcctccatcctgtaccagtgttatatcaagttcatattatattatactacctctgtcccaaaataagtgcagtcgtggatatccgtgcccaacgtttgaccgtccgtcttatttaaaaaatttgaaaatatttagtcacacataaagtactattcatgttttatcatctaatagcaataaaaatactaatcataaaaaattttcaaataagacgaatggtcaaacgttaaacgtgaatagtgcaaaacagcacttattttgggacggagagagtatatgcatagcacagagctcatcatcttcccttttgaaggagataaagccgaaagtagttaagatttagaacattaatatgtcacatataatctgagatgaattggattatacttgacttctattaggactgtccttaagacacccatcaaggaaaaaaacattttttatataatgattaaaaacccatattgtgaatgaagcatttaactatacacattccaactatttagaaaggcggagtatttatgcttagaaattctgaaggttggcatgcaggtcatgtagtcatcagatagaattcagtgacaggggaaacaaccatttttaatcagcatattgcagccatggtaccatcagagtattttgactgatgtttgagattactgctgatatgaaaccaaatgaacctagctaaaaattaactgttttaatctgaacaacttcaaaatttgttgcaactgcaatgacaaaattacatgatattttatctgagctttccttggttatattatgagtatcatgagacatccaataggtgtggttaaacatatgaacaatttgagcaagctagctgtgaggaaatgtaaaagaaaatgcagagacaatgatttggtaccgtagctaatgtttgcctgatttcagaatatatgtatggattgaaaagctactgaatcaattgcaaataaaatcacatatctggttatttcggaagaggatctttgacagctctcgtcattgatggagacaaagaatcaacgaaccagcgtacctcagcttctagcttcttgggtccagttatatcaaggaatcaagatcgtggaattcactcaactttttggcaatcaacaggaacatctctagtttgctatatgccctagagctcaccggcgaggcggtgcgtctcctcggagatgtggtagaagccggcgccccatttcatggcggcgagcgggccgggcggcctcctgccgcagcgggattcggtggctagaccgatctgtgggtggaggacggggacgaggtagtggagacagaggcggcattggtagaggggaagaggaggaggaagtggtggcaggcagaggcggatgaggaacttgcgccaacgacgtggatatggagggggcgagtgggcgcggtggaggaggagggtggaagtggaggtggaggaggcgacggcaatggggaggcggcgatggaagcgaggagatgggcaggcggcggaggcagcggtggataatttttttt

SEQ ID NO: 5287 - DNA, 31384 bp, Oryza sativa
  unsure (1)..(31384): unsure at all n locations
ctcctttcttttcttcagacccacaggattagtagtagccacaatggtgccaataagttatgtcatgttcttcatgaccttaataactgataggcagttgctgctttgactcgcagcaattttttttcttttttatgaggcgtggattgtgcactaaactagtcgaaattgttaattagttttcgagccatgtgatttacaccgatcctctgagtaggtttgatgtttttttaatcatataggttctttaatatatatgtgtgtgtatgaaaattgcttacttaggcttccataatcgccgaactgtcccgtttgtttatggcctctgaactaccgaaatcgcggtgattgagataaacgcgtgaatatgcagcgttcggtgtcatgcaattacggctggaatacgaccataaacgaactcgagctggcatttaatatagtcaattacaaaggggtttgcagttggaaccgatgaatacaggtcacatacgaagggcctttgttcacaatccaagccgaaattcgtacagaatggtgaatgccgctttcaccttttttttaataattattttcagggtttctttgctgatcttttttacatacagggaaaaggtaaggatcacttctttctacgttcaaaagattccgtgtgagaccctgtgccaaaatattagtagaaataatatgcgccatgttgttggcttaatactatatcataaaaaggggttttggaacaagtccatcactacaaaatttatacagagaaggatttctctctatttccactaataaaaattgataaatgtcatataagtaatactctccccatcccatattgatgatcatataatcaaaaatacaaaaaattctaaaatgaccctcatataaccattgtctcttcgttaatattattgcatctacgaatgcaaattgagcatgcatgcatgtatgtctttcaaggcaattaagcgcacatttgttatgcatatggggagttacagtctttaaagtctacctgtttcttgatactccaccacatactcgcactaaataaaatgcatggtagttaagtcttcgtttgtctaggtgaaaaaaagttatagagtaaatttcataaagctataaatttaaagtgttgtatcataaaactacggatttagtgttaaatttatcatgaaattataggtttaattagtactatcaatttaatcacaaaactataatgtttatggctctaacaccatggtagtgttagggatttgaaccctaaaatatgtagttttgtgataatttttatatcaaatatgtagttatgtgatacttgaccttaaatctatagatttctaataaatttgacactaaatatgtagttttgggatataatgttttaaatatgtagttttgtgatagcttggtcaacatatctatagttttgtaaaacttactcatataatgatcaatatagaacgaaaggagtatatcattagtataggagtcaacggccggagagaaaaagggaattaagaagacggttagggtgatgaagctataagagcatccgtaatggtaaagtaaggtgctctctataaaacttgtacaacttagcaatagactagattaatagtaaaccacctcaatagtatgtctacatgggtatctatagctctctaatgcattgcctcgtttttctctatagactatctccaggttagtagatagatttgctctctctcttcatttaatctcttccaagtaggaaaatctgctgacatggatctctggtagagagcctatagataaccattacgggtgtcctaataaaaggagcatgacttgcgttttttaatcaacttgcttacagtatttactatgcgatgtgatcgctaggatgatattgtaagtacttgttattaggggtttcaaattgttatatatatatatatatatatatataatctgaaattaatctgtgactaaagtaaagttggtctgcaatgactttttaatatatgtataaaaaatccccttgtttgaattgagtctaaaacttcatggagaaatctgttgatgtgcttattctcgatctctctcttcacatatcttaacattttatacagggtaatactaatatactataacgattctacagtcactcgtagatgccagcgatatactcaagaatttcctaaagtctgagggattaggccccttttattcatacgaatgaaaaaacgagaaaatagaaaaaaaaatacaaaggattccgatagaaatataagtttaaaacggattactgtaaaagaaaaagaaaaacacatgaataattatttgattggatcgcagaaaaaatatagcaattaaatgagagagatagacttaaaagtaatttctctaggaggtcggccctctggctaattttcctctaaaatctatatgtaatgaaccattttataggaatgtataggatttggaaaaatccaatcatttgaatcaaatgactacatagaaaaaaattctataggatttttatcctatgaaattttttatataaattctttgattcaaaggaacctaagaagatggccccatgatcgactattagcattgttaatcgtcaatgacatagcatacctataaacactgacaaaccaacgagtttggacggctccccatagtcattgagctcaagatccaccactgaatcatgcactctcagctactcgtggtcaaaaaaacgacgcaaagactgatgcaatgttctgattagttgagctacggttgataagtcctaagaaaaagcaaaacaagaaaagaatatttttcagtacaacttttatatttgtattattaacgatttaaaaactaagactgaaaaataagctatactgaaaaaaaaaatactcaataccgtttctaaattatgttacaaaatttaaatttttctttaactgataagtcagcaagaagataataatagcctttgtagttttgtgaattgtctgtaacaagtaggggtgaaaacggtacgaaaactttccggattccgaacctattttcgaaaacggaatctgtcggtcgaaatttttcggaaacgaaaacgaattcaaaaatattttctcggaaacggaatcgaaaatgataagggcagtttccgtcggaacccgaaatcggtcggaaactttccggaaattttctcggaatttccagaaatcacaaaatacccttgattctttttttaagcactgaatagtgaataccatggtgtttggctgttattttcttaaaaatatttgttacgcaaatctaaaattacataagaatattttttcctacattgggatttatcaacagcattactaatttattctatagattgtgtttcatgatgtactatttatacttagcaattggacttatatgattgtgttttacgatgaattgttaaccgttgagacttgagaattggatttatctgtttgaggaggttttttttattccgataaattttcgttaccgtattcgcgccggttcgttttcgctccgttttcggtttcgataatattcgattctgttttcgtatccgggatttccgattccgattctgattttgaaaaaaatataaaaataaaaacgattacgttttcgtaccgttttcacccctagtaacaagcagtacttcgcagtagacaaaactatacactttcaaatggttacagctaaaagtttagttttataaacttttatagagctaccaaaagtttttagtagtagcctctttgacactttcgaaagataaagtgcagttttgtaaaagctatagtactaaattttttttaaaaaacagccctttcggcgatagtagctcggcgcgcctgacgccttgtggcaatagagagaagtgcggccgttttcgtcggtcaacaaaaggacggcacaagtttcctgcttgaacaaaacaagcttcaaagaatcaatcgtgtatattgtacaaatttcctgtaacacgtcttacacaccggactccgtcaccagtgtgaggccgacacgcgggcccggcatgtcagcctcagaccactgactgtcgccacacacaaaccaaccaatcaaactctcctccatcgttttttacttttctttctccctccaacctttcaaactattactgttactgctactactctaacccgttgaatagttcaccggttctaacctgatctaccaaccccctccctcccaaaaagaaaacaaaaaaaatcaactctttcaatcaaagcattgacaaatgaagcgaggaagaggaagaggaagaaggaagaaggagaaaagccaaaggtagaatctttgggcaaaagtttcccgcgtgttgaatggttgaacggttcaatggatggattcagaggaggcggacggagccgcgccgccgctcctcgtaccagcagacgcagctgagcgcgacgagcacctcgacgagcgccgcctcggccttctccttgtccgcccaccggagcgtctgcagcgcgtacacccgcgccccgccgtcgaaccgccgcgtccggtccatgttccgctccgcctgccactgcaccgtgtcgcgcgccatcggccccagccacgccatgatccggtccaccgcgtccttccacccctgcgccagcccggcgtccagcggccccgggtcccgccaccagtcgcgcagcttggaccgcaccgccgccctgagcttcgccggcagcatctcgtacatctcggcgcgctccgcgttcgcttcctcctgccgcccctcggcctccatctgcagcagctgctccgcggacacgatcacgttcgcgtactgctggtccagccccgcgccgcccaccgtgctggccggcgcgtccaggagcttgcgccagtcgatggcggccttctgcccggacggcctcagcccgatgatcgggcacgagctgctgatcaccggcgggtggactcgcgacggcccgtctcgccgcgtgatcggcccggacgacgccttcgccctgaccgcccgcgggttgagcagcttggacagccttgtctggacgctgtcggtggcggccgacggcagcggcggcgggaggccggggacgaacgcgccgaagatggtacagatgcggctgaacacggcgcacgcggcgcgcgccatgaggccgacggccttctcgtagctctggttccagagggactcctccttgaggcgacgcaccttgatcctctgcgccttgagatcctgctggagcgagtcggcgccgggggaatcgccggcggccgacggggccaccggctgcatcgggatcggcccgctcaggcggttccacccgcggaacgcgagcttccgctcgctggcctccagctcgtcgagcgcctccatttcggagcacagcctggccgtggacgcgacgagccgctccatcttcttggccttcaccctgaggcccttggcgacgagcgggtcgagcctcgcgtcgggcgccccggccttgaggctcgcgtacacgccgccgaagtcgatcccgcacctcagcccgagccgcgcgacggcggccgcggcggcgtccagcgacacgacgagctcggcgcaggccagcctgaggaggaacgcctggtcggtggagttgaggtacgcgacgccgggcgaccgcatcgtgtcggaccggagcctggacacctcctgctccgacagcgaccggtgcagcgacagcagcttcgacatcgccgccgcggcctcgaacgcgaggatcccaagcgctgcctgtggccccgacggcagccggagatccacgggcatccacatcttctgcacaaccatcaatacttctctccaaatctcgcaacaacacagagcatggagcgatcgatcgagctaagcttctttttcttctcctctctctctctctctctctcgttaaggcgtcgacctcgttgaatcgatcagatcacctcagcacatcgacgcgacgcggttgcaggtacgggtttcggttgggctggtatggtggcaatctctttatatatagcacgagttattctcacttctcttgccggagggaaggtgatgctaagccagcacaggagaagtaaataaaagagacagtaaaacaatatacaatatactactactcccccgtccactagtagaaggggtttttacattttacttacactgtttcaccattcgtcttattaaaaaaataaattattatttattttatttgtgatttacttcattatctaaaatattttaagcacaacttttcgttttttatatttgcacaattttattaaatataagacgagtggtcaaacgctaaaaaaaaatattccctccgttttaaaatgtaagactttctaacattactcacatatatatatatatatatatatatatatatatatatatatatatatatatatataaaatagaaagttttatactgtgaaacatagaaaagcagtgaatatccggatggaggtagtactactttatttggttggtgatggcgacgcgacggtgttgggtgtgggggagagacacggtcgcctccccgggtgagaatgcgaggccaaaacggtaggcggatgctgcttaccggaagacgtagtaccacgacgcaaccgtcatcgtctgtagagagcgcgtgtgttgattccggtgtgggacacgctctctcgcctcgtttaatctaatctatgcgagaattttggccttgccttggctacttggctccggattagtccgaggatgtggcgagatcagctgcttaatctaactggctttgagagtgattatctgcgcatcccgtcgttgacagagaggattcaggtccggaatttaccaagagctttttagccttttactgtcgggagcttaaacggacgtaattttcgttgaccttagttaaggtgaggcgttttcgctacgtagtcacgggacagaatgcgtgttgatcggtgtttcttcattaatgaagctatagctattagtcctgaaagaaaaatgaagctacgcatatggctgcattttcagatagtattgcccatcctttctgcaaaaatgtctgaaagaactagctagcacatggccggagtcagcattcagtggcttgtgtacaaggcagcggcaacatgcatatgcatgtgttacttcagaattaagaaactgcatatgaactagtaacatgttgtatcttggtttgtatatattgacaattagtacgggtttctggaactgtcgctactttatctcaattcccatactctagcagaactagataattaaactttcaggaattaattacaagtgcatgattaagagatcaaatttatattgaactcaagtactcccctctgtccaaattatgctccaaaggaatatatgtaagccaaaaaaatcgttatcttttgttttcctttctgacacagcttccctttcctttagctaaattatggattataactttgtaaatgttcatcaagttctcgagcgacatatgctaagcagtgttctacgaaggattctttcacaacgaaggtttcttttacgagatttgctaccgtccagtgcttggtacccaagatacctgtatcaccgggcactgaaacaaatccaactatctattgttacaacgtaggattcgtaattagtaaaaggtcacttccaatactaaaacggtcatgcacgccccaatcttgttccttggcgccgctgcattcatattttcgtttgcgtccaatttttcctccctctgccaccactgtccatctgcgtcttcgcatgatcaacagtggtaccggcatgacagcgctacggaacaaggtcgcgcacagcgcaatcttcctcgcgcctgttttttcctccctttcccgccacttttcatccatctttgccggaccgatggtgccaccggcatgacagttaacaaatctacgaacacctcgctgcagcatccgccaacgcccagctgcaaccgccactgccacatcaccaacgccccaactacgacctttcttcgccacatcgcctaattcgaggatgcgacgaccaccgcactatcacatcagtgttgatgaaaaaacacacactgtcctgtaagatctgcttaactcctgtgcaggtccaaaatattgcttttaggtctgtgagcatgccagttaatttgatcctgcaatcaacaagaataaagacaagaaaacagcagttaaatctataaatgatagccaatcggttagttgccgatgacatatcatttatcttcgagccgatgtcatgttggaatcgatcggcaataatgaatgaataatataaaaactaaatctactcgatcggctgtagatattaacaacatataatctttacttcgatacatatttaaactaactgattaggatagatcggtcggcatgccgagacggtataaatcaaggggcagaatcaggcatggggcagctagggcttgagccacatgcctagccccataatccccattataatcttgaaaaatgctatgtaatttatgaaaatatttgagatcccattagctcagccctaggtgtggaaattttctggctccgccactgagtcgaaatatatactaaagtactgattatatagacgtttgtagcatagccgatcagatagatctagtatgtatcggctaatactccgataccactctatactaagatattgaaacaagcaagatatgtcaaacaagaatgcttaatatacttttgatgcaataagatcttaatataaagggcagatttagcataatagacgagcatacgagataatgatagctaaattagataagatcgattgaaactccgatactatctctattgataatcataaaatagggtagacatcataattaaggatattacttaatagatcgaactcaaccgatgcagcattaagcataaagataagtatgagatctaaacaagatgattagaatctctaagagatgatagatacatgatataatctagattaataatgagatctaactctatcggctactttctaacagtaaaaaccagccgatggaaagttatataacgaaactaacaaagattataaagtatatatgataactcgacgaattacataaacaagattagagtcataaggatggaagcactaatcctgagaacgcaaaccgccatgacaagtttacctctagttgaagatcgaatcgatgcagctcaacccgaaagcaagaactcgtcgaaatagaacgaaagtaaaaagggtggcgatgcgccgaaagtgttgttgaactgatgttaatgattacattgggtacgggccatatttatacccgagatacaaaatatgtccttaccggacacgacttttatctctaacaaactttaagataccataagtctttacgacagacttttgcccaaacatatctctaaggaaattacacaaaacatcctaattattagatacaattgcctttctgagagctttatctccatcgtggcaatccttgtgaagcacgttgatcaattctagaaacaacctcggagccatcctcatcggaatcggctataccagctctatcggctgtattagccatcctctgtccgatccatcttagccgatgcatactccaggcgataccttcgcagccgatgcatactctgttcttcgaatctaactttttgccgaatccgcttcgattccaatgccgaacctggttcatatcttaccaaatttggtcgttaacaatcagccgaccaatcgccgccaccacatcatcagactagaacagactgttgatggggttcaagatatggatcggaatgactaagcaacacactcatgcaaaaatacagtattgcccctttcacctctctcacaattgcccgtaccaccacatcagcaaagaaaaaggtactaggaggtgctgtatcttgcaaaccgtccgatcgggtagaatcaagggcccagatatgatattgggcccttgatgaaaatggtccgcgtaaagaaaatctctagcctctgccaaaaatacacacaactaatgagttgtaaaagttaaatatataaaaaggacttgaggttatgggatgaaatctcatcttatgtcatctgatgataagcagttgaaacattgaattaatagaactcacatgaattctacaacctacatcctcaatgtttggacaaaaaattttggccaaaaacgtcacatcaaatatttggacacatgcatagggcattaaatgtgaaaaaaaaaatccaattgcatggtttgcatgtaaattgtgagacgaatcttttgagcctaattacgtcatgatttgacaatgtgatgctacagtaaacatttggtaatgacgaattaattagacttaataaattcgtctcgcagtttacatgtggaatctgtaatttattttattattagtctatgtttaatacttttaatgtacgtctgtatacttcaaaaaagtgatggtagtacttactaagagtaactactaatttatctgttctaaaatataaaaatttaaacacgggtattaagaaagtagataaaattaaatatgtgaagactgtgataattggttgagaagaaaaggtaagtaagaaaattaaaatgtgcaatgttgtgattcgttgagacaaatgttaaagaataggaagttgttatattttgtggcaggagagtactatcttctcacgacaacaatatcgtgtgcccttaatgaacaataacactgccaataatagaggttgaaactcttcacaaagtttacaaacaaaaagaaaatacagaacaattcaccttggaaaagggagagatcgtcgttgaattatgagaggtttcttggttcggtttgttttttcggacggagtctttggcactttggctgccttggtccatgcacttctgttcttggcagagtgttctacgatctacagtatagttagttcagagctcatgtcgggccatgatcctgtgtcgacgagccaaaggggcctatttctatgttatcgcatgtttatcttctactcgctccgtttcaggttacaaacgttttgacttactctaagtttgactattttttaaagaaaaaagtagtactatttttaacccaagataaatatattataaaaatttatttaattataaatttaatgaaactatgtcggtgttgtaaatattactatttttttctacagagttagtcaaacttagagtagtttgattttgactaaagtcaaaacgtcttgtaacatgaaatggagggagtattgttttgcatggctatgtcgcatgtttatcttctattgttttacatggctatagtaagttacttttcactattttttattaccacgatcaacaaatttattacaataaaaacatcgtttcataattgaacttaattttttcatatgaacacgaattttgaaaaaaattatatggaaactatagctctcaacgagatctataattttacatgtgacaactttttatttaaatattttagatactcaaagcatgattcaaatctcagttaggtaggctcaaatgaaaatatatgtatttttgtaatataattgatgcatggataagttagtaaacgcgagcgtgtcttgggtttaaatcctaaccatgacaagatataaaaagaactagttaggatgatagtttaatatttaaacttttaatttggtatttgtataactaatgctgcacatgaagtggtagcaataattatatattacaacgatgtgaagtgttgtaatatgatttttttgtcatatctaatttgtggcaatatcgaaatttgttgccactaaataaaaatcgttgcataacttattaccgctatatttattacatcggctatcaataattttaaaatgacagcaacatttatctatcaccatgattttagcattgatgccacgatttttttatggtaacaaatcattttggtagttgtgattttagaatggagatagtaataaatatatttccctttccaaacaatattgtaatggttgtgtgcaataatttttattctaaaatggttatattcgcaatcaaagggattatttcttcccatctcatagccaccccaatcaaacaacaatacacgcgtgataataaacaatgttggaattgggtaattgaacaacgaaggctgaagcttgaacatcaggggctgtttggatgggactaaagatttttagtccctgttacatcggatatttggacactaattacaagtattaaacgtatactattgacaaaactcattctacaaccttggactaattcgcgagacggatctattgagcctaattagtcaacgattagcctatgtgatgctatagtaaacatgtgctaattatagattaattaggcttaaaaaaatatcatgtgaattagctctcatttatataattagttttataagtagtatatatttaatactccaaattaatgtcaaacatgtccctatatccaaatcaatgaatagtctatccatacgacaaatgacaagtgtcgcatccaaaaatcgtcgaaaatttcctcggatccccactgcagggtccatgcttcattgatttgacccgacttttatactcggaaccattgcgtggaggctctcgagagaagggaaagagaaagactggttactgatgacaactttggaagctgccggtactgagcttgacgcgcatcgcatggccggccgctggctttggctcgaccggtcgtacggcctgggtcactctcactcactgtcaaacccgaatacgtgtggggccctttcggccgggtcgtatccggatatggctttcactttgcactttccatctactgcggccagtcaggccagatacccaaatcggttactgctagttgtttacatctatcgacgtagatgacacttcatgagtcctataatcaactcctcccgtacaaaatttgaccggcgttccagtgctcgagttacctggacatttcagcgaatcgatcgacacatggtaatgcaatactctctaccagcactaaccgaggcaaaaaccgaattaaatttaaaaatatattctcacttttacacaagcattacacgaaaatgatgtggacatgacaacgcggacggtctcacacgacaacggcacgagatcgtgtggtgttgcacgataaaacggtgaccgcgtggcctcgcacgacgaaataggtgagaccgaatggatgtggccgattcaaattgtttaattatcatgatcacttactgtgataattaatcactaattaagcggcagctcaaaagctgttcgctctcgctcattccttgtgcaagacagttcggtctcgctgtttggttgcacgagactgcgcggtctcacattgtcgttccacaacactgcggggtctcgcaccgtcgccgcgcgagaccgcccacatcattttcgtaataattatgcaagacctacggtatatttctgttaaaaaaaattacttcctaaatatttttgagaaaaaacaaatcaacagtatatttttaaatttaattcggcaaaaacctgcgtttccgcaagtccacggcccacatgatacaatggccaccatgatactaatgatcaggtcgtcgtgattgacttaaagtacatcatgacacgacaagacgaacgtacatatgcatgcatgacatgacaaacatttgcgcgtaccgtgcaaggacccccaacaacaacagcgacggaccctctagtaaacggagtcgcgatcaaccacgggacagatgcacgcactcgttttctcgtacgttgatcatcagacagagaggcgacgtccacagtttctcctcctctcggcgcgtctacgggatttttttgttttcttttacagcttctggggacacgcaaaaacgagtgatgatttgtgtcagatcgatccttccgtggcaatttcaggtcagagacgcgagtccgcccatgttcagacggtgagagggacgtcgccgcacgtaagtactccctccgtcttaaaaaaaaaaaaaccatagattcccgtggtaacgtttaaccgtctgtcttatatgaaattttttataattagtatttttattgttgtttaataataaaacatgattaatactttatgcgtgacttatctttttaatttttttcataactttttcaaataaaacgaacggtcaaatattgaacacgaaaatcagggtctgtcttttatttggagggagagggtaggcgcacatcacgggatctggggaggagtgggtaccaaatccacaagtcaccgaacgggaaagcgggctcccctccaaatcggttaaaattacggaaaggcgagtcaagaggctgcaggtagagacagaatacaggcgagaatttccggcagattcgccgcgccaagcttacgaccccgtatggtggcttcgttttcgcgctgggtttactggtagctatagctgcttgtgtggctcccgttcagtccgcttttgaggtttgatcaacgtagacccgagctgggactgtgaacgccgtaaaacttattgtttctgtttctgaaccgtagactgatggcagaggccagtgtagactctcgacctgtacgccgacggcagaggactaattctcaggtaagtaacagttgggccaacgtatcgaaaaatgatactaggttttagtaaaaatgaattctttcgatgatttggaagcagtttcgctaagcagaatcgaatcgtatgcgataccacttgatagcaatgtgagaccagttcgtttcgtttgacccgtaccggcccagtttaaagcccataactacccctcatgggcgtaagttgggataaagtccgacttgcctcctcaactccaatgtgattcgcatacctcaaaagtcaaaaccacaaaaccacaaaaccagatcaattaacctcactcggttgtttaggctgtgattccgtcctacgtgacattacagtagttctgtctaacctgacacgttgacttggtccacccatactaatattgctcttaaatggcaattatagccacatgaaaaaaaaagagaatagtggatcagccagtgagttctacctcgagacggccatcgctggcgagctccaagatatcgcccacatgaaactcgagcttagtgaaggtgggcatcgggatgtgccgacaacggcacacatggaacgggccttcctcacgcaggggaagcatgtaggtggccataattcctttctcgcatcagcaaggttaacgaaggagggggcggtggagccagaggtgggggcaatatgatagcggcagtggtatcccctcaaatcctcatatttgcttccaaggcgattagcaaagaagccttggcgtcgaacaaagacaaggagagagatgaggcactgagttgcagagaaggcgacaacctcggattcagctgccgattggctacggtgacaacccacggtgcagatctagctcatcgcctggaggggaactgtcgggtctcaaaactaatgattcggtaaccgacatgtttagactgtatcaagccctggatcagtagattgatacaggttcaacaatctgaatcttcattgcatacatttgaacaaggttccaaaggagatattattataaaatacatgggtatttacaaacttgtagctatctaatacaacagaagctatagaataaatcaactctaatgttttgctatagagttaaaccatctaacaatactagacttcaagactaggtttaaagtgaactaacttatgtgattgaactcccggcttcgataagaactccaaatggactctgaaaaaggtgaggttgaagcaagggtgagtacaacgtactcagcaagctattatattcaatatgaatgtatgaaatagcagtatttgagtagggctagatttacttgcagaaagcagagaatgtagaagaagaaagcttgtaatgactttaatgcaacaatatttagtaaaatctcgaattaggtttctaaccaaataccatatgaatctcggtactcaattccgtgagcacggctattcgaatagtttgatgaatatcctactgcagtagatgtacgctttacccgcagtccacgacttgccaatattcattagcttagtcatggcccagtattaggttattaacaattgtggtacctgttccatgaacttatatcctcatgcgctctgaacgtgacgttaactgcagcgagaggagttctggcgttaccggggtctttagagaggactgattgtatgacaccatgtcatcgcaatcagggttcacaaacgtgatcacaatatatctcaaatacatatttacctgtgcctcggtaaatatcacaattgccctactcggcgtaaatttgcctcctacacgaggactttaaaatagaaccactgtacagaggtaccacattgctaattaacataatagctaggtttgtccctattctagaagctgcggtcgtactcgttcgtttgacataagtatttggtataaacttatatcgactgagacagtactagccacccggaaatcaaccatttctaccgtactgtcccaatctaagttcattaaattttatgcataatctaactaggcagggctaagcaaaagctagcatatctggtttgctatatgttcaggttatgcattgaaaatcatgaatggctaatgcatgagatatcagagatatagaatacagggcatttatgctcaaaggagatgaataataacttgccttgctccaacgcaaataaatccgagataggcaacctgattatccgattctcgaaataccaaaggttgccatccaaaataaaatagactctactaagaaagacgaagaaccaatttcaataaaatccatagaatagcaagaaagagataaacagttaggagggctagggtttagggtatagtctatctcttttatagggtatatggattactgtgctaatatcttatgcggaggttctagagagttggaggctagaggggattaagcaactactatcgcttatatttcatatgtgggtttgattagtaggaggatgggaagtaactagtttggataatggtattggttaaaagggtatgtggttggtattcattggcggtagctaggtttaggtcgtatggaaactaaggtctagttgtcctcgagtcgatactgaaataggatagcatatcagctcggctctataattttatgtgtaggttctggtaggtggagagtaggtggtggagagtatggtggataggcgatactggtgggtgtggaatttggatgacaactggaatttgactgggaaggtattagttagggtttggttatatgctagtcaatgctagagcataacgactagatttggtaccttctctagccggtgtcaaccgacaacatattggctagaggaataggaggttggtgtaggtttggtggggcggaagtgttactccgacaaccgtgggtggcggcggagcggctaggattacacagagctcgagagctaactgtgcggcgtgctgtggaggtcgagggaatagtgaagctccgactgttatacgcgtcgaggcgtagggtgccaggagcagcactttgaccttgggtttgggttctgccgggctttacaaccaacggttcaacgtcggggccagtagatcgcgcgaacgtccccatgaaaggcgtaaatttttaaccgggcggcttttaagtggctatagggtattttggagtaaaaaggaaatatttgaaagtcaaatataaattcaaatggcatgaaggaatttcaaataaaatagtaaaatagcaaatttgatatcaaaatgtagcttttgaatttagatgaatttaggtccatgtttcattggaatcggatctacggtttaggagatatgggcttctaaagattagatttgaaatcaaatctagaaaatgtgaaataatactgtaggggcccacctgtcagttcccttttctttttttcttctctctttcttcttccttcttcttcctcccgttctcttcttcttttctgttgccgagtgagttgagaggagggagagaaggggcgccggctctccggtggatggaagactgtgactccggcggcaaaacgcgttcccgagcaacgcgcacttagggagggtggttgccgatagagaaggttagggaggagaccggaacggcgacggcaagagcttgctccggcaacaaaggaggtggctatgatggttggtttcggaagggaaaaggaagggtaaactaggaaaatgagttcgcctcgtcgaggcaaacccgatggcgcaagggcttggccagaaacactccagtgagggagatcgacgatggccggtggtggtttgacatgagaagagagagagagagagactgagctcacggctcggttgtggaagaagagagggggcttcaccggctatttataggtgtcgagaggcggtagagtaggtcggttcggatggagaacaacgaaggatgcacggcaatggcgacgtggggaagagacgacggcgccggcttcgttctccaattggctgttagtggcggcgcgtacacgcggcgaccgcgggaggagttgggcagctgggaagggaggacacggcacggcgtcggcgcgacttggcggcgaaggaagggcagcggcgacggttgcttggcggaggaggagggcaaggcaccgcagcggcggcgcaagttggcggctcggctgggtgttgggccggcttggactgaggaaaggaaaagaaggaaagggagaattcggcccaaacgtagaaggaagaaagtctaatttttcctggggctgaataatttgatttagaggagaatttttatttggaaggaatttgaatagaagattttgaaaggaaaatatatttggagataatttgaatagggaaggttgaaaggaaattatatttggatctaatttccaaaagagatatttctaatttgagtgcaatatttttggaagtggaatatggtggaatttaatgcactcaaatgagaggggaattaacaatataattcctcaatatatatatatgtttggaggagaatggttggaggtaaaataaataggatttgaatcctaaatttgatagtagaagtatttgaagaattatttgtggctaatagggaaagttgagtgaagaatataaattggtattttcttagcacaagagcaattattcacaatatttgcaataatactattcttgtgccgaagaggaaatcaagccacaggaattaaatcagtggctagatcaaaaggaagaatttggatcaagaatcaaaggatgggtttaagatcaaaggatgggttaataattaattccaataaaattggaattactttggttaatttaggttcaagggaaaattgggaaggtttcttagaccataatccataaaaaaaatagaaagggttttcaaactaattttgaataaagaaattttagtcaaaggaaggttttaaattaaaaccaaatcaagaaacaccttaatttaaccaactatatttttaaatgaaaaacacaaaagagattaaataccagagaggttttgtgtgagttagttttaggagaccccactaattatattgtttaggaagttattaagaacataagactcagcatgatgcagaattagaaaatggttagttttcggtatgttacaggaacggtggggatcggaaccaatcttcgtctatggtgtcctgtatctagcacaaaagcgtcgttttaaactttcgatgtcacttacatataggcttactagttatttaattatttttatttgctgactataaatgtcacataatcaccacataaataccacgcgtgatgaatatcatgtcaatgtaccatctagttggcatgtaggatgaaaacaaccatctaaagcaccaagggaagtaattgactcgattttgacagttggaaggcctatatatgtgattttgtggttgagggatgtgaattagacgatgaaatagttgaggagaacagatggacatcgttccataatttggtgctattatataaaggagcaaatggcttgcgtgaagtccgttgcaattggtgagatgcataatgatggggaatttttttcggttttagattttttttaatatttacagaaataatctatcgaccaaaaaaattgcaaaaatagcccctgccgcccacctctggggtggcaagctgacgtggcaaacatgggaggaacgggcggtgatggagggagggttttttgcaggaaaacccttgccgccctctggtggggcggcaaggggcccgaatgcaaaaaagtcagtcggggccggctattttgcaggcggccccttgccgccctctggccgggcggcaggcctcgctgcctataaaaggcctgctgcccagcccccagccctcattcttctctcctcaattccagtgaaaaaaaaagaagagaggggaggagaagagaagaaggggcgaagccctgccggattcagacgccgatttcaggtaatattcatagatcctatatgtgactattgagttaaatagtgtgtattctttaaaaatttgtttgaataaatgcattatatttttagggttttagttgtactaatctagaagtgcgtattgtagatatcggtaactacgtagatctgctagtttggaattaatacattaccgttgcattggcttacacaagaagatattacgttgtagatgtttattgcatgaaagagtaatatgatctagttatttcgttgacagatatgtcgaacaaacaaatattccaagtttaccatggaccaggaaacgtccgttacgggccaactggggtagatctgttagattttattgtatcagaaaggggaattgatagaccggctgagaggagtgtaccttctataaaaggatggttaatgaggggcttgagagttgatccacagacaagtgacataacaatcaatgttatagtaagtcgggcaactgagggtttttattgggaactaatgccagttcaaaactcttgagtgtggagatggtatttggaaaatgcattgcaacgcgggtggcctctagctttggttccgtttgttcacccaaaggatccaggtgtgcagacgaacatggatgatggcgagggaccaagtgctaaagtaaacgagacttctgtggaggaggtcaacgcacgagaggacgggggcgtagtagctccagtgggcattcaaccaggtggagtagccgacgagggggagactgtcggtgccattgtggatgaaatggagagggacgattctgacaacgagcgtgtagaggaaggtgattcgtcagatgatgagacagatattaatccagcagaatgggctagtgaggatttttctgggctgatcgtctctgaagaggatagtgtgagatgggagtacaaagaaaatgaggttattcagggagcgatttatagtagagcagaagatatgaaggaggcggtaaaacattttgcaatgtcacttcatagagagttttgggttgccaagtcgaaccggtcgcaatatgaagttcggtgtgttaaggaaaaagatggttgtccctggagagtgcacgcgtataaggggaaatggaaggattattggacagtgtcagttgttaccaagcatacatgttttctacctggtgttcagaaataccacaggaacattacatgtgcatttgttgcatctgagatgtatgcgcatgtcatcgataatctcacatatgaaccaaggtcaataatccgacacattgaagagacatacaagtatactattagctatgccaaggcctggagggccaaacagaaaataatagagatgagatttggaacttacgaagcctcgtatgacaatttgccacgcctgcttggtgttatcgaggaaagaaaccctgggagctcttacgaagtgaagaaattcccctcaattgaacatcctggcaagagtgtgctgcaaagggcgttcttagctctacatgcatgcaagatggcattcgtgaactgtcgtcctgttctctgcattgatgggacattcttgacaggaaagtatcggtgccagatactaacagcaataggggtagatgggaacaatcaggtattgcccttggcatttgcttttgttgagagtgagaataccgacagctggtactggttcatgaaattggttaaaacaaaagttgttggtatgaggccaaatgtatgcctgatacatgataggcacgctggcattctgcgagcgataggagagttgcagtttgggagtatggaatgaggataccccggtgtttgggaagatgtacagagtaggtggtgcatgcgtcatatgggagctaatttcttcaagcaattcaagaacaaggagctcatgaacatgttcaagaggctgtgcaatcagaaccaggagaaaaaaattcaatgagctttggaagagattagatgagttgacagccaaatgcagtgatcagcgtgcagcggctccatcgaccgccgttgctgaccctcctcaagctcttggacctctcccaacggatagtccaacattggttagaagaactggattggagattcggaaattttctcagtggattctgcatgaaccaaaagagaaatgggccaaggcgtatgacacaggtggtgctagatatggaataatgacaacaaatttggcagaagtttacaactgggtgatgcgcggtgtccgtggactgccactagttggcatagtggagttcattttacatgggacatgcaggtattttagggatcggttccaggcagttcttccctctatgccgaacaacaacattttgtttggagctttcatgcagaaaaagctagaggagttgcgtaaaaaggccatgaaacatcgagctctagtgcaaggtacccaacagcacaggtttgagatactatgtcaagataaggcaggcaggggtatctaccgcaagagagtgaagcaggagtgtgttctcaaagccgacggcacatgtcattgctcttgtgcaaagccgaagctgctctacaggccatgcacccatgtcattgctgccgcagcggagtgtggcataccagatgcagtatatgtgtcacagtactttagtaagcaagcaatatatcatacatggagcggcgagatttatgggttcggcatagctggggagttcacagagactaacgatgaagtactcaatattcctgacccatcgaagctccgaggcaaggctggaaggaggaggactcgtcgcatccgcaacgatatggacgagtcggaggctggcagggtgaagcgttgcagcaaatgcgatgaacatgggcacacctacaagcattgtcctaaagacaaggagaaaccaagtgcggcggaggcaggactatcaggatcagcagcagatggagctcgccctacgggtgaaggcactacctccactcgaccacgtcctaggcgtcgtcgtgccacgtctggctacgtggtgtagttcttatgttctatgtcggcatgtggatttgcttgtaattcgtttcgaacttatcgatgtgtttatgtttcgtcatgtaatgtcagacttcggcatgtcatgtctttaggtctcgtgatataacgtcggactaaggtgcctaacgtctttaggtatgctgatgtatgtcggacttcgacacgtaatgttatgttatattattgaactctacatatatgttaaattgcacgtcatcgttatgtaccattagtaacgtttgctatatttaaatagcctgtactcttgttgtacataattaatctcatgattttattactatttcataattttgcaagttatcttttgttttacagtactattttttgaattgttctaacacgaaacactatatttttcagagatggcacgtcaggatacacctcagttgttggacccggcgatagatcaccgacaccggtctcaccttactgcggtgcagggggctcagcttgggacgttccgggcacggacgtgcggtgagctactcacggttcacgactcctttgtcgagaggtacgaacagtgttttactataagttagttgcactgtaatattttttataatgacatattaatttgttattgcaggcttcactttccagtactgtatgcttgtgtaatgactacgttgttgttatatgtgcacgatacctttcggcgcatgcacgactactttctgccgcaccgatacagtctcctttattcgcgtatgatacgagtatttgcccgccatttggcgcatacgaccaatgtaactttcggcgccgatcatgcatgtatctttcggcgccaatcaggcgtacccaccataccccaccacgttcacatgtcaggggtatcactcgattttttgcgcctatataagtcgccttaacgagtgaggcctcacaatctttcaaaactcagtcacattcagtactctcttctccacttgcttcattacaaatccgaccggctttcgtcaatggctagacgccgaggtgttgaggatccaaactggcgtagcgatccttgtgtatacctactaccaccttggtgccagcgtcctctctgcctatgcggtgatcgatgccaactaatggcttcgaggaatcctgatattcgaggaaggcgcttttttaggtgccctaactatgaccgtgaggtattttattatctgcatatgcttattcattccgtatgggcaatcgctttattcttcgtaacactactctattcggcagacgcgcactacggcttgcgcatacatcgagtgggtcgatacagaaaatcccgttctcgacctaaccacttgtttacaagaaggtcgctggtatttcgcatccgaaagtactgagcaatacttacagagaaaagcggcttatgaacaacaatgtcgtgaacaacagagcgactggcgggtgttaactatggcactccctccatgggaagcccgtccaagatgcaggtgtggtgatcgttgtcaggttcttcgttccataaatcctacaacattgggtcgaaggttctttgtttgtccaaatattcttgacgacgatttcatggtaagaatattttgattacatgaatccttattttctcacaacatttactaactttgcttgctttacatctattctttcctcccaggaaccaccaaggagatgtcaatacacagaatggatagacaccagaagggttctaactccacctagccgtgttgtgcagcttgaactaccagagaaatacagggttactaaagcgcggtttgagagaggagagggatcctcacgtaggggttagctattatcggacaacttggcatattgaaatttctactgtcatgcttccttgtcccattactacatcgtcgttgtgttcaactattgcactacctccctcctagttcgaatctaatatcatctatgtcacgcccggaaattcactagtaatttccgaacttatttgtgcataaaatcctcgtccaggaatcagccgaggtacacaaactgacaatttaatatacaaatccatcataataataacgttacacacttacaaaagaaaagaaaacagcagcggaattaacggtctagcgatggcttcagctccactcccacaggcagctcaactggggtataagccaaacgtcttctccttctggatcctttttcttcaactgaggttgattgattattgcaagaatgagcatatgacatactcaacaagccacacagcaaatatgcaagtgcacaaggataccaaaggatggcataatataggctcatttgcgaaagcagcatttagcaaagagttaagagtagtaaaacagtagagtaattaattaaaaattttaatcaacactgaacagcacacccatgctgtacaggcccaaccatcctgaacaaccatacccggctgtacagatctaactccaaaccaggagctaggcaaattattatcaggtattaacatccataattattgtgagaggtgtgagactaatcacgaaaaacattgctcaacccgcccataaccgcgggcacggctattcgaatagttttactctggccagaggtgtaccactgtacccacaagacacaaccccacatcatgtcaccatgtgcctcaataccaccacggtacctcggaaaggagttgtgacaataccccttgcacaacataatccattacagcgcacctttcctggatcataatcaccccctcaaaaaccagaggcatggactctccagcgacccccgtggacttctcgccacttctcagtctggcgcactataatgaatcacgctatacaaaagataaagccgttgcccacgctggcttgtggttggcacggtaaatgtctcacaacagtagctcgcgaaccggtccttaattgtcatgagcacgactctcaaaaccatgtgctcacaacccaccattatcaagttttagttggcaagtaattaattaaccaatcacgattaaccatcgtgaactatcattaagccatccttaaataatagtgagtcataagttatcccaatagtgtgctaatgtttctaagcatggctaagcaatcataactaatatctagctgaaccaatatataaagcccaactagtcaagttataataacccaaggtatcaaggaataaagtaatcaatgcaaattggccataacaaaggaataagttcacaccactcggtgacattcgaaaataaatgcacagttgaaataaatagagaatttaaatataggatcaacatgctcaaaggattgtgtttaggatctgtgtgacttgccttgcaataatcggccttcaagtaatcttcttgatcacttccgacgcactcacgaaccttcgcaacgacggaaacgacaagctaacacgcaaaacgaagaaaaagactaataaaaaccaaataaacagtacatataaagtaaacaaacatgtagatcatgattttagatgaatttagcaacttgaaccactcaaaaccgagttacgatgatttagttatgaatttccgaagatttaatctattagaaaaaactggaaaaggagaagatgatgacgtcatgatgacatcatcaatggccggaccaagatggcgacctcgccggagatagagcgaccggctgcggatttggaggacatgaacacgtagaggacgacgagacgaacccaacgatactcaccctcgtgccaaacgacgaccgacgacggccggcgacgaggaggcgacggcggcggctcgggttgcacggggcggcggagctccgatgaccggcgacggaaaaggaagggtggccgagcttcccctcaccacggcgcacccaacggtggtgacggcgaccggcgacgacgatggagacggcggcgcggcggcaccggagatggccggcggcggcggtttgcttggcggcggtggcgacggagctacggagcacggcagaggacgggagagggggcaaacgaaagaggaggactagggggtcctatttatagccttggattgaagagatcggactcctcccgcaagaaatcgatccgggaaatcaaaaactcggttttggagataaactcgaaaacgagtttgattcggataagatactcaacgatttgctccgatttttgggggtaaagatagaggaggataagaggaatatttcccctcaacaaaattggagaaaaagagcaacggggaggcgagaattggaaggaagaggcggcggcactgtgcacggcacggctggctcgggctctgcctgagttggaagatgaacagtagcgcagggagggaaagtagacttttccggctgagctgagaggagaggaggcggctcaggttgggccggcggaagagagaggaaggaaaggaaggaatgggccgaaaatggcccaagctgaggaggaggattttattactttcccaattaaaataatcacttaaatgatctttgaattattaaaaatacttccaatgctcaaataatttcaagaaaaatcctgaaaatacttggacactcaaagtacttaaaaaaattacaattagaccatttaatgattaatttaatatgtgggtaattactgaaatgctctttgtatgattaaaaattaggaattgagctccgaaaaatccgagaaaattccagagagtataattaaccatggagaatttaataaaaattaaatccatccatgctttatatttaggaaattttatttcccacatttaacttcacttgtaaattaatgaacatttaatataaattctattattaatttattaaacaatttataaatcctgaaacgaaaatcaggatgtgacaatctatgtaaccgcaatgcaaatagttgtatcatgttcaaattgtactactatttcttcatgttacataattctcctagtttaagtccatataatgtttctacgacccagactgcgataagcctatataaattatccgagtactaatacgtcgaataaggtacaaaataatacctcacttaacatatgaaattgcgcaacaaccaacttcaatacatttttataacaatattaacaagttttaccaataaatacttctttatttattattaacataacatagaaaaatcttttggccgtactttttcatctgggtcctttgccgcccagggacccagatgaaaaaagtacggccgcaagctctttatgggcggccaaaattgcaattagccccttgccgccctctgtacgggcggcaagggcctaatcgcaattttggccgacggcagcagacggcgcggtcgacccaccgtctgccacgtcagcttgccgcccaccattagggcggtaggggctatttctgcaatttttttggtcgatagattatttctgtaaatattaaaaaaaaatctaaaaacgaaaaaaattctaatcatgggctgctcagtctaaaagtacaaaataatgggctatcgaataatgatgggctgctcagtctaccgccccttgcattcttcattgaaacaagttcacttaacgttaacgttccttatctttgtcatcaagttttaaaatcgtctctgaactggaatatcagataaaatacagctctaatcttacattcgacccgcatttcagtaaaacaatatattcttctttatctctatcctcatcttttacccttggcggcggtagatgtggtggaggtgcacgggcaataggggggccagaggtggtggccggtgtgcggtgtgccccacagtggacgagggccagtagtcggtggaggcgcacctcgtgcaggacgatgtaggttgtacancagagnngcncgggcgccncggngcnatnngggggnnacgccatcggcgggaaggggggggggggggcgggtgacgcctgctctctcgtgcaagacggcacgggctaggcgggcacggccgcacgggggtgtcgtcatcggtgctagcgttcaatcgcaagccacaggtcatgatccccagcatgatgtcgtggacgtcaccgggctcgagttccaggagcggatgcacctacttgagcccttgagcaccttgtccgtgccgccaaggaggactacgagcacttcctcctcaagctcaggcagcgcattccgtggagtcattgctgacatgcggctcatgcagttgacaggccatgagccctgacttattgactggatcatctctctcatcttattacgcacatattatagctatcatcagatcgatcgactccgatagtaaaaagaggttgtttggatgaattccatagtataccacaaaatatttagcaaagtgtggcatgccacacattttatggctaaaaatttgttggccacaattgtggcaagttatggcaaaaaaaaaacgctcaatgacaagtggaccaacttgctaaaaaattgtagcataactcacttgtggcatgaaccaaacacagacctaattggtcaagcttcattgccacaagtttggcaaaggttggcactcaaccaaacagccctaagttgcagcatacaagtcacaagttagagtcactacgatatgtattctaattatcggtccaagagaaaccaattaatactccctccgttccattttaagtgcaaccatggttttttcatccaactctaatcgtccgtcttatttgaaaaaaattgaaaaaaaatttaaaacataagttatgagtaaagtactattcatgttttatcatctcataacaacgaaaatactaattataaaaaaattttaaataagatggacgatcaaagttgggcacggaaacttatggttgcacttaaaatgggacggatggagtatcatataatcactgtcagtgccatgccatcatcagcgtcgttggtgttcgaggcattcggcaaggatggcgacgacaaggtttccgtgtccgagttgtgcggcgacatggcggcgacgctcggtgaggacatgcccgaggaggaggaggcggcgatcctcactacaatcaacaccgacgacaacgggttgttggaccatgacgagttgctgaggttccctgatcagttgcaggaggcggacgaaaagaatacattgtttcactgatataagggtctcacactctcacatggttttttctatatttttttagtgtcacgttatccaaaccactctcaatactgccttggtgtctaatgtgacccggttttataatactagagcggttacgcgcgctacgctgcgcggctgctaagagatgggttttatctggtacgtactggtgcagtatatagaaaacgtatttttggtagtggaggtatgtcaagctgttattatgggctgatcgtgcaatgccatagaggagttatggccttttccttttatgtttgaccttgggcttttaaagatgtatagtcccataattagtgggctggttttgggatttatgatgcatggcctttttgagttaagctcggttgtcccagggcaacgtgtcatggtgggattgcatctgctttgctgaggctggtatatatgtggtataactggctgcttctttatgctgagtggttgcggcggcgctgctactgctttgttagatcttgttgctgtaagagggactatccagttggtatggaggaacctgcacaaggtatgtgtattagtgtatttgtatatgctccgattaatcttggggacctaggtatactcttataaatttgtggtgctagttttgttcggtctcttgcatcttgtttggtctgaaggagctgtgtatggggcgcaggaa

SEQ ID NO: 5288 - DNA, 15620 bp, Oryza sativa
cccccccccccccccccccccactcgagctgcctatctccaggtaacaacgctggatacacatacaaaattcatccattcacataataatcaaatgatgctgcagaaccaaagatgcatggagccaagacagccaggctccattggagagcttctgcctgcagatccagacaaattgtttactactaatgcatcgatcgaaaaagatgagccaatctactgcacagaccccaacgaaaattattagtgtaacagaggccagttagaggttaacaaatggtcaaatcatggtttgtccaagctttaggaggctacccccgtctaaggatacaagacatacttagaaaaaagtctactaacttagtttaatactgctcacccaaagaaggcagaaaggctaacaaaacaggctgaaagataaatcctagcaggtcttattctacagcgacaaattgaagcttcagctactttagtacatttggtaggatcacctcactttttggccataacatcagcttctttttctctgccagctaagcccatttcgtcatcacagtacaaggattaatctaagcatataacaaatggtacacaactttactgccttgggaaggtattgtcaatctctctatagcccgcaaggtgtcaaatatttgacagcatacctggatctacatgaagggaagatcaatgttttttcaccctccgaacaaattgattcagactgatcatcaagccatgtcgccaagtgattgacttatataccatcctaacatcatactagcagtacattacaagtgcatcaccagcaacctgaggcagcagccacaatcacccgacaaaatcatgcagcaagtgaccaccaatctccttcccgaaatgccggtcctgacctccaaatgagctcatcacataggcgtcactgacttcctccagtccgaaacggtgagctaggttggccgggagagcagccgggagaggctcggcgatgcagaccctgttgttctggtgaagaccaagggtgagggagacaccgccattgccgcctccgataccaacaccgccgacctgctggtgctgatgatgtggtgatgcaatgttgtgctgcgaggtcagcccgttgtatgcgaagctcacctgtccctggatggactgggacatctgggagagctcatccgggaagccctgggaggcagcggtgttgtggttccgagttatgctgctgctctgtccaggatgggagtccgaaggaacggagggattcccgctgcactgcgaagaatgctgggcctgatgatgcacgctatgctggcccttgtcaaccaccgagtgcttgtgcatttgcctcatctctaggttgtgaatttcttccaccattggcttccacaacctaacccttgcgttgataaaccagttcgatacctgcaccagcatcacaaattcaatcaaaatgtcctgaaaacaaaacaatctagcctgatatactgtgcaatctattcttgaacacacctagaagcatttctatttacctggttgcgtgtcaagcctgtttgttttgctagcatttgcttatcaccatcggtaggatacctgcacgattggaatctgaaaatgtcactgatgcaaaattatagtgttttctaaaagaacaaagtaccagatatagcgcaaaatcaaataatcaagaaatttccgctattacaaaagacacttgtgatgtgcatgcttaacgatggtttacaggatcacaacaaatattttacatggcgaatatccaagcaaagatgtaggcaaacacatcttccaagtcgaaccttacaaaggatttgatcaatacgggaactaataacactaggaccaacatctgacaaataatggatttcagtgactttttttaaagatgatgactgatcctttttttaaagtaataaacagacagacaaaccccttactggatgaaaatggctagcactaaactactgtactaattatctcaaactgaatatctcgagcacatgtcaatcaacttgatgtaaccaccagtagggcttagctacagcctttagatcatatatataatgcaaaatgatcatactacaaaaactaaaaagaatatgccaaacaaactacattatgatgatgcttattatagcctaaggtatgtacttttaagatttagttcgaagtaatgcccatctggcaagttaattccagcattaacgtgttctaaaagccactctacttatgagaagccgggccaccacattcatacattacagccagaaacaacaaatccaggaagttaatacgtgattaagaatgcatcaaacaagcagcaggaatgccactatttagatcaccaagtcgaaagtatgatctctagtagtacagctcaacacacagttaggtacaggtttaaaagttatgttaatgatggattggaagccatgcctgcatgaggccatagccttctatcagacaggcagggtcgcttgctatcaccaaaccatcaacggatcaaccccacggttccagtgtcacgtactactgatcatatcaaaaaggaacaaccacactcaccacaaatgcttagggactactgttatcctcatctaaagcaagcaactgtagcatcatcatcattgtcttggaatgcgtgcagctaatgaacccagagttaaccataaagcaataagaagatcaaagggcttacgggtgcaggaagtgttcgaacagccacgcgcgtaaaacggacacagcgcgctcggggagccccctctgtgggcgccaaatattgtgcggctggccgaacgcgctcgcgctgttcgctcgctggaggccggcgccgccgctgctacccccggcgagcccgaacacggcgatctccttgtttagcccgtccttcacagcgaccttgttgctcgtgttgcgcagctggttcagaatcatgctcttcaagcacttgaagtgcttcgccatcgccctcagcgccaatgccgcgaacggcgcggcgttgctgaacccggcgacggtctcgaacgaggccatcacagcctgaacctgctggtagtactgccggtacctcttgcaaacctaaaaaaagatattgctgttgggttagaattcgatgagagataatctaccaacaaagaatgattagataaaaagatatccatgttaggaaaaggaagcagtgtgcttttgttttcatgtggatatgacacgaacaaagcaagcgtagctcccaattatgggagagagatgttattgaagaacacaggcaaacaaaattgccttacagagggttccaaaaatagaagctttctacattgtactcctacgtagatgctcatgtagtatactcctaattgccatgctccgacatcgtagaggagagcgcatttcaaagctcgaagcttttagcagcgccactattctcaccagaggacaccaacaagagagaattaatggcatctggcatcgcccatgggtcatgtctcaagactttgaaaggacggttagttctaatttcatgtggaggactatcttttcaagcactcacagtagtgctaaacagccgatcaaaatacaatctttggtgataagacgcggaggaacactactattcatcatgaacagtgcagaactgtacaagctcaaaccactcgaggaaaaagaagagagagaacaaatcaaaagatgtatcagcagcaaaggaaatcatcatcaaatcaaaagcacatgcaaccacagtaaataaaagcaatccgcaactgcatcggtgacatgaccactatgtgcaagattcttctccacccaggagtagcgataattgtaacgccgaaacaaggtgaaaaagatggtcgccacaagaaacctggaaggaggaattgaggcggctagcggagctcactcacctcttccatcatggagatgagcttcgtcttcttccactgctgctcggcccccgagatggggccagcgtcggccgctgcgcggtcagcgccgccgaggtcgtgatcaacgacgtcatgatcgacgccgtccatcggatccgcgtcgagcaggccctcgtcggagatggtgcggtcgacgtgcgaagcagcgccgccgacgtcgcagatctcctcgaacagcttctctgccgggccgaggaaacgggaccggccgagcacggcggcgtagccggtgaagggaccgaacggccccgtggcctgcgcgaggccgccgagctgcctcctcggctgcgcctgcggtggtggaggattcgacgacgcggaggagagcgacagcgagaagttctgcgtcgggatctgcgggagcggcggcgccagcccgtgcgccaccagctgcgcctgcgctagagtagggctgtgcggggagtacgacgacgacgaggacgcgtacgagtagaacgccgggggcggaggccacgacccgtgctgctgctgctgctgcggggcatgaccatgaccatgaccatgaggcggtggcgagtccccggcgtccggcgggaaccggagcttctcgcgccggctgtgctggggcacgtggtacatctgcccgcccgccgccgcggccgctgccgcaacggccgcgccggccacgtgctgcggatggtggtggagcaggaggtgaccggcgtgcccgtggtggtggtggtggtgctccgcgcctccaccctggccgccgccgtacccgccgcccccagcggcggacgacatggcgcgcacgcacgtacggtcgtgggtctcttctcctcggcgcgcgcgcgggtgggcacgtagtacgggtggtgcgtgcgaagaggcgcagcgcagtgagcacctggccctggagagagtggagatagaggggaaacggctccgcactttccgagcgcccgggcctggcttggctggcctggtctcactccctcatcactctcccgctctgcttctgctgctgctgtagtgtagcctccctctcccaccccgacccctcgcgtcctcttgttgttttcctcctctttttccccgtttcgcctttgtgctgggtgttgttgctgggttcgtggcgcctttctttctgcaaaggcgagacacggagggggagaaagaggggggtggcgggagggagagatgggaaggaaatggtaagccgtgaaactgtgaaagcgaaagcagaaaggccgagcgcgacgggggagaggagtggagactggagagcgcgcatcgcgtgtaaaaataggtgcagccgcgcttgtcatccgagtgggtgggtgggctgtttggctgccaggacgtgtccgggcctgcagcgtacttgcccttggcgcggcgcgatcagcccttggctggctcgttacgagggaaaaaaaaatgattttcatcttcccttgttttactgcggctgcccgcggttggtactcccacctgtgggggtttgaccattccaagctacgagtagaaaacattccatgtgcagtgcgattaagtcccccattataaatgttgtcctaactggctttcgtacaaacacccatctccctgctttcgaattccacctctgctgcagcaacaatttttgcgtgttaaccccagtactctgtacagggctgtcaaacgacaccaaaatacggtttttatcgcaagcgtgtccacatcactacatctacatgacccaatcccttggctgcttgtgtatagtgtagtactggggtagtacaatactggtcgacccgcactagtagaagcggcaaatcatacgcgccctttaatgcgctgccctccccagagcaagccctccattgggcgagtcctgacgcccgggcccacgactggtcaccacccgtaactgggcccgcaagtaagcaatcacccctctgggccccacccatgacaagacctaacatagcacaccctctggcccacggcccgtctcttcctccctccgctccgagtcccccacgcgcagctccacaccgtcgtcgacgcaccaccgacaagcgggacccacgtcccctacccggttttccatacagcggcgcgcaaccagggatacgggggagagaatcccacctctctttcgccgcggctgttggctgttgcgtcgcgtgggacgtcaccgggggacacgtgccggctcctccttgggcgcggcatgattagcaaagctacgctacggcggagcccgtgacgtggctgccgctgccattaacttcaaatccacccgtccattcatctagccgtagtgcacagagagagaataagtgagcaaaagatacgaggagtacgagcagagtactggggtgtgaaggaactacacctccgggcttatgcctttgttgttactgcagggaccccctctgtagactatagtgcagctaagcacggctaagctactgcctagtgacctctctctacatggatcaacagaacaggtgaaagtgattctcactcggtcagaacagtggcaggacagtgccgccctatcgccgcgggtcccacctcgcagtgtcgacgcgcactgctttgctcaacatttcgtgcatgtgagcacatgaacaggtgaaccgaggcagctgctaagctttggctacctatccccacgttaaatatcttcacgtttccaccgcttccgcctcttctgcaaacgcgatctcacagcgttgcatgcgaccgagcggggctcacgctaagccaacgtgtgcacagcgaacccacgaagcactgctagcacgtactactactacgctccgcccgcgcggtgtttgccacagaccgtcctataccactacacatattttcccgtcgccacagcgcgttggaaatcgtttcacgggggcagacgctgtgtattggcagcggcgcagcgctgtggcgctgtgctaatcaggcaggcagagacacagaacagaggcaggagtacgcacaccgtgccgatgacacgccgcatgcacgcgtgggcaagggccacgggcgcatgcacaccgcaacgtgtatcttctccccagctcgtgcattaggccgtcgcccaagctggatggaccagcttatcaacttgtttatccgagctttccgccttgccgcgagagtcgagacgaagctgcccttggcgccttggcccctcgccgtcctcaccttttcgcgtgtcgatggtacgcacaagtgtgcgaccggctggagtggctggaccggggacccgcctgtattttcgcgcagttcctgtttcgctggatcgcatgtggacacgccgcgttttccctgtttctcgcagcgcacgtgttggctgctgcctgccatggctgccgcacacgccaaaaacgtacgtgcgtttcgtttcgtgcgaccctgctgctagctcatgtgtcccgcccgggctcccgggtgcgttctaaagccaaaagcaattatttttgacgtaaaaagaaggggtagaaccagggaattacacggagcgaccttccagctgctgtaccatagcatatttacagtggagtgaaataaggagaccgaacttttaccagtgaactgtgtgaccttgagattctttagcattaatcaacaacggataacactacttaaaaaatcttcatagggaccggtattataagagccaatttatttaaaatcgacatctatgatctttttctcaccttcccacgatgaaaaaaatatagaaccggcatatttaagcactatagatatcgattctgtttaaaaaaaactcaatacatgcactatagatgcatatttttaatagaactgacatctataaaatgaatatggatgctgatttttttaaaaaaactgacacctgttaaaaaaaacttaatccgtatatgtttgaccacccacagcacccttatcttatctatccatcccgcttgccatccatgcatctctcgtccctcctctccctttgccttcctctctctggtggagcggcggcggccctctcctaacccgggggccctccccccttctctcctcctctagggcagcgtggcgatggagaaagccgaccgatcgggcagggtgcggccggtgcggtggctgacagatagatcttatcagccccgtcctcaagtgcggcgagatggcggtggtggtggaggaggcctggatcttgctagccctctctctcctaggggacctccccccttccccttctcctcctctagcatggcgtggggtggcggccgggtggcaaggtggcggcgtggtcatcagatctcgtcggctccctctcacccaagggacctccgcccccctcccccctccaccaatgcggcattgggtggcggccaccggcgtggaagccagcgttgcgttttttttaataaaccgacatgtataggattggagcaaacgtaccgaccatagctagttcataaccgttacttatggggttttctgtcttagtgtaaaaggctcgttttaccgtccagttctagctgggctatgccaaattttcaataaaactagaaagacttaattaaaaaaatattattaattaaattattactactaattacgtatcatcttgataattgaatatttaataattaattttaatagatactaaattaaaaaaactacttccttttacatttattctactccctctgtcccataatataaagaattttaggtggatgtgatacatcccaatacaataaatcttaacaaacggtctatcctggatttattgcatgtgtcacatccacctaaaatttcttatattataacggagggagtatataacgataatgtaaaagaaagttccttttacatttcaacatcataatgtcgaagcaagaaaaaaaagaaactggtttacttcctctatctcataaaataaccaatacttagatgtggcacattctattactatgaatctggacagagaatctatcactgtccagattcattgtactaaaatgtgtcacattcaatatggaacggaaggagtaccgcgaggtactgtagaacttgggagtatgtttgaatgacacttcgacagcatccgtgccaacgtatacgatgatgcgtatacacgaggtttttgcccttttggacatccatgatatactacgcgcctcgtagtccgcaagaaatgagtgcggagtagatcgctgatcgcgtcttcccgtcgaaattttttctcatcatacggccactcgacgaccagctgcagtaccaggtaccgaatcactctactcctactagcaacgacagtaaggtcaattcagagaagcctgcatgccaccgtttctttccctctctctatcttttctgactgatggatgcttgtcgttgtacgtatctgttcggttccttctctcttcaaagacgttggctaatcacgccctgcttaggggtgttttagatccacgggcgtaaagtggatactattaggatattgcatgaggtgttcggtactagaaaaaaactaattatataatccattagtaaatcatgagatgaatttattaagtctaattaatttatcattagcaaatatttactgtagcaccaaattgcctaaccatgaagcaattaggcttaaaagattcgtctcgaaaattagtcgcagtctatgcaattagttattttttagtatttatttaatactttatgcaggtgtttaaacattcgatgtgatatggtgtaaaattttagggtgggatctaaatacccctttaccacattccatcaaaaactttacaccctgtcacatcgaacgtttgaatacctgcattaagtattaaatataggctaaaaaaagaaattacataaattgtgactgtcgacgtttgatgtcgcgattgcggtatttgtatagtatgtggatcgttggtactaggatatacgcgagactgaggtaaaagagacggagacgaggattttatacaggttcgggcccttgaatcgtcaggtaataaccctacatcatgttggtcgaagccggtcgttacttttattcatcataatcacaccagtacaatatttggggtagcctatctaactgttatcgacatggcggtttgaaagtctgactcgtagtcgacaacagggtagtcttcctcctcgagttcgtgcccggcgagatcagagacagcactagatccctatggccggcctttgtaggtaccaaatagggctgatccaggcatatctctgatgtcgatatccggcggcttgtcttggcgtatgttggcttgtatgttgtgccttctattgttccgtgttgtctatcgtaggtgtcttccatggtgggtgtgtcccctctcctcctaggaggtcttctatttatactcataggtgtctccttgtccaagtagaaatagggaaaccaatatggatacaatccgagtagtcattgtcgttttcatatagaactctggttatctttccttatccggaactccttctgtatccgcaggttatttccgtatagaacatggtatatggtgagtcctgccgagatttagttaacaactattatgtatgtggtatccataaccctgacagtgactaatttgcgagacaaatcttatgagcttaggccctgtttaggctgtgtttagttcacactgaagtttagaagtttggttgaaattggtacgatgtgatagaaaagttgtgtatatgaaaggtttgatgtgatggaaagttgtaagtttgagaaaaaaagctttggaacaggtctccaaacttcaaccaatttcaattaaactttcaaacttcagtgtgaactaaacacaaccttaattgcttgctccatgatttgacagtgctacagtaaacatttgctaatgatggattaattagtcttaataaatttgtctcgtattttgctaacgaattctgtaattagtttttttattagtatacgtacactctatacgacaccctatataatattcgatattacacgctaaaactttacatatgaatttaaacacccctcagtctcatccatgttaagagtataggattaggaatttaggagtactccacgtacctgtatgtaattggagtgtactgtagtatctccggatacggtggatggcgtggctctcagtcagctgggactactggcattcaaagcacaaagcgactcccaagtctgaaccctctcagatcagagtatcagacgctagctgctcctacccctactcctagattacgtgaagtacttctacgtcggcctcctctggagctagccgacgcagcggtagtagtagtagcatctgattgacgtgcgtcagggagcaccagatagcttgggttaacgtggagtacaggctccaaaatctctttgcttactgcctcactccttccgcatcatccccttgtcattagaccagtgatttgacaccgccctgcatgaattctcgttctccctccgatttgaacaacatcggtttcagcaatcggtgcatacagatacaataggacacggcacatactgtaggggtacgcaattgcagtatccgaaacggatgcatatacaccgataccgcgatattatctccgtactaaaatgtattccctccgtcccacaatataagcgattttaagtttttcttacaacgtttgatcactcgtcttattcaaattccttttgcaaatataaaaaacgaaaagttatgcttaaagtgttgtagataataaagtaagtcacaaataaaataaataatatttttaaatttttttaataagacgagtgtgcaaccgttgcaagcaaaaactcaaaatcccttatattatgggacgaagggagtagctatttctagcacattactttgtcccaaaattaagctatttttctacctaccttctcctctcaaccaatcacaaccattctttttcacctactttctcttttcaaacaatcacacaccttcttcaatcattctcatctactttcttaatacccatgccaacataaaaaatgcttacattttgggacgaaggaagtatgtcatatttttagaatatgggatatgatacggacgtattgtcgacgagtgatactcgtgaaccggatgagttgagtactagggtatgttggtaggagggtctacgtaatacgacatcaagcagacaaaggacaacgattatactggtttaggccccttatcaggtaatagccatagtccagtttatatgggatttatgacgagaacatattacaaagagagtagtcgaaatagataataccgacgagaccgtagtcgaaggtttcgacgaaatctcccggcgacttggctccgcgtactccgacttcgtaaactatggtgggtgtgttggtgattgaattggatgatccttcagccctccctcaggggttccttttatatcgtggatcagctcaacttgacctccaagaaaggtttgagtatgttggatctggtacggaataacagaaactatatcccttccgagtaggattttgaaaataacttgactcgtagtcaaacaatgcaagcaaaattttaaaatcgacggagagagtattataaaaaattgaacatgtttttgccggtattttgatacgtcatccgtgtatgagtcagtttttaagttcgtttgtttttgaaaaatacaaatctgtatttgagtcgatttttaagatcgttaactttcggtaatacagaagcaatcatataaaaaatctgtttaaaaaaactcgcatgctaacttgagatgatcggactccaaactgcagctcatgattttctaaaaatatatatatctaagcgaacacccacagtgaatttcatcttaactaaactatataacaataataagattaaaatagacttcatccgttgtaacgtacgggcattttttctattaaaaataaaaggctgaggttttacatataaaggagactcggctactgatcaattcgatcaataagacgttagcatattatttccatagtaaaaataattttctcgctccatatcgaaataaagcaacctacagtatcggatgcgacatatcatagaacatatacgaattcgttctactaggatatgttatatccggtataggttcttatatcgtggggacgggccaggttagtccgtcataaaaatataaattatattagtttttgcatgatctactttgaaaatcttttttttcataatataacattaacaactacactctccgtttaaaaatatactaacctaaaaccggattaaacctaacctaatactaacgaatctagatatgtgatgtatctatacaatccatgtctagaatcgtggtactagatcagatctaatcttaatcctagatttctatattttgagtcgtgtgttgctgaggagtatattcatagtactagcatcacttgaaggtattttcgaatatgaatttatgccattacttgtgtctcattaaacaaatgctcttacattagcagctcaataattagtcaaaattacaaatattaattaatcgaaatacaaacctatgatagaatgtgatatattctagtaatacaaatttggacagatggccgtctaaattcgtataactaaaatatatcatatactattttaagtttttttagacgaaggaagtacatctcttctatatatactattataaaaattgagaatgtttttgtcggtattttcgtacgtcatccgtatttaagtcggttcgcttttgggaatatttattcgtgtttgagttggattttaagcttgtttacttttgaaaatacaaaaggagtctgacggagcgtggggctcctcaccgggagaccgcgcgggcccccctttgccggttcggccgggggcgctgggtgaggttctaagcccttgatctgtggaatggttcgcgagagagcaaatgcgcaagacacgggcgatgtagacaggttcgggccgctgagaagcgtaataccctactcctgtgttctggtggatctgtgtatgaaggagttacagagagctggagagcaagaaagttcaaactctagagaccctctcactcctcttttctccagtcccccctttttggtaggcatggtcctccttttatatctcaaggggataccacatacaccatttctacctacccttcttttgggtggggacccatcctactttgaccaaaacttggctcgtaccttcgcctgacaccgggataaccctgtcctccctcattaatgggcgatttgcaatggctgctgtccgaatgaccctccgatgggatgggtcataccaacctccactccgccggaagcaggtgcaacatggaagcacggttgtttgctgatgacgtgaccggcgtcagtccagtcacaaactggtcattcttgtctaccacgtgtcagtttagcatgccacacgtcagcccttcttcataaaatgacttccttgtaatggttgcgatgaagcctggtatgaatctagtcgggaccgacgtgctaactccaggagttcccacgccggctccgtctagggacgagtgcctagaggctctcatcattctgacgggacggggcgaggcgtgcgaaaggccgcctgttgccacctaacccgcgatctgaccggtctgtgaccggtcacacactgtgacctgtcacggaccgaacgagtgtgctgcgctgcattaaatgcggcgtggggcgctcgtccaacccgcaataaacgcggttaggtgagcgccgctgtgctcacctaacccacacacgtggcgccaaatcctcagggggtcggggcgccccagccctcggggacgaaacgggagcggcccgacccctcggggagatagagggaggggttccctttttacctttttaaaattgtattccttacttggactatccttttattttctaattttgttttattttatttttatttttattttgaattttgattattgggttcttatatggaaacttttttcaatattgcttatttttaatttcgaatttcagctattttaaaattgtatttttacttgggtctctttttttttttctaattttggattttattttatttttattttgaattttgattaatcttgtattgggttcttatatggaaacttctttcaatattgcttatttttaattccgaatttcagctatttttagattgtatttttacttggactctccttttatttttttttctttttctccgattaatgtgggaatttttagtctttacataaaacgttgtttcttttttcaaagctgtaatttattattaattaaattctattttttaaaaattaatatcatttggttatttattttaaatttaattttttttttattttgaatttttttgctttccatgaaaaaatttaaagtttaaagtttttttttttatgaaaccttctttaatttttaacacttcttttatttagtttttaccggtaaagatgttatttattaccacttccttataattttttggatcttttttcttttttttttattccaattttcaaaataatttgcctttttaaactttattttcttggttttccaattttttttgcacctccctttggtttgcattctttattaactttatttttcgattgcatcctttattggccctttctgggtttatataagatattt

SEQ ID NO: 5289 - DNA, 38653 bp, Oryza sativa
  unsure (1)..(38653): unsure at all n locations
taatgggaatttataaaacccggtttctacaccaacgggggtggtatccaaccacaaagtgtgatgttatattcttgacctatataatggatgtttgttgctgcgcacgtgcttccctgaacaggtctaataagggataaaataatgtttctatgagtatcctggtattgacgttccaaaccaagtactccctatgtcccaaaatcccttatattttgggacatagggagtacttggtttggaacgtcaataccaggatactcatagaaacattattttatcccttattagacctgttcagggaagcacgtgcgcagcaacaaacatccattatataggtcaagaatataacatcacactttgtggttgtatacacccccgttggtgtagaaaccgggttttataaattcccattatctaaaataataataatataacaacacacagtataatgaaatggatatgtaggttcaaggctattgtaatttgtaatatctcagcaatgctattattcacctttgatctctggttattatgttgcctgtctcatttctcattacatgtgctataattatattcatctattgtcacgtgatcttgtttggtttttatgtcgcaaccactggccttatcaggacaattttgtacatcttatgccatgagctattttatttgccatcaaggcatcaatcaagtatctcattatcttgaaccccttctactaactcataacagtgcaccagttatttctgatgttcttgttttatgatgttcaggttaggcttctcaggggcgacgtcattgttaatccccacagcgtttataagacccatgaggagctctgggacggcgaaatttagatgcagtcagcttacgttagtgccagtcactctcactgaacattattttttcacgaatttacgcttatctaatgtatggtgtttgagtctcttgagctcctattcaatgtaatgaacctgcttgatcagcagcatcatgttcccttagaattcgtattagcgctcctctgaataatactggatcatgtcatttgtatgcttcgcctctggcatcatttatcccatgctacttgtttgtctatttgtcctttggcatcatcattttttcttgtaccgaggcgttagtttgatactcatgttcctcactgaaattagtcaaattacttagcaggctaacagacatttgatagtcaccctgaattattgttggtagtaggtattcagccatgccttttgctttgatttgcaccttattcacgaaagatttcttgcaacattttttctctgtgagaaacaggtcaattctagctttgttcaggaatactatttttttccatagcaccaaaggcgtgccacaggcatagtatgattgtgctatttccttatcttttgagccatgatatggatgtccgtatgctctacaaacatggcgagaatcgttacccatcgcttgtgtttgtgttgcggggcattcctgcagaaattgataccagcaactaattaatggtactcctgtggagtcctggttcagtaagtgtttaactggcactcctgttaagtcctggttcagtaagtgtttaactgctaagggtatgactttaagtacacagggagattaagtgattaacaccgactagtttcagctgaggtgatggtggaggtaggatctatccaatgggatcaattatgacttgttatttacttgacgctatttttctattttgtttatagtttcccataaaattgaagatctatagattgtttgtcccttcagataagcgatgatgctactggaattctacatttgcctcgacgccggtgactctcgaactctggcagagaacccatgaattaatgttttaggggttggaggggatgggaggctgtgggtggcggtaagagcaactttagaagaatgactggagtgacgaaagaccgacgttgagcgacagagatggacggatggtgagacgctgacggcaaaatcaaagctacggggatgaaagaaagcggtggtcgggatcaacgacgggagcgagggaggcctactcccaccgtcccataataaataaataaactagatgcggcatattatactacaacgaatctgaacaaacgtatatctagatttatagtagtaggatatgttacatccagtattaggttagttttttatgggacggagggggtatgtggttaggaagttgggacaatgataagatagaagagtggaggcgtggcgaggggaaatgacgttagactgaaagacgtactccctccgtcaaaaaaagctaacctaggcaaggatgtgacgtccagatttcgttataccatgtgctcgatttgttacaccatgtagtatccaattcttacttaggatggttttttttggatggagggggtagtggaagtagacgagctactatgtatctagctagggaaaaagaaggaataagttaggggacgaaagatgtagaaggcaacgacaacgatgtggttggtcggaagaagtgaggaggggtaaggattagaattataaagggtagcacagatcttggagtaatctcaaccgttaaaacaagtggctacattttttaagaaaatcaggtgatcaataaacaacaagaagccccttagaatccagtatgagaatttactatttatcattcttccaaatatacatgtctaaataacactctcttaaaattttattctcatttaccatcgactcgagtggcgaatgagaatgaaaatagtaaattcggcattgcaaggaatgccaatggacgggtggagtcattattttcagctgctgcccagcctacggttccagcttccaacagctcgagaagagtgaagagatggcaacacagacacaggaaacggtcgcgcgcgccacagcgacagcgatagagccgctccgcgtcacggcttacgcttccgttgcgacaagctcgcagcctcgcacggacacaacgctatcgacgtggtgtcgcgtcggcctcagcctcgacccgaactcgtggagcgcggagcggaagcgcgggcagtgacaccacggggcggccggcggcggatgctgagagtgtgtccccatgcgttcggcatctcgcgctgcgcggggcggcgggggtcaaaactacaccgtgtgcgatgtggacaaaaaaggtttctccgttttctcctttaggccggagattcccccggccgaatccggcgaatcggcaaaagcggccacatgcggccaacagttggtgcacgttattgtcaaaaaccagtccttacgcaagacgccacgaggtcaacccggagaggaactacatgaatgaataacaaagacgtgattgaaacaaatacggagtagtacgtggttaggacctctattatcgagtaatgatactcgttaggacaagagacaattgaagcaagtagacgcaaaaacgtactcctcctagaggtcacgctagtactccctccattccataatataaggcaccctttgattcaaagaaaattcataggaattttaaagaattttatttctatagaaatttttactatatagccctgtgaatcaaatgaatgaatgaatcctatagaatcctatgaaattcctatggaatgcctcttcccatgcaagttttggagaaaatttagcatgaggtaaaacctcatgttaagaattctttgagtctttatatctcctcaaattcctgtgttttttctacagctcaatcaaatggtcattcctatgttttttaaatggttattcctatgtttttcctgtgttttgtaattctctgttttacacttgtattcctatgagaatcctatgtttttcctattcctccgtttttttcattcctatgattcaaagggggcacaaccactttttttaaagatgtttctaatataagacatgcatgtaagcatgcaattaactatgacatctaatcctattggatgcatacattatatttattaggataatccaaattacaagatgataataattatttcttggtctttgggttaagggtggttgtgccttatattttgtaatggaggaagtatctactacctccgtcccaaaataaacacaaccatgagtttctgcgctcaactttgatcgtccgtcttatttaaattttttttatgattagtatttttattgttatgagatgataaaacataaatagtactttactcgtggcatattttttttagttttttttaaaaaattaaataaaacaaacgattaaaattggacacgaaaagtcatggctgttagacggagggagtactaataatgcgcccataatgggctgtccttgtcacgggctaagctatccacacgatggcacatctaagccaaagcccccgctattaatttgccaaaccacgtccacctggcgcagacaccacaccaccaccgcaacggaaacacggtgaacgcctcgtcccgaaaccccggaaagccggcgagagctcgagaagtcgagaccaacctcgccgagcggatcactcgcactactcccacctcgccgcccgccgccgccgccgccgggttcccgtgctgcgcgcgcttcgatctccttctccttctccttctcgcggccgttcttgtgcgtgagtgagagacagtgaggtggtgggagacccgtgggaagggagaggggggcggaaatggcgaagcacttcgtgctcaacaccggcgccaagatcccctccgtgggcctcggcacctggcagtccgaccccggcgtcgtcggcaacgccgtctacgccgccgtcaaggtttcccccattcacccgcgcttcctcctcctcctcccctttttcgtttcttcccccatttggcttattatgtctggcaaatcaatgtaatactgttctcggatcgtgcaggcggggtatcggcacatcgattgcgccagtgcgtacaacaacgaaaaggaggtaacttggtttctccaaagctctgaatcgttcacgaattactggggcatcactctgcgtgttcttgtttgaaacgattggcgtatgaattttgcattagtaacatgggtgataataacagaagaaaggcacaaaaaaaagtatttggaaacttctactccttcatttttatatttggcaaagaagattcatccattttatatatatggacagtgaactattagtactttagaagggagtacctatacatctttcgaaagatttttataatcgtatcacacagatttttaatctttggattaaaatccgatagatataataaaaagcaaaaagcaattaagaaacactataatggacactaaattaccatatcctcaagaaaaagaccaaatccaatacaaaatttaaaatttacatgcgaagattcaaaaattacagtgtaacttacaaaagttacagtgtaagtttcataaattacactataacttacaagaaaatgcactgtaaatttgagtgagaaaatcgagtgagagataagaaaaaatctttcgagtgagatatagcaaaatcgctttagaaaggttgatgacaccttcacaaaaaagaaggaagaaagtaggggcagatccgctctacttttagggcatgtataatccgcactactcaaaactaagtagcacttacccttcttgcttactaccacgtgctttacacctggtccaatattatctcgtttcaagacaagtaatataacaaacaattaacaaacacattttgggttttcaggtagggttggctctgaagaagctatttgaagagggtgtggtcaaacgcgaagatctgtttatcacgtctaagctatggtaacctcaaatttatgtgtgattggcctgtaattatgtctttgcagttgaattggaattccagtgcttgcttggagctttacttcaactgatcagaggtgatgggtatgtttgtcaggtgtgatcatcatgccccagaggatgtgcctgaggcactagatgctaccttgaatgacttacagcttgagtacctggatctttacctcgtacgtatcttcttttattaagaatttggttcaatatgtgacttgcttgattctgttctctccaccatcaaggtcttgctttggaatcattggcatcatcaacctatagcaactagctctatttctatatgctgcagaataggtctccccatttgtcagtgcgcattgatagctaatgttacattgtccagcaaaatttctgcaatctgctatggaatacacctgagccatccatatcagaatcatcagcattctgttatatgtgctagactgctagtccattgcatatttgcatgacaatttccttttatcattcatccatgcaaccacaataaacaaagtactccttgttttggtatcagttcgattgttcaccttgaatgacttacattgaagtatactctccacataaattggggcatatacctgtggttaacttttaatttagcagattcctttgttaaaatgtttcagcatcttgttacactaatcagaatttctaatcaccattatatttatgcagattcattggccattcagaaccaagaagggatccagcattggcaaacctgaaagctacttaccacctgacatcccatctacctgggcagcaatggagaagttatatgattctggcaaaagtcgtgccattggtgtgagtaacttctcatcgaaaaaattgggtgacctgcttgctgcagcccgtgtacctccagctgttgaccaggtggagtgccatcctggttggcagcagatgaagctgcataacttttgccagtcaacgggcattcatctttctgtaagtctacatactaaaaaactgagtcaatcctctgactgatattagtaatgaacaaatgacacctgtggtttttccttttctgaaacctactgatccttttcttcctccttttttaggcatactcgccgctaggttcacctggttcaacatttatgaacggcaatgtccttaaggaacccatcattatctcgattgcagagaagcttggcaaaactcctgcacaagtggcgctgcgctggaacattcagatgggtcacagtgtactcccaaaaagtgtgagtgaagaaaggataaagcagaacttagatgtttatgactggtctattccagaggacttgcttgctaagttctcggagattaagcaggttagttcaactttctttgagcacctatatttgtcatctatgttttcacttttcatacatgtgaacagactgtttcttaacagcgagtgtttgcttcatatgattgggataaaattacattgatacttggtaacaattgataccgggctatatatagagagcaagctgatgttgcaaaagttctccataaaatgtttcttaattctatatgacaacctttatccttggaaacaaatttgcttgtaaatactctccaaagaaatttgtttacctcgaagcatactagattgtagaaacttagtgtattgtttgttagcatctgcttgttttggaacatcagtgccaggatactcttaggaacattcttttatcccttattacacctgttcagggaaacatatgcgcagcaacaagcatcaattatatagttcagagatcacacatgataatgcagtgacgtgtatgctcaaggctactctttgtaatttgtaatatctgagcaattttttactcagcttcgatctctgatgattatgttacttgtttcatttctcattacatttgctgcttttctattgtaatgtcatgtgacatgacaaactgtctgttcaggtttggctttatgttgccagtactcactagtggccgcaggacaattttgtaggtcttgcgcagtgtggtagtattttgtttgccatcaatctagtacagctcactcattaattcaatatcttgcaccccttccagtaactcatatagcagtacaccagttatttctgacgttaattgttttatggtgttcaggttaggctgctcaggggcaacttcattgtcaatccacagagcgtttacaagacccatgaggagctctgggacagggaaatttaggagttccgtcagtgccaatcacgcttattgaacattgattgtattagcaaatttacgcatatttaatgtttggtggttcagtgctctcgagctcctctgtcctatgtaatgaagtgcttgatcagcagcatcatgttcccttggaaatcctttttactgctcctctgaataaaactggaatgccattttggtgcttgtgcttcgcatctggcatcatttatcccgttattcccgtgctacttgtttgactatgtccttggatcatcaaattccctcgctgaaattacttagcagcctagcaggctaatcaacaaaaagaaattatatatgtaccctgaattgctgctggtagctggtattcagccatgcctcaccaacgattatagcttctttctgtttttattcttagcaccgaaggtgtgccgtcgtttgtgcacttcccttttctattgagccatgatattgactgtatttcttctgtctcataaaaaacaaatctaagatagaatatgactatcttaatactacaaatctaaacagctcctaaaactatgaatttgaatctgattgtctagattcgtaataatagaatatgttccatcatatctaggtttatttttaagagtacatttattaaattcccatgttttaggtgtaattgtgattttacccctacttaagtagactttacaattttacccttaattttctcgaactgaataatctgtttacccctggtttagatgtccagtcccacataaagtgagttcaagaaattagaaaattgactaagaaaatatgtaaatactctactaaccctcacctattcaaacaaatccactgcccccactctaaatcccctcacaaccaaaatcgacatcccgatcccctcccgtacttggcggtggcccgtgggccatggcggagcaagcggtgatggcggaagcggcgcacgggagcggggcggagcaggccgaagaggggcacttcacatcttctaacctgttcccccatccaaaaccataaccaaggggtggtgctgccgtgatgcgttgccctggggcgacgggagttgtatgtcataaaggaagaagcttaatagtaagatagcaagtaagatgtaaaatgtggtgaagaagacaccatataaagataagaatcgactttgctacaattaccgatcaaaaatacatattggtaaaaaatctatcttctattatataataaaagtccatgaaacttcctacaaacgctctcaagccgccacgtggcgctctaataaaatagagaaaatcctagaaattctaagaaaaaaacaaaacatctatcccttgattttcaattaaattggtgggtccaatattacacaccgttagataaaattgatcttaaaacaaactaaataccatgggttccacctatcctcctcccgcgcattggcaggtggagtatatacgtacgtactgtacgtatgcttcctcccctttttttccttttttcttcttttttcaatttatatatataatggatatattttttaaataataataattttacaaacaaagaatctaccatcatataatttaaaccggtgtactctttactttgtactattattttcaaataatgcactattttaaaataaattttacaaaattatattgtgtacctatcaaataaacaatatcatattaacaaatttatacgtgcacttaaactgatggccccattatataaattatcggatctacttttttacattggtctattattctcaggtaatgcactgtttcaaaataaggtctacaccattatattgtgtatccattatattaacaatttaaaatctatattaactaatttacacttacagtagaactggtggacatattattataatcattggatctattgtttgctaataaataaagcgtccgaaattctctttttgcctgctgcacaacgcacgtctgcaccttggcctttcgcacgtgtgacaaagcgtagtgtctaagacatctaaggtgatcacaaccgctgtagcgctaccgctttgccacatatcaaatcatatatgaagatgattaattttgttaataacataaaaataaaattaaaggtgatgcagcgagagaataattaagcaccatgggttgtgtttttctcaacactaattagctctgtttaagttgaaaccgagagttgattacataataattataatgtatttgtgttatgtcgtatttggattttgtactatttatccgtacaggtgaaaggaatcattatgttataaatgtgagtgcaatattgacgaatatcaatagaactcttagtacgacaagggtgataaagggagtttaaggccctctctttttttcccgattccatattttggattttttttgcacgctttccaagtttctaaatggtgtcttctttaaacaacattataactttttagaagtcaattcattcgtttataccctcaaatagctatcacataaattatataattcatcaatttcagctatcctaaaccttaagtactacatatttttttcatgcgagtcatggtgatcagtaaattggtgatcaacggatcatcgaagtcgtaagatgaatatgtaagagttactctgaacaattgtaaataggtgtcaaaattaattgctattaattagacatctaatggcttgctagccacaaaattaatttctctctacatatatataaacatggacgaagttggaacaaatattaccatacgtcccatacatatatattgcgcagttaatattctaattagtcatttaaaattccttaaaatgctctcaagctgccacgtgatactctaataaattagggcaaatattagaaattctaagaaaaaaaagacaaagtatcagttacttgattttcacttaaatcggtaggtccaatattataaaccgttagattaaattgatcttagaacaaactaaatactacgaggtcccacctcatcataggtatgcacctacgtgcatgggtacgtatgcctcccctcccttttttatttttctctttcttctttttttttcccatgcatatgcttccctccctttattactatatcatgcgtcttcatgagatgatttaatcaaaattctagaattttgagtatcatgcactcacattttttatttattacacgtatgtatatagatggactgtatgataattaactagcaatacttttttatttactcgagaaaaaaaacatgattcaaaagttgtaattacttaatccatcccctattcaaaagtttgtgaatggttttctaagatacctcgagaaaaacagaacctttaatttattataaaataacattatccaaactttagtttgccctaaatttatgagacaaaatttctgaacaaacaataatcttatcttttaaaaatataagtgcacacgcgggccaccttcctagttatcctaatagtaacattcttaagccgaacctttcatttgataattgtcacttgttcttgattgcaattttagcatcgcggaaagcaattctcttgcaggtggcaggtgggatccgccggctgacatacgctgtcactgacatgcgggacccctggttgagcacctcaatgtgcttcggatttcatttcacactataatcgcgacaggtcctcgcctcctcggtcgtttgcgcagcctctgttgaagagcttgttccgttttttaaaagacatggcatctcaacaatactcctgattttctactactgattttcccttcgtcaagcgactccaaaacgtgccccatatctaatctgtctcgcacgcggccggcggcggaagagcagagcatcaggcgcgtgtggatagccggaggacatggccacccacttcacgctcaacaccggagcacgcatcccctcggtgggcctcggcacctacaaggccggcaccggcgtcgtcgccgacgtggtctccgccgccgtcaaggtcggtctctctgaacacttgctgtttacttgtacgcccgtatccatatgcatatattgttctaagtttacttgctgagttgctgtggcaggcagggtaccggcacatagactgcgcgccgctgtacaagaacgagcaggaggtagtaaggctattccctgcaaatctttgaagtgttgagtgttctatcctcgattggcatgaattgcaccggtttaacttgtgagagtgatttttgtgtgtgctcctagattggtggtgctctgaagaagctcttcgatgatggggttgtcaagcgggaagacctcttcatcacctccaagatatggtgctgactgctgctgtcttgttccttctattgaccgacctcaacttctgaacgctactagtagtgcaagtttattctgctatttcgaattatgttctatcccttcctcttgaagacgtcccaaactctgcaggtgcagcgacctcgcacctgaagatgtcccactcgcaatggatagtacactgaaagatctgcagctggattacgttgatctgtatctggtaagctcatcatgatcagcgtaaacgtagacagtgaaaggtttgccattttgctctgcttctgacaggtgcccaacggtgcaatctctgcagattcattggccgtttcagatcaagaaaggcacggagctcagtccagagaacttcgtcaagcctgacatacccagcacctggcgagcgatggagcagctgtacgattcaggcaaagctcgcgcgatcggcgtgagcaatttctcctccaagaagcttggcgatctgctctgcgtcgcccgcgtccctccggccgttgatcaggtcgagtgccacccgggctggcagcaggcgaagctcagagcgttctgccacaccagtggcgttcatctctctgtaagtcctgcatgtttctgagctcatcgatcacttgatatgtagtagtagcattgtgctgtggttcactgctcacatgattcttgcaggcgtatgctccattgggcaggatgaagggcatcgccgttgattcggtgttgccatcggtagccgagatgctaggaagaactccggctcaggttgctctgcgctggggtcttcagcagggtcagagtgtgcttcccaagagcgtcagtgaggcgaggttgaaggagaacatggatctgtttggttggtctattcctgaggaactgtgtgccaagctctctgaaatcgaacaggcaagtgcatccaacctttcagctgtctcaagtgcagaaaacagtttcacttctgtcttcatatcttatgcaattccggatgaataaacttcatacagttctgaacttccgataagttagtaaccagtacagaaaaaagtactattgaacaaaatgcaagtatagtggatacgccaagggtttcttgtagttgtaggccttgtattggaattgtaataactgaaaatgcattgttcatgttggacaggttaagcaaatcagaggagatggatttgctcaccccgagagtgtctacaaaacctacgaggagctttttgatggagaaatctaaaagaatggaaatcacctatgtgaaacaaaatgtgccattactgtaaaagaacgatgaaaaataacaggcatttcacaacaatatcttttttcttctcttcaggatagctgtctcttttacatgctgttccttccccaatgtatcaaaatacagtagaagttttggaccagaagctaaaactatggagatccatgtggtgggggactagaataatccacaatctaaagccaaatccataaactggagaaaatagcatgcctatttttaatctcccacaattaaagagtcgcaagaggcagcagagatatggaacttggtaacatttttaccacataaatctgcagagaaaatcaagaaattcgaaagcacactgaagtaggtccttctacattgcaccaccgcagagacatccaataagcagctccacaatgatgcactgacagaacaggtagcactttaagcccttcgctagattcaattttcgaccataagacagcgatgaaggcactcacatggggtagacaaaaagggcgtttaaaactcgctataattccgccatactgctcgaaattcctccctgaatgtgttcaggcgtgctttcagattaggtgttctgaaactggcgtgaagcaaggttgctgcaaggcacaaacttatatattaggcacacatgcacaattttaaaattttaaacctcaagtttggccttaccaagcagaccaacaattagtgcccacagaaccgtaaggagactacatgaggtcatccagaggaagcagcttactgcaaaaataaaataaattatatgttgagttcattatttatttagttgttttttttataaaaaaaaaactatggtctagaatagtatgtatggaggtcagtgctttatactaaccgacagaaaataatacaacaaaaacccatcgaggccggccacaaatatgaattgatctttttgagcttggtcggccacgaatgacaggtctgcaaatatcagcaatgttgttagcccgttcttctgagactctttaaaaaaagaagaatgttatagaagaaatagggggagaggatccccaccttaagggtggcctcatctttgctgctaaatgtggtgaaaattgtctgactgtccttgtgactttctcattgaatgtaactgcaaaactgcatatcaaacatgaatcatttgaaaaagcagttctagtgggagtatcactatttctagtggagtggacaaacataggaattgactacagaaatacacatatgagcataaaatctgtcagttatctaatgagtgttaagtttttttttctcaaaaacatagaagaacagcgtatcatttcattaaggggaagaaaaaacaaagtgttaagttgttaacatataactggtgcaagagtgctgatatgagcccttaagctaaaatatgaaatgcagatgtctcccaatctatatccattgataataataacagcagatgcttagcagattcaaaatcaaacaacatttatgtgttggaaggaatgcgacatgcgaaataggggttaatgtcacatttgcaggttaaaggaagaacagcttgtaaagtgcaaaatatctttcttcccaagagcactaacggtgccttcaattgaatccaaacttacctgtcattgagaaatgcaatgctgaggcctgttgaaaaagctgcaaggatggaaactggtttccggagaaagcccatccctgcaaaaagagagacacaagatgactatatgaaagtcaaaaaaatagtagggatgggggggttgggggagtacagcacatagaggtctctctgcctaccaagaatgaacatgatcaagatgaagtagttcgtcctgtagctgcaaaccagcaaaaacgttggaaattaactttgttgaaagatgtaacatggtacaaaacaaatatgtatttacaatataagttctaatgtaaaatggtagaggaacttccaggttctattcctaaataatatcgatatgctgccttcctatttacacgttaaaatcaaagtacctgttcacatattctatgattataggttactgttgatcatcggttccatacaaaatattgtatcacactcagaggataaccgtgtggtttactataatatggaaacatcacggaagttttgattatgcaccttttatactcccctaagtctcacatataaaattccatgatgtagccaagctaccaataaatttcaagtcacgatttagtgagctacacctaactagaattatcagcaaacgtacacctcacagaacaagttataatcaaatctagattccacgtttaactccaaaagtagaattcagatcgatgccctacacacattaaatgtgaaacatctctgcagcagctaacgtatcgttccaaatgaatctaaacagttggcacctcatgcatcgccccctattccaacccgatttaacccaaatcacagtgggccaaccaatctagctcactcattcttcgattcgtgaggagaggcacagaggtgggaggtagattcgagatagaagccgtactacttactagtagaggttgcacttgaggcggctggtccacttggagtaggatcgcggggcggtgaagcgggagaagaactcggagacggggcgcggcggcgtcgaccagtccacctcccgcagcgcgtccaccagatcctccgcagtcacggagctccagtccatcgccgccgccgccgccgcctgagccgacgagctcgccgccggctaggaaatccggtgacctagagaggagatggcgagtcggcggcgacgcttctagatggttcgaaaccgacgaggagagggcgtgaggaggggcaagtggttcgtggaagagctgttcggattcggcgacgtgtggcttggtcggatcggaaccgatcggacaggcgcagttggcacttgggacgaagggttggtacatgactggagtactggacccgttttttgaccgcccattctatagatcaacgggtcagatcgagtaatatgatcacccgagatgatagccattttttggttgattcccgcaatccagcattggttcctggcagcggggaactggagattgtctgtagcactactgatgtattgtgagacactgacacgcaagtttagatgtaagggtttaattcaatccatgtcattgaaaatataacattttagataaatattattacagtgcgtctatttgtagccgtgtcactgaaattttacaaaattataatcgtgccactgccgttatgttttctatcttctttctctataagtgagacccacccgtcaaatacatttttttcttcatcatctctttctcttcttttttttttcatcaatctccaccacttgttgagccaaattcggcggatggcaaggagggcgcctgcgagggaggcgacgccggacagcagcgggcagcatgtgtcgctggccttggtgccgactaccgtgtgcaccagcccgttcagcatgttcacttacgccagctgttgtatttgtcttttacacaagtcatgtacgtgtctcaattttttggagaggcagatgaaagcatgaattatgctgtcattatccttgacaactttacacgatcaagatatatttttttccactttactaagtcattgtacttagtatcttgctaaatacttatattttaaggattaggcggcatcggaggcttaggcgtcgggcagtaggagaaagcaacagccggtgctgtgatttcgatcgggcctaacaggtgcgagctgcgcggacagggccaacgccataatgaggaggatgacgacgtcaatgcagctgttcttggcagcggtgcccatggcgccgatgagtgaggagctatcgccacctcccttaccagcggtgaagggagataggaaaataaggacatgttcagattgtagccaaaataaatcttaccaaattttggcattgtcaattttagcaggatttcttatggacaaagtatttgttaaatttagcagcaaactaaatgtagacattttttaagtaactttgacaaaaaaaaatggtatggttgaaaatgacatcaatctaaacagaccccaagaaaagaggggagaaagaagattaatctaacgggtgggtcccacttataggaaagaaaaaaaagatgaaaaatgtgacggtagtggcacggttctaattttataaaatttcaatgacatgactacgatttgaataaacgaattgtaatgacatttatctgaaataacatatttgtaagggaaaagtctgaattacccttgaactattgtgtgcgtatgaattactctcttagatccgaaaactagaaatctttcaccctcaagtattaataccagacgaattaccccctaactcaatatggagtggttttggtcctacgtggtagtccagtcagcatttttttcttaaaaaagggtgacacccacatgtcatattctcttcctcgcccctcgccccgctctcttctccctccgattctctcccaaattggtggctgggggcggtgagctacgagtggcggggtggaggcggctccacaagcagcgagccggaggtggagggcgacgaggaacggcgtggggtcctaggcggtcaacggcatggcccaccagatagacaacgagggatacctccgccactcgctgcctgaagccgcatccgccactcgtcgtgtcccctttccatccgccgatgaggaacgccgcctggcggtgtcccctctccatcctttcagtcgtctctgctggaggccgaggaggaggcgcctccaccgcttgccacttgccaccggcggtggttcgactggaaaaaaagggaaccagagcccccgccagtccagtccccttaaaagatcgggcatgcaatcaggccggagaaaaccagttaacttgggtagtttttatataaaccggggattaaaataccaagaaaattggtggagaaaccagttaacttgggcggtttttatataaaccagggattaaaataggagaaaaccggttaacatgggcagtttttatataaaccggggattaaaatcctaagaaaattggtggagaaaccggttaacttgggcggtttttatataaaccgaggattaaaatctcaagaaaattgaccgattaacttgggcagtttttatataaaccagggattaaaatcggagaaaaccggttaacttgagcggtttttatataaaccggagattaaaatcccaagaaaattggtggagatgaggattcaacctcaagtcataggattgagagcaccacacggtagccatgccaccatcgtaccgcttgtgctattatataaacatttattctatattactaatcaaaccgtggttggaccggacaaaccagtggtccgaccactaaaccagtgaaccgagagctcaatcggttcatttatcggtccggtcttaataactatggtcccaacgcctcccaccgctcaccgctcgctacccctagtagccaatttggatgagaatcagagggagaagagagagggtgagggagagaatatgacaggtggtcccacctttttttagaaaaaaaatgccaactaaactaccatgtataaccaaaaccactccggattgaattaggagagtagttcgtccggtatatattaatagttgaggatgaaagatatctgtttttcgagtctaagggggtaattcgtactcacccaatattttatggggtaatttagacttttccctatttgtaatggtatggatcgaattaacctatcagttatgggcttatggctactgtatctacggcagaggatccnnnnnnnnnnnnnnnnnnnnntagtagaataacttcgtagccatttcttcaatgaggctcctttctgttgcattttggtttagctagactattgcacgttgagtagcatcaccatctaccacatgctcctactccctcatgtcaatatatttaaagtttgagacaacaaaatcatattaaatcactcactaattttatgtcctaaaagctatgtaaaagtgaccatagggagcatctgttaggcggagctgtgtggcacattgattctaggcttctagcatatctattgtcgtcagattatgctaagtgccccaaccactgattaggaggaaaaaaatatgcggaagttttaaaattttgattgggataacaaccgtcacaaaagataaacaagtctcttgaattgataatggggaatacccactgaaaaaacatcaaatatgtgaatacccgtgaaaaccggatttaaaagttctctaaattcatgaaaaaaaattactagaaatagttgtaggcgtaaaatacattcacaccaaatcaaagttcaaactcaactttgtttagaagtaacaaaagagacaaaatttggatgaatgacaatgtagaaaagattaagaaaaatgaatttgcttgagaaaagaaataaatgaattgccaatgtataaaagagaaaaacacactggcaatttggtgaagagagacaattggtaatatacaaaactcatagctatagagaggaaagaagaaaaaaaatcattttttttgccaatgtacttgaactcaccctccgtcgagcaaagaatgtaattctaaaatttgtccaacaaagagtgcagaaactcatatgagaaaatttgtcagttttgccaacgtacaaaactcacgaaaaaacaattacaaaactcagcaaaaaaaagttatcaattttgcccgtgcacaaaactcaatcagtaaaatatttatcagttttgccaataaactcgccctatgtccaacaaagaatgtaattctaaaatttaaaatttgtcctacaaagcagtggcgaagccaccgcccagataccacaggcagccgccccgctcgctgtcaaacgttccattgaatttttagctcttgaaaggattgaccatagaactggatatagtttgagttttgctcagggttaaaaatctttctggctcagctatactatagagactgcagaaacttataggagaattttaactcagcaataaattttgaaagagtgcaaaaactcatagcaaaatttcaacttagcaaaaaaaaaaaagaattgtcaatgtctcaccctctgtccaacaaagaatgcaattctaaaatttaaaattagtcctacaaagcaacggcaaagccaccatccggctaccacgggcagctgcccatgctcgccgtcaaatgttccattgaattttcagctcttgaaaggattgaccatatttgaaagagttcaaaaactcatagcaaaatttcaactcagcaaaaaaaaattgtcaatgtaaaaaactgcaatgtctgagcgtgcaaaaactcatgggagaagttttaactcagtgaaaaaaatgtcaatgcaaaaaataagagaaattttgcaaatacaaagaagagaatttttgcaaaaactcataggataaattttaactcagcaaaaaaaaaattgtcaatgccagaagagaaattttgcaaaaactcataggataaattttaactcagtaaaaaaaaagtcaatgccaaaaaactcataggctaaattttaactcgagaaaactcatatcattggataaattttaaatctcaactcaaaaaaaaaatcataggctgaattttaactcgagaaaactcataactcttctcataggataaattttaaagtttaactcaacaaaaaaataatgtaattgcaatgtctgagcccataggataaattttataaagtttaactcaataaataattgcaatgtctgagccaataggatgaattttttaattgtgtctgagccaataggatgaattttataaagtttaactaaaaaaacattgtaactgtgtctaagtccaggttcgaactggagacctttagtgtgtgagactaacgtgatcaccaactacaccacccagacctttttgtttatataagcatgcacattttaaatcaatgttaaatcaacaaattgcagaaagcaaagatcacggatacaacgcagacgctgtcaacagtcaaaatctgttttcatcgttcatctaacagccgcacttttgccggagtgcatcggccagttgcttaccttttctttgagacccagcggagagcatgctccatccataaatatctggattgcaacagtaattgaagtctgcaacttcctcccaaccatgcatgtgcatcgatctctgcacgatctgcgcgccgcgacctgacaagcaatcggtgcatgcatgcgcacgcatctcggtaagagcaggacctaaatacaaggccacaatagaagaaaacaaacgggaatgcgtcttttgtgcatctgaggctggtccgtgcatgttaggggcttgctattggtgcagtagctattttgcctatttgatgtgttatcacacacgtctctataactgtcatgtagtagtagtagtagtagtattcatttttatacagatcgactgggcaaatacagtgcagaaaagttcgaatcaagcagcgaaagtatggtactccggccgtatacatactactgaaactgactcaacactttggacacagatcgcctaccttcaccctgcacatgttgcagcgtgcaaacgcaatatccattgtgctgaactgctgatctccgttgtctcagctaagatgccatacatactagtaggaactactgtatcaatctgaagtgcatagggggcaacatcatttacatctggtgaacacaaggcgacaactcaatcacatgaaaacttatcaggtctttaaaaaacttggcgatactgtgacggtgtgaccggagtaggagtaccacctggagtacatagctgtacatgtattcccgtaccaaaagaacacagctgtagcttttcttttttggcaaaaaaaacatgccatgtataaagcgatacttgtcacaacttcatatacaatttttaaatctagtatctttagctcaaattttgttttttttagaagtaatcgggaatatactaggttaccctattttatgcaagaatctaataatcccatcatttcacttatgtttatacttatataagccaaattttgataatttttttacttaattttgtgatatttttgtttcatcgtagtttattttataacatctacttttgaatcgctaagaacatgtctgtaaaacatttagctatagattattatttttagttaatgataagccaagtgaataagcataaacataaataaaatgatggggatgttattattggagatttaaagccatgccaaacagatcattaaaaattgttgattgttgaaatgcccagacttcaaactatgtatgcgctaccatttatttttctatcaagagggtaaacactaatgcactttacacgctcatgaacttctggcccataataaccttacacttcgtaccacgatggtcttaatccaattctttcaaattactcatctggttagtaaaatggattatttattttattctttaaaaaaatgcatttttaaaaaaaacctttattttatcgcaatgctaagattattgttttacactatttatcaagtttatttcttaaaatatttaacataacttataatcaaatcgagcaatataatccactcaaatcaaaatcaataaaactatagtattttccctatttctcttgggattcatctcgggattaatctcagatgtagatcgaaatgctatacaagctaggacgtgtgtgattttagtgcgaccgtgtgttaaccgtgtattggaggtcgatctgcggctatccaattttcttaccgtggagcacgtgtgctatgaaacgactggctgtacacgtttcaacattttgtcttctaccctgaaaatgtcccaagtattacagtatttgatattgatttttttgtgggaagtgcgtgttatggactaatgattgcattgtggagacaacaagcaccatccgtcgtccccgtccatggctgatcagataggacacacctacgtgacacgtatggttccaatgatagacggcagcagcaagtcaggaacgtttgatcctctgcacgcagagggtcttacgaatggtacggtgtacgtgtgtgtgggagaaacagagaggagacgaggacagactggagcaatggagtggatgaatggagggtagacaagtgtgtatttatgtggaacacacgatttgtcaatatccacgttagctagcaaaagcaccacgaaataaacaccttaaaatctgtcatcgtcgtatcatgcatgtcgaatgttttggttgcaaccgattgaagtaaatgaatttaggaatttgtacgtgaaaacggtaggaataatcttgttaagtatatctccatgaaacattctttatgtccactatctcgaaaataagtatatttttcattcgtgctatacatatcaaataaaaaatattatcatcattttatcaaatttcaatataattatttcatattttatctactcccaatgctttgccccatgcttttataaactctaatacaacgattgtttaaaaataaacttattttagaataaacaggagcgaataaaaataatcttatttcgaaacagtgatgtactagtttttaggaatttggtcagtatttcagttcacagtttatccacaattaaaataagtggttactgtggctgggcctgcgtgagctgggctgactagagagagggagagaccgcaacacagaagatggcgatatttttgggagcaaaccgctgattccacagatccgggagcccatgtggaaagcgcccgttggcggttcggcgatggttacgggccatcacggggtccgctcgccgcagacgatcgcggcggcgggcgggatctcgccacacacgtaatccgacgcccgcgcgacgggacgggacgcggctacgggctaccaccacccatccccaccaccaccaccacctcccttcctctcccccttttaaagccgtcgcaccctggcggtgtgtaagcctccgcccctccccgtatctctcgcgtttctggtctaagttccacgccacttgttgccgcattccttctccctccctgcaaatccaatccaatccaatcccaccccaagctcgcggaggaggaggaggaggagatggggagaggagggatcggcggcgcggggctggtggcggcggtcgcgaaggcggacgtggagaacaccgactccacccgcggcttcgtcaaggacgtgaagcgcatcatcatcaaggtgagtgaacgagggcgacgtgatgcgcgggttgacgatcccgtcagcggcgtccggcatgcgactgtgtcctcccttcctgtgaaacctgccgttctgccgttgttgttgtttgttgtttcctttttttttcagtgacgatagtttgtttgcgcgatctgtgatcggtgaaactcgaggctctctcgatctgatttgcgaaggatcggagaacctgacaaaaaaaatggccttacaaactgcaatagatttatttcattttttgtttttgggagctgcagcatgcgttccaaaggagtggttctaatctattcttgtgtgctgttcatgttcgtacttacgtttgatagattcatacaacgcgtgaccataagaagaacagcagtagtaggtaatttttagtgaatttttatgagctccattatgacagcatatgctgtcacccgtgatttgtcctttttttctattttttttaatttaaaatcactatggctatatttttatgtttaactctttaccattcatacgttttttaggtttaactatttaccataaatatgtttttaggtttaactatttaccactcattaattagtaccattctctaatgaaggatattattttttttccctctaaatatatgttctgttggctggcttaattcgacaggtcggcaccgctgttgtgactgggccgaatggccggttggctatgggcaggctcggtgctctgtgtgaacaggtaaactttccccccaaatttttttaccagaggttaatgctctgaccaaccgagcttgtgctaatcagtgtcagttaaccggtgtgataaatttcccaggtgaagcagctaaattttgaggggtacgaggtgattctggtcacctctggtgctgttggtgttgggaggcagaggctcaagtaccggaagctcgtcaatagcaggttgcagagagttaattggctctgaacagtaaacagtgttctgctgtagcattcatttctgatctctctcttgcttgcagtttcgctgatctgcagaacccacagatggacatggacgggaaggcctgcgctgccgtcggtcagagtgtgctgatggcgatctatgacacgttatttagccaggttggcgtgccattcctgatggatttttgtgtaaaaaatatgatttttttgcatatattttgacacgttaaacttccttcgctgcagcttgacgtaacatcatctcagcttcttgttacggatcgtgattttatggatccaagttttgggaaccagctccgcgagactgttaattctctgttagatctcaaggttataccagtatttaatgagaatgacgccatcagtaccaggaggcaaccatacgaggtgtgtttcctaatgtgatttgtgtgcactgggagcttcactgatatatacgtattccaaattccattaacaacaaacactaaccttttacactttactgattgtaatgatcaaccgtgtgtaggattcatctggcatattctgggataacgatagtttggccagactgttagcgcaagaacttaaagctgatctccttatcatgctcagtgatgtggaggggctctatagcggtccacctagcgatccacaatcgaagattatccacacatacgtccatgaacaacatgggaagttaattagctttggggagaaatctcgtgtgggaagaggtggaatgcaagctaaagtagcagctgcttttactgcttcatcaaaaggaatacctgttgtaattgccaggtgagtaaagcttgttttcttctatcgttgcatgaattgtagcacaaatgttaaccaataaatatatgtctaaaagataatatactgcaactgcaacaacgatttatattatttttcagtgtataagaactatatgttctacttatgatggttagttacactgtcacgtggtgttgtatttgtacacaagtgtttacacattgactaagacggtaatattttgatattttggaagcactttcctgataataatagttgagaatggagagcagctgcatgcctgcatcacaattttgttttagaaaactcgtggactgctttagttgctactattaaccacctgtacgaggctctggtagagacagtattcaatagtatcaaagtgctgcatcttaattcctacatttggtgtgttattatgaaactagctgggtagcccgcgcaattgcgcggctagcacctaaataaaatcatataattttttagtatgattttacttaaaatttattaaatagctatctcatgtcttaagagtttgaaagattaaaccttatcatccccgtgtttctaattatatatattttttaaaagtcacaccagttgctaccccttatgacatctccttctttatttgcttgctcgatataccactatttctattcattctccttgaaacctttaaaaattagatcttatagtttttagagtttattgtcatgttgggtttcgtttttataatttctagacgtcccgtcaaacgttgccattatactcctctatggcccgtctactgtctcttttctttattgtcattgagattttaaaaatcgaacataattatcgtttcggttcatttttactttctagaaatcccgccaaaccatcagcggcttttccattgtacttctctacggctcgcccgctgagtcccttctttattgtcattgagattttaaaatcgaacatgattatcattgtttttttttaccttttcgaagttcggaacctttaaaaattgaaccttgtagtttttagagtttattgtcttgttgggttttattttttataatttttagaagtctcgtcaaacaatgccactatgctcctttatggcccgtccgccgcctactctttctttattatcattgtgattctaaaaattaagcacaactatcgttgcaattcattttttattttctagaagtcacgtcaaacatcaccggctctaaaactatactactatacaccccgcccactgcttctttttattgtcattgagattttaaaaattgaatatgattatcaatggggttttttttttactttctagtagtcccggcaatcacattgctcgtttgcttcacggcctgcctatcgtccctccttttaatcgttattaggattctatttggtgttttattaacagtttttatatgtcgtatcaaccgccaccactctactcctttataggcctcttacttaatttatctcgtcatgtgttttagatggtctttctttaaatagtctttatttttatcacaaattttagttatttataaattgtattcctaattgaaatcttatttttctttttctaatttcagaatttattttttttcaaattttaattaatatcgtattgtgttattttagtatttttattttttattttcaatttcagttgtttcaaaattgtattcctacttgaactctcttttagtttttctaattttgaatattattttattttttattctgaattttaattaatctcgtattgggtttttatatggattcttatttcaatattgcttatttttaattccaaatttaagctaattttaaattgtattcctactttaactcttctttttttttgctaatttcggattttatttttttattcctaattttaattaatctcgtaattgggttcttatgtggactctttttttaatattccttattttaattccgattttcagctattttaaaattgtattcctacttggactatccttttattttctaattttgttttattttatttttatttttattttgaattttgattattgggttcttatatggaaacttctttcaatattgcttatttttaatttcgaatttcagctattttaaaattgtatttctacttgggtctctttttttctttctaattttggattttattttatttttattttgaattttgattaatcttgtattgggttcttatatggaaacttctttcaatattgcttatttttaattccgaatttcagctatttttagattgtatttctacttggactctccttttctttttttttctttttctccgattaatgtgggaatttctagcctctacagcgaacgtggttccttctttcaaagctgtaatttattataaattaaattttagttgttaaaaataatatcattggatattcatttaaatttaattttatatgattatgattttgttgctacaatgaaaaatttaaagttaaagtttagtttttaagaccgtactaaatttgaacacgccttagcgagttggacggagagatgtatctctaccaatgcataagttttctggtctattttctctttttttcatccataggtaaaaaaaatcacattttaattctaattatactggctccaaaatatatatgcacgcactgtgtttgaatcctaatcacctgatttgttgattgatccttagtgtccatctaggataagaaaagaatcaaagcaggagtacgtccacctatttggacttgtattctagtacttgatcagtgtcgtccgtttgatctagcagttgttttctattcagacttctattatcaaagttaatctacaccatcaaattctagtcccagtataatctaacggtctagatttttcttttttctccgattaacgtgggaatttctagcccccacagcgaacgtggtgcctcctttcaaagctgttttaataatataatagatttcaagttgtcagtaagacagtaagtaggaaagcttgtgtgtattttcccaacagcagtcttgtgattcaactctgctttctaactatttttattatccatgaagtggatttgcaatcgatagcattattaaggtcatgcgaggagagaaaatcggtacgcttttccatagggaagcaaaccagtggggttgttccaaggaagcaacagcgcgtgagatggccgttgctgcaagagattgctccagacatctacaggtattctttcctttcacttccttttgtgaaggaatcaggcaatgcaattttcaagctataacttcaaaaaacaatcaaataattgcgtgttttcttcatgtcatattaaattattacaaaggcatgtcgtcgtctttaagtagtataaatatcaatattgtttattttcttgctgcctttgctaactacttgtgttgcatgtggtcacctaaacagaaattgtcgtctgaggagcgtaagaagattttgctagacatcgccgatgctctagaagcaaatgaagatctaattacatccgagaaccaagctgatctggatttggcgcaagatattggttacgataaatcattggttgctcggatgaccataaagccaggaaaggtaggccagatacatgtgccatcttctgagcggtgtcatctttaagttcattatttgttgaagtgattcttggctgttgtatgaaatgtcctcactatatttaatatctattcgaagataaaaagcctcgcaggatcaattcgtgaaatcgctgatatggaggaccctatttcccatacactgaaaagaacagaggtgaatgcatataccctattctaaaatccaaacacgatgtgataagtactacaatcaatcaatgtgataagtactacaatcaatcatagcttcatgtgatttgtaaccaatgaaggacttgttttgtaggttgctaaagatcttgtttttgagaaaacatattgcccattgggtgttctcctaattatttttgagtcccgtcctgatgccttggtacaggtaaaatgatttttttagttggaaagaaactgtatcagttaactacaaagcaacgttatttatcatattaacataacattgtacagattgcatctttagcaatccgaagtggaaatggtcttctcttgaaaggaggaaaagaagctatgagatcaaacacaatactgcataaggtattatgtacttaactaactgatttagtagtaatgattaatgaagcaatagtaggcttcagtaataccaacatgctgtcttttattaggtcataactggtgcaattccagatgttgttggtaaaaaacttattggcctagtgaaaaacaaagatgaaattgctgatttgctcaaggtgagtatgtaaagtgattctttgggtgataaatttaagaatttaatctaaaccagaagtactctgtgcagcttgatgatgtgattgatcttgtaataccaagaggtagcaataagctcgtttcccagatcaaagcagcaaccaagattcctgttcttggtcatgctggtaagcttgtttttgttattgaattcttgtcactaaatattactagtatgataatggttatttattttgcataaactaagcataatacatttcctttttttattatgatatacattgaatgaatgttttttttcttctacagacggtatctgccatgtttatattgacaaatcagctgacatggacatggcaaaacgtattgtattggacgcaaaggttgattatccagcagcgtgtaatgccatggtacttctctaatttacaaatttattagcgtgtgcccatatggtgatacctctctatttattgtacttttttttaaaaaaatgtatattacgaattgtatgtgtgttctacatcgttgctggccactcatgctaacttacaagtattgttgtcgaacttctggctaaaagcaatagttcactgtggaagatgccattctattcaagtctaactttctatatttgtccacttaatttatttcttggaaaattttatcatttgagcacagatatctaaatattttttatattctgtgcaggaaacgttacttgttcataaagatctgaacaggacagaaggccttgacgatttattggtggagcttgaaaaggaaggtaaaatccacacccttgtagttgaagtattgcagccatttgtatcttgacatgtgttctgcaaaaagtgctacttcctccgtttcacaatgtaagtcattctagcatttcccacattcatattgatgttaatgaatctagacatatatatccatctagattcattaatattaatatgaatgaggaaaatactataatgacttacattgtgaaacggagggagtattttattttattatgagaaatgatgaacagttatgtagctcaacatcaaagatttgatgttcttaattactttcaatgcttctcaagggagcatattacagattttacttattatgttgcagtcaatccaaaattgctttgcaacacgagttcttgtgcaaatcagcaaaaggggatcagaagagcactaatggattttaattgatgtcatgttgcaggggtagttatctatggcgggcctgttgcacatgacactttgaaactaccaaaggtagattcatttcatcatgagtataactcaatggcatgcaccctcgaatttgttgatgatgtgcagtcagcaattgaccatataaatcgctatggaaggtatgcagtttttctccatactatatcctcatcactttttttttttggaagtatgcagtttttctccttactatatccccatcatttcttttttttttttttgaactaaacttgattgtgttaaatatatgttcatttcagtgcacacacagattgcattatcactactgatggaaaggcagcagagacttttctacagcaagttgataggtgtttaactaatttcctttgcacaactattatgtttgccgcttttagtacataccttaattaatggagttattcttctataaattgcaacagtgctgcggtattccataatgcaagcacacggttctgtgatggggctcgctttggtctaggtgctgaggtatgtcctttaaatttgtatcactttataacttggacattttcgttaactagttatcaaaaaaaaatagttatcgaaaatatatgttgttactattgaatggtcagcgtttcattcagtcccctattttctttcctttatcaaatataggttggcataagcacagggcgcatacatgctcgggggcctgttggcgttgatggactcctaacaactcgatggtagggttatcatgccatattgtcttcatgtccaaacattaaggacaatactattgtgcaagatgttttctgcatctagcattttatcatcatacaatattttttcagctaaatgttattatcatactaaacagatggaaaaaatcagtagttttgtatttactactagtatcttcatgtaatatgtgtgcattggtttttcgttatatatagcattttacgaggaagtggacaagtagtgaacggcgacaagggagttgtttacacccacagggagctccctttgcagtgaggtaggtagtgttcttttattttgaaagatggcatactactgattactaaccttcaacatctctggtttcaggtgaagtggcttgtgaaggagctgttgtagagcaattttttgcagacgctcaccgtgctcctccttgagagctgcttctcttcatgacatgcaatgggagcacgaaagcatgtcaaagcaggaagtaatgaagggcgaagtaggtcagaaacttatagtactatgtactatggtgttgctacgtagttgtgtggtattccttattattcattgtaccatgaataatttatgccaatgtcgtagtagctacatgtaactatattggctttcatggacacgtctatggtactagatgtaaaactgctagatggctttagatgaacatctcagatttattttccatagaatgcacatatgaaagtacctgagcgtggcgacgctggtgctttccatgataaagatctggctggtgtagggcggtctgctgctgaagccggagacatgcacatcgcagaagcctaatcatcagactggagcctcaactgaaccatcccgtatctgatctgtttagataaagacagttatattagaaatcgccaataagtctcggacgaaaattcccagcatttcacaacttaagaagttcagaattctagcagctattcgtaatgcatcccattgcagtattgcataacaaattacagagatgaatatcaatctcccagctcagggcctctaaccatgacagatggtagatactctcgtatcagtgtcaacattaggtggggatattacaatattacatccatgtctggtatccacagtaccatcaccattccaaatgtgtcaggataccgttactactactgatgtgttaaacagggatccatcacaaatgtatcaaaattgtctggcagagattccaattctctccaaacaaacaactcagcaatcttttgaggtacctcctgaaagactgagtcatgatggctagtctaatcaatatgttaggctatacaacaattcctacgtcttcagtggttattctgtataaatcagtaaagctcccaaaaaacattaatagagtccgcagcatcttcaccaataatccccacatgaacaaattccatccctgaagtggtgaaaccgattcacatccctcacaataatctctcgctctgcatatttggagatgaacttggtgacggaatgacagtcctcacatagcctgaggttcttggtgatcctgatgacttctcccctgccagtgttgataagcccgaaggcaacagctagcttctcactgtgcccaagcaaaatcttctccttctcttcttcttcaatatcatacaaaacagctcctgtgtcaggcacatagccatcattcttcatctgtgtcacaaactcacctatcagagcttggagctcctcaatctgaggattcttgttgtccacagagacaaacatgtgcaatctcttcttcacctctatccagctgcatccaggcaccttctccaacgcatgctcctcaagaagatcctttagcacaccaacttcactatgcaacttagctcgagcatagatatcagcaaggagtacataatttccagcatttctaggctcaagatcaaagagttgtgagcaagccatctccgcatactccacatggcgatgaatcctgcaagcaccaagaagtgagccccacacttgaggactcggcctaatgtgcattccctgtatgagctcaacggcttcgtccaaatgcccggcacgaccaaggagatctaccatgcaggcatagtgctctgcacgaggggtgacattataatccaccatcgactcaaacagcctcttcccctcatccacgagtccagcatggctacaagccccaaggacactgataaatgtgatgatattgggtgaaacgcccatttgggtcatgtcttcaaacacctgaaccgcttcatggccaaatccatgcatcccatatccagatatgagtgtattccatgacacaacatccttccggtgtcctattaaatcaaagatatgccgcccagcttcaagacatccacatttcatgtacatcgccatcaatgcgttcagaactgaaacaagtgagtcaaaacccctccggaggatatacgcatgcaacaatttgccctgcccgagagcgttaactccagcaaaagcatgcaagatgcatactattgtgactgaattgggtacaaggtcttcatcagaagccaccatctcctggaatagcaaaatggcatcacctggtctctcgttcttggcatagcacccaatcatggcagtccacgacacaacattcctctctggcattgtagcaaacacactctcagcatagctgacgattccaagctttgcgtagcagtcaataagagtggtggcgacatgtgtgtgcaatccgtagccacgacggacagcatgcgcatgtatctcgcgtacgagggccgacgccggcacatgagacgttgatgcggcaatgcaggccttgagtccgtgcgcgtagctgtagctgtcgaccggaacgcggagccgccccatgtcagccaggcgcgcgagggcctcctcgccatggtcggcgagcgcgagcgccttgagcagcgcgttccacacgaagatgctcttcacgggcgcctcgtcgaacacctggcgtgcggccgggagctcgccgagcgacgcgtaggcgtcgatgaggcgggtggagaggaacgggtcggagcggaagacggggtccgccttgagccgccggtgcacggccgcggcgagcgccgcgtccccggcccgcgcggcggcgaggaggaccgacttgtaggtgcgctgcgtgggcgcggggaggccctggaggagcgccgcggcgcgcgcgaggcggccgctggcgcacagcgtctgcacgaggtggttcgcgttcgcgggcggcggcgtcggcggctgggacgcgagcgacgccacgcacctggaccgcgacaccctcgggcgcgccctgggcccggccgccgggcgggagaggtggaagagggaggcgggcggcgaggcgggcgcgggggcggacatggggtggaggaggcggaggcggagcgtgcgcggcgcgagtggcttcaccgtgttcgggatatttttccggtgcggtgtggtcggagttcgggcagcggatggggagagaggcggaggcgcgccgcggcggtggagaagcgtggggatttttgctgtggtagtgacaggccgaccgttgatgggctacgcaatcttttgcagtttgttgggctgacggattgtggcatgggccggaatggtgataggccgcttttgcaccgtgttttccaaataaacaggtccaaacagaaaacacctcggcaatgataggataggatcatagtagtaggagagaagaagtctggaccgctggtgattaggcaagtactataacgatgccgatagcttttgccactgtcatcgattaatcattattcctatttacaggttctagttttggtggctggctgtctcttgtacaagaggtactgtctacggattttttttttttagtgccatgtcaatgctagtagtaacagaaactgtactgaacatgggcatagagcagcatgaattgataaaaagggttgtgcctgacgggaaagccagggtgccgcttcccatgaccaatccccctttgatgctctcgcactgcgctgtgtgtcatttccgagaaaagcaattattctatgcagcaaacagtatgtacatgtcatttccgagacaaaagcagcagatgtgccactgccactgccactgcaattgttggatagtggtgggagcagctgcagctgagagagagccaccggattgggcgagatatcgacaaaaccaaacaagcattttgaaaagcgttccaaatccaatgagggatcaaatcagccgtatcttagagtggaaagaacatatgcttaacgagaatccatcatcacagattagattaaggaaaggtctctagtagtccactgcctcaacttttgctcatgtgccccctgtgcccatcctcacaagaaaaaagtaaagttagaaacaaaattgaagctttgctttcaacaggcatgtacctggagaaggaagcaagcagaaggcctgtgtaccgaagctttctacagtgccagggtgagaactcagaagaggccatactatctgcagagcttattgaattgggataccatagctaattttataaaaaaaaataaaccagtagtactatatagttgtatttttgtcatgaagtagtaacagtgagtaaattagcaggagcaaagttgcagcataacaggaggaacaaagtagatattactattccgtaatgcattctttgtccaaaacatatattccgaaattgacttgtgctgatctaaagttgacacgcacacacattccgggcttttccggcttgctttgatttcgttgcgagatgagaagtgtaatactctctcctgtttcataaattttgacgttttagatgagattaagataaaacttttatttgatcatcaatatctttaaaaatatttagtttaaaagcactataacatcgtagatagatctgtctttaaaaaaaatgtaattttttttgttatatatatattgtaacaaaaaggtaaaaaaaacataatcaaggacatacttctaaaaccgtattatatattgtccaaaaatatcaaaagttaattggagggatactagtacgaatactggtagctttgagttactccatgcctcacacgccacacatgtgtagttacagtggtcattgcatgacatatcgaaagaacaattatgcgcctcatccaccgcctgacgcccaagaaaagaagcagcagtgcctcttttcaaaacatgaacagtgcttgcagtacctgctacaccttctttttttagggagttgttgtttgttacagtaccctgtgacgtgcatggattcccctccaaacgaaaacaacgtgcatggagccatggaagaggggtccctcccccccccccccttttttcttctttacttaaaaaaattttaaccttaaaattctttttacatacaactcctcaaactttattctttaaaaaaattttcaattctcaacccttcctttaaaattatatacaccttttatattatctacaatata

SEQ ID NO: 5290 - DNA, 36402 bp, Oryza sativa
cccttatttatatacttaaaaaggtacttgataaggtatgttttattgcaccattccacattgatatgagcttggaatttcttcagaagagctggattataagggacaacccaccggttatctagtgaaacaccattcttcaccacatagcagccatcattgcgtcatcgataaataggatatccatcatcatctatggtagtaacatcacagaactgttttggatagccctttgaacaccgaccatccttcatgcaagggctgcttggattgtgctcaccacatgggccatgtatcatgaattcatcaacaagaccaacccacacctatcagctgttatatctggtatctcagcacagattaggttgtcaatgaatgcaggtgaaggatcttcagattgagctgtgagccatgttaatgtgtgggaatgcggcaatcctcttttttggaactcaacagtgtacacaactgaaaagcaaagcaacaagaaaagaacagataatgtgttaggggaagcaatagatgtgttaggaaggagatgtacgtaaagataggacagctatcatgaataagacaagtaacacaccagcttttatgggaccgaaggcttctccattcttaatagatgtgatgtactcatctagcttcatatggtaaacacgtgtgaccatatcacttctatcacttggtttttgccctgcctcaaaacgaatagcttcaataatctctggccatttagaattgcaggtgaaagttgagaatatttgaggaggagccgtaagaacggcagattgccattgaatcatggtagttttgaaccatgtatcgccttcctcctatgaaacttgatggcaaaattacttggtgccaacatcctttccatcactgtctcccctagcaacagcatcagatataccttgatgtgtctcagagcgaagttttttctggttgagggcatggtatatgagtcgagatgtctctatacatgagaaagcattcacagcgagctgatcagaaagcctaccacaacaggtgaatggattgggctcatcctttcgatagtgggactcgtaccgataaaattcaagcatcgatgcttcgtcgtgactaccgggtggctgatcatctacctctctaagcttgataccagtatgaaaacccacatcaccatatgggaatagaagcgggtactgcaatgacataagggctggatgaataggtgacaactgacataactcacctgaatgcttctgcacaatgacatcaaactttgatacctcacaagatgcactaggtataatcagtgctgccaactcagaggtggtgggaaggctgtaacggtcactctgagaatggcctgacccaatgagcttgatagcaatctcaggagcacttgaagaaagcagcttgtttcgagcaagacggaactgctgcacaagaggattgaactgatcaagcatcgagataagctcttgcacaataacaggatcagggacatccccaggattatcagtgtgatcaaaaatattaagcctattctggagctcattggcggtgtcatatatgtacagctgggcgaattccggacgttgtccaggagcaggaaccagagaaccaattctgtgatggacaacaccattgatatgaaaacataaggccccggaccagtgtttatgctcctatcaatgttagccccaagcgatgtgaatgcaaataatgaattatattgcctgatgagtcgcatgaaagagttggaatgggcaccgccatcaaaacgaatcaagtcttgtaagataggaggaaaaggcttgggtgcgggtaaggagatctttccaccacgacaacacagattgtatgcaatcctcttggctctgtgcgagctctggctaacaaccctttcttggtaccaaaataatgcaccacaatgattgcattcatagtcagggccaccataataggagcgatctgggtacgtagctataagagcggaaaggaaacctataagtagagaagcatgcatatgtttgtccagaaatagatagagaggcaaaaaaaagggacaaaggcgaagcaaagcaaggttggtactaagatattacctttaagaatttgcatgtgctcctttggtatggaatatgtgaatctcatcgacagtgaacgcggcacatgttctgtgcaaatagaagaagaacggaagaagagaaatagcaaataagaaataaaggtaaacaaaagcaagaaagaacatcgccataagcgacaagaaaggatcatgtacataagcaggtcaagaaccttgtcgcaaaataagacgcattttcctagcggcctgtcttttttcccggttcactcgagcaacacgtgctggcactattgggcaaaaatgatctcctatgaaaaatttaaacaggaaaaacaatcaatcggaagaagggaaaatgccttagcaagctaagcaacacaacaaatagtagtccagagctaactgttgggtcgagaagactgaatgtggccagctccacaactccctgtggaagtgatgcgaggagatagaatgagggatcggagagaaaacaaagctaagctagaaagaaccaatgagcaaatagatgaacttatcaatatgaacatacattttgagtatatcatatcacagcaagtggacaactgtacaaaaatatgagaaaatggatgtgcaagggataagagatgacactaaacattgagacagcagcgactacagcaagcgtacatacctatagtgcatgatgaactacccgtgagcattgagaacccagtggcaccgtgggatgatgacggctcatctatcagaaggcagaattgcgaatcaggaaacaaaaaaacaacaattatcctaatgacctcgctaactctcagactattgagcgtacatacctatggcacatgacacaccacccgtgagctctaagtgcttattggcagcagatgatatggaggacccatctattggtgagcaaaagtgtgaatcagggaaaaaaaggatcgctaatggccttgctaactccgaggcttgcatacgaaactataatgatatcaccaagtaccatgtggacgcttccgcgggcagatgcgaacgaatctggatggctccatgtcatttctatacaccaagaaacgaaaggagcaaaatatagacacattcggaaaaacatatggatgaatatataatggagagggaaagcataaagaacagaggcacgagctactatagaaatatggaagaaagatagatgcatataagcaagcactgaataactggacataatatgacatatctaacagcaacaaagtgggaaatcatcaagagctgaaccaggagctctcggatgcttagactggaacatacaaatatttgaaaatgcgtttacgaaaatggtaaaacaccaaagacataaccacattgaaaggctaacccaaacatataactgtataaggtccagcaaagaaagaaacagatggacgccgaacgaaatcaactggcaacaacacaagcgttcgaaaaacaaccaagaatatatatcacagcggaacaatgtaaaacaaagtaatcagtaattgaaggagggaaaaaaagaggagcgaatatatatcatagcggaacaatgtaaaacaaagcaattggtaactgaaggagggaaaaaagaggagcaccatatatacgaaatccaccgaacagctatactggagacaaaagcatctcggtttatacatatcgcagcatcgcatatgtgaaatgaactaaacatgtatcccacataagcgataaaaaaaccaacctacgaaagaatatataacatagcaggacaatagaaaaatgaaataatgtaaatatatgccaaagcacagctaattagcaatccaagggaaaaaaacagaggagcaccatatatgcgaaatcaagcaaacaggtattcgctgacataatcatctcagtttatccatataccacagctccacacatatgtaatgaactcaacagctatcccagtgataaaacaatgtgatcttgtactaaataccttagcgagcattagctgacgaaggcaaagatgcccccctccctccccccaaaagaagatgcgatgtgtgggagagacgccaattggagcccgcaacctggaaggcagagaaaaaaaatacactgagcacacgcatggatggaacaatgtcggcatcgcaatggggaaatcgacagcgagacacggcaggaaagatgaaaaacgaaataacataaatatatgccaaatcgtagctaatcaggaatccaatgaaaaaaaacagaggggaaccatatatgcgaaatgaagtgaacaaacatccagtgacataatcatctcagtttacccatataccacagcaccacacgtacgtactgaactgaacaggcatctccgtgataaaaccaggtgatcttatactaaataccttagcgagaagtagctgagggaggcaaagatgccccctccctccccccaaagcaagacgtgatgtgggagagacaccaatccaagagcgcagcctggaaggcataaaacagggaaaaaacagtgagcacaagtatggctggcacaacatcggcactgcaatggggaaatcgagagcttgcaatggggaaatcgagagcgagcacagcaggaacggtcggaccacacgagacgatgcggtgagggaaaccaccgagctagaaatccccaagaactaagcgggaggagcagcaaatagaaccagctccatatatggaagaaaaaagggagtggaagaaagaaggagcgatgcagattacctcccctggtcctcatagggctctccgcgtagtggagcagcagccgtagccagccccgtcgtcgtcgtacgcccatggcagagcactatcgttgctccgtcgctgatggtcagataggggatggagaaggggcacgcgtcgagaggatagcggcgaccaacggatgatccagcgcacaggaaaaccaggacggagcaaggtcacggcaccgatgccgcgatgggcctatgagcactaaaaggctgccgtgcattgggccaaaaaatcagctggcccatatgtcacgtcccaaaacgactctaaaatatatcccttaaatgatgcctagaataattaaaatccgtgtgaaagcctccaacaattaaaatgtgtaaagttaaaagccaaataaggcttagaggatttttgtaaatctcctaaaagcctaaaatgcgtaaataaattttagtggaattttcagagcacaaataataattattaagaaataaacaaagttaaaatgattttataaaaagaaaaaccctaaaagtcccccttccctcccttgggccggcccggcccatctctcctcccccctttctctctctctcctctccccgcggcccactcggcctctccccgcgcgcgcgccgctgacgggcgggcccgcccgccaccctcgctaacgggtggggcccacccgtcatccccttcctcccgccgctcccgccgcctcccccgcgccctagcgccgccgccgccgtgaatcccgccgcctcccgccgtccccgcgtgcaataaagtggggggaatcactccccgtgatcccctctccctttccccccattttttccctctctctctctcgcgttcaaacgggcggatttgcccccgcaaatctcgtcggcgccattgatggcggccggacctcccgcgccggtgtccttcccctccggccgctctctcccccttccaaccctatttaaaccctccccgcgcctccctcgcccgtttccgccccttgccgcaccgtctccccgctggaatcgagctcgcgccgtcgccctctctctcctccgtcgccgacgacctccggccggccttctccgctcgccgggaccgtctcccgccccggcgtcgcctcctccggcttcgccgcactgccgtcgaccccgtccaccccctcgccgagtccgccgaccgccgaacgccgtcgaccccatcgacccgagccgcgtcgccgccttcctccgctccggtcgcctttttcgtcgtcgccgtcgacctagggtgagccgtggaccgccgcctcttttcctccttcccttcccctctctcggccgccgctccgccgtgcctatggccgccgccggcgaccatagggacgcgggcgccgcctcccgccggccgcgccgagtggccgccgcgtggggcccggccgtcagccgcccgcgccctcgagtgcggctgacgcgtggggcccacggcgccggccggtgcgagcccgggtgcacccggtccaccgtggaccgtgaggctgccgcgtgggccccactcccgtggacccggtccgcgcgccccctcccctcggctgacgcaataaaccctttttaaattaaaatttaaatgaagaaattcgcaaatattcatttaaagagcatataaacttcaaatggccataacttggccatttgaactcggaattggaccgttcaagtctcttttttttccttaagaagtcaagaacccatttttgtgctttgttcctacttgttatatggagtttattagagtaaaagcccttttatttttccgttggtcatgtagacgttgcagcttcggaagatccgctcttcgtggaggttgaagccgacgtttgggaaagtgagcaaggcaaatcacatcatccttgaacatattgaatcccagtttataaaattattttgatttaaattattgcactatcgctttatttaaattctcgcgttatcactgttttatctagccatgcctatttacctttgttatgaccttattattgttattgttattatttccttgttcaccctagaataaacaaaaccccaactagtggacactctactcatggtaccactagtatgattttaggtagatgcttcgctggttaattaggcaacattaggtggttttacaactctagactttgggaatactcttatcacctggacactatggaatggttggattattgtggaattggattcacacctccccctctattcaaaaccctcaaaatgattttaggctgggcttggggtgcatggttttgatagtagcacctcggccatataaggaccggtcttcgggcctctgttgcaaagcactaccgtacttccacatgtctagtgggtaaggcttagtttgtggctcagtctggttataaacaaaagtacacggatggagatggacgaagtcgggggtcgatggacatctctagggcaaatgaaggctacacgagctgcggcccggtagtcgagatgtcatggcacagggccggtgtcctgctgctaggggctcagtcctgcctacctatcccgggggttccggccgtaggtggggttgggtcggtactcttgtttatggctaggatgggttggaaactatgtcatgtcttccgtccgtataccatggtggtatgtggcacgtggttacacgtgaggaagatgtgtcttgtgggtaaagatgtacacctctgatcagagtataacctattcgaatagccgcgccctcggttatgggcaagccgagcaatgtacccaagttagtgttttaattcttaaaacctgcctaacagctaaaatgtggaatggttggcctgggttggcttgggacaagctgggacccagggtcgggttgccagttcggtctgaatcatcgtaggccttgggttaaggcaggttcgtgtgggttcacggccttagttaataatattgtatagctctaggaccgtgtttacaaagtagctttaagcaactaagtgacttttaatgctgtttactgcaaaccctaaccccctatattatggctcccttgtactcccttgcatttattctgcacttgtgggtgtgtcttgttgagtacggtggttgtactcagtcttgctcaatttttcccaaacccagaagaggagcccctggataatgaaggctttggtgtctagctcgtgcctgccgtcaagcgcttgtggtcgtcgccctagtcttccgctgtttttcgtttgtcttcttgtgtgctgggtcttcgtcgcccatgtaataaattaattaattacgcttccgcttgttaaactctgaattgtatcaacttttggtgtaccttgcctcctgggacaaggaataatgcacgcacgtaaggaacgcccgttaggttatttctggtcgtgacaccatagaagcgctatcctggcttggcagctgatcaactgtaacaaaacaacgtgtcatgattgtattggataacggctggctcaatcgcccggaaggcagctaatccagcacctttaagatatttaatattagggaagcgttatatctgttttgtaattttgtaatattagggaagcgttatatctagaattgcagtttagtgatgattttaaaattcgaggacaagaaaaagggacgtcaagtgaacttttttccttcttcatcaaatttaggattcctacataggccgatttattccttgaaaactcaacaattcacaagaagggcttttagggccaaatcaccacataatttgctcgtggcccataaataaatctacatctatatacctaattaaaaatatgtaaggcttcgagaaggattttcgtccgtccctcctcacgtcggtcaaggcgacacgactcctccttccctcccgcgtgcacctccccctccccctcccccactccctccctcctaacggacttcatctctccctcacgatcctgacaatccccctttccctcacagcccctctcctatgtggcgcccctcctccccatcgccccttcctcctagcgcccatcttcttccctttcgttccctccctcctgcgcgtttaacgaatatggaaccccctcatccgggaacgcgttttgacacactcactcggccggttcaccaccagagcttgtcgttaccatttctctctctgccaggaccacttgttgttgtttccgctattctagttttcttcattaccaaccgccaccatttatggacgagtcacgtcgtgggatacgtccggccaccttactcaccaccgtttggtttccatatgaccgatgctcatcttcccttctcttttgtttcttgtttcggctaggaaaggcgatggaaaatgttaatctttttttccatctttcattcttattgcgtattcaaggaagacggaaccctcttgttagggaatacgttttgacacactcatccagacatccagtcatgttcaccaccagagctcgccattgtcatttctctttctatcgtaccacattgttgctagccgcatgcatgtttattgattttcttcttagccaacccccaccatctatggaccactcatataatattgaaaccataggaatatgaataaaacatgaaaattcgaatttatgttaataaaacaggacctattcagaactaatagatcggattttcatctatatgttaaaataagcttttttaaaaaaaattctagttaatttcagttgtttttccatttccatttttaattttagcactatttgatccactaaaaattgttgtaacttataatattgaattgtttgtagctaaattaaaaagtaatttattgatatatttttttgatattaaattatcgttccggccaaagttatttgtagtttcatgttgatatttctatgattatattttcttcagtccaattgtgatatatggtttaagattttagtttaatcatatttctttcattccaattgtgttatatggtttgtaattttagttatgtcagtgttatttagaattcgttgcaacgcatgagtattatgctagttaattagtaatgagtaaatttcattagcggtacataaacttgtcaggtgggtgcaatttagtgtataaacttgtaaattactcgttttggtgtatgaacttgtctggtatgtgcaaactaatactaaaatggcacgacaagaccgatttttctatgatgaacataataaattatatattagtagatgtcgtgcttatacatagtagaaatgttatatttataaacttaggttccaatttatctttctttgtttctgtgccatgcatcattgctcggatgtttattttttttatgcaatcattataccttattatatatttatccttcttagacacatgtttacatagagtttaatcttgccgtgcgattttgaccttgttcacactcaccaaataagtttgtgtactaaaacgagcgttttacaagttcatgtattagattgcacccacctaataagtttgtgtaccgctgatgtaatttacttattagtcatttataagagaggaattaactaatatatttccacgtgggtgatttgactatacggaagcaaaggccaactaattaaacattttcttgtataagaatgatttctctcgtattccaggaatgcgaatcggtgaatttgaagactaataaagagagaagacgacttatgcatggcttctaaattttgctaaccgtgactttgtggactaataatttcgtcacatggttattctttaaatatatcgtctctgtgccccagctgttttactttattttgttggagtcgatccgtggaaataactgtggcttgaagttatagtaaacctttaccctcgtgcatggttcatgattgaagtctcaccgaacgttttgtcacaacgttatagaaatcgaccccagaacggctcagcaggaaagaggcacgtccaaatgcgcacgaccgagacagaaacaccatagttctgccaccgaacccaaacagtgcgtctgtgcgtgcagcgacaccagtgttgccaccgtatgcggaatcgcagttacctgtaccgtggaaatcccttcgtgtagcctggcataggtacgtaattccagtactaggctcccatcggttgcccatttggcctaaaatggcttatttggcttattagaaatttcaaattaatttataagtaaaacttttatagatttgttcgtagcgacttaaaagccaatattaacaaaaaaaatacgttaaaagcattttaaaatcaacttcaaaatcaagttcaaaaatttaaattttggcttattttttgcttgtctaggccaaacgatggggctactagtgtttccggcccgatctgctctgactttctggagcgagccatcgtgcttgtgatcacgtcgtctccggcgagtcacctcactcgtggttagtactgccactatctgaggtaaccaccagcacagtacatccactgatcgagagaacggaaagggcctattcattcatccccagcggtcggcgccgcggaagtccgtgccaaattctcccccacgctgatcgagatctgaacggtggtgacgactcacgcctcgtcagtcgtcagtgcccgcctcggcgcctcggctgcccgcagtttcggcgcgtgcgtacgccggcgcagacgccagatgcaattcacctctccgggtccgggcggcaacgcagcgtgcgcgggcgtgacgagcccgagggggggcggcggcggccgatctcgtctcggcatggtgccacggcgccacgcaccctcgtctttccgcatagcttttctccaggttcacctccccttgctgcccccaccaacgtggccacgccagcgcccaaccaccgcccccgcccgcccgccccgttcggccgcctgcccccacggccccacccacgcaagcgccccttccacgcgtcacgccgtgcggcgaccgaccaccctcccactgattgcgaccgccccctcaccacgtgtccctcccacgtcgtccccacgcccgccctcacacaccccgcgccactgtagacactgtcgtgtggagcccattggctctgtccccaccggtcagtgaggggttggtggacgactatccagtcgtgactcgtaagggcccagggtaaataggtaggcctgatatttgtgggtcgcccatgagagagaccccatgtggggtgggccccaccaggcatcaataaataacctgtctgaaggcgggctggcgccacgtgttggcagcacggggttaggcgataacaccggcgtcgtgatcgccgttaacatcaaccgcctggtggaccctaccgcgggtgggccccggcgcacggataccttccacgtgttgcgggccgggccggggcgtggccacgcgtcgagatcaggtggagatggacggctcagattccccggaacgggagcacgtcacaacaactggacctgtcgggcgctgcccgtgacggcgacgggcacctgccctccttcccctcctcctcctctcctcccccctaccttctcttctactccccccaccacccccgccttcgtgcttgcgtgtcgtcgcctcacctcgcgcctccgctactactgcttgtctgctgctgcagctgctgttattaccataccgcgggagaaggggggccgaacccgaaggcgtgcgagagggaggtgaggtgaggtggagccgtggaggcgcttgtttcgcgtgcgagacggtgcttcgtttcgcctcacgttttccgagggctacggcgacttggtgggagcgcggagaaaatctagcgagccgtcggagttgggtggcgcgcggccggctgtgcttctgaaggaggagtaattggagtagttgcttgccatggccgagatctgctgcgaggaggccatgtcgccgccggccactgccacggctgctgtcgcggcagcggtctccgcctcggccgccgcagccgtctcctcggcgatagacaggcggcgccgcaggatggagatgaggcgcatccgcatcgcaagtgatctcgagctgcaggccggagaggatgggcgccctggaaagcggcagaggctggcgcgcacggcgtctggcgccccgcgtcctgacgaggattcggcgtctgagcggccgagttgtggccgtacggaggagttcccgaggtatggggtcaccgctgtgtgcggccgccgtcgcgagatggaagacgccgtgtccatcagaccggacttcttgccggcatccggcaagttccatttttacggcgtcttcgacggccatggctgctcccatgtaagtgtttgctgatgtctaaatgtgcgaaccggatagtgatctgtgcacatgtaattcagcgtgctaattcgagttctatgaatattaggttgcgacgacgtgccaggacaggatgcacgagattgtcgccgaggagcacaacaagggggcctccggcgaagtggcgccttggagggatgtgatggagaagagcttcgcgcggatggatggggaggtcggtaaccgggcgtccacccgcagcgacgacgagcccgcctgcccgtgcgagcagcagacgccttcgcgtcgcgaccacgcgggttccaccgccgtcgtcgccgtcgttagcccaacacaggtcgtcgtcgccaacgccggcgactcccgcgccgtcatctcccgtgccggcgtccccgtcgcactatccgttgaccacaaagtacgtatatgctcgcatcacagggccggctgagcctttcccgtccatctgcaaaaaatcgttagtttcttgtccatgagcgtgtgcctgacatggttgctacttgctacctcggaacggttcagcccgatcggcccgacgagctggaacgaatcgaggcggcgggcggccgcgtcatttactgggacggcgcccgggtgctcggcgtcctcgccatgtctcgagccatcggtgagctgatctagttttaccttcttctctcgtcgtctcaagaattttgatttggcacccggatccgaaactcacctgcgtatgggcgcgcaggggatgggtaccttaagccgtacgtgacgtcggagccggaggtgaccgtgacggagcgcaccgacgacgatgagtgcctgatcctggccagcgacgggctatgggacgtcgtgaccaacgagatggcgtgtgaggtcgtgagggcgtgcttccacaacaacggtccgccggcaccggccgcgcggccgagcggcgtgccctcctcggccgaggcggcggaaaccgagaacggaggagccgcatcggtgaaggggataagcaaggcggagtcctccgacaaggcgtgctccgacgcggccatgctgctgacgaagttggcgctggcgcggcggagcgcggacaatgtcagcgtcgtcgtcgtagatctccgccggggattgtgattcttggcgcaatattctatgctccatgattgctttctttcttcttcttttttttattctaagttaatttttcccttcaaatttcttccttatttctctgtttagttttagttttactactagctcctaccaagataaatgaatataatagccttttttttcgcacaaacacgaaccagacagatataacaggagagtgatcgtaggcgtaagatttcggaatcaagaatcaatgcgcacatctttaatcctgccgtagttaatcgttattcgatcctaatgtctctgcaagtctgcatccatatgggtaaaattggatccatgggatgctaggttccgttgacactaccaaaattagagcatcttcatgaaggaagcatgaaaaagctcaccactcgtgtgagtgctagcaacacgtccatcgtgcatcctagaaaaggagaaaaaggagaggaaaaaaatagggaaacccaaaaaaaaaaacgtcccatcgtgtgaggctatttcggtggccatcctaggatgaggacagacagcagagcatagaaattgatgctgatccatgcgtgggggccgcccccatggtggtgagctgaactcggacgagattctcctgctccaccgctttctgtgtggaaatgtatggtgtttcttgtgataaagttttgagccccaatgatgcgacccacgagcaaatagctggggtccgcgtgtccagcctcgtcccccttttccctttctccccgtcctcgatgcccctttgcgttggcgacggagcaccgagccaccgagaggcgggagagcactcccttcgccgcgagttaggcgccgcaacattattgggggctgcacgctctcgacgcaccccggggcgtttccgcaacagaacatgacacgacgcgaccgggagcaaaagggaaccagctgtcgcgatacagcaggtgggaggagtagcgaccaccaaattttaaggcagcgtcgtggtggtgactccgtgctgactcgaccgtgcgtgccgaatcgttcgactggattcccggccaacccctcctaaaaataggcgtcggggggcaacgtggcgcaacgcgcgccgagaggtggggtgtgtgtcactcacgccgcgcgctggggacgacgggacgatgaggcgtgtgcgtgtttcccccgatgtgcccggcacgacacctcgccccgcgtagagttgacacacgggagggcgcgtcgccgtcgcggatccagcaaaggaagatatggcgcgatccatcggcggcaagggcgggggaggcaacagacgaaaggcgtgccgcgatcgcgatgggacgccatgcgtttttttgtgcgatgggagatgaggacgacgggacaggttacggagcacgggagcagcggcgaatcgtgatccggctgcaatccaacgtcggtggcatactgacatcagaggaagggcggggaagcaacggccagtccagctccagggctccaatcgtgcatgatctgattgacgataggcgtatccgcataggatgcttgctgtttctgtgttctgccgactgacgtcgcatgcgtgaaatagccaaacagggaactatacttgcaacagaaagagaggtgcatgtagctgcgccacatctacctatttggaactcatcccttattactactcactactacaaaatctatttttcatggcatcactttatttttttttctttggcggttatacgcagaaaccgccagaaaaaaattaggggggggggctatgggccaccagcgaaaatgaatcttcgctagcagctcacttagataaccaccagcaattttcgccagcgggtgcttaggagcaccatctgagaaaataaattcgagatataaatcctatccacctctctccgcgctttcgtggcctctcccacccaacccaactttctccgcctctctcccacctttctcgatacctctggcctcccccctctctctccacctttctcgatcttcctccagcctccctcctctctccaccgccgtcggctgccgtcgctttcaccgccgccgcatccgtcctggggaaggcgagagcgaggaggacgaatccgctgcctctcgtggcctctccacccaacccaactttctccgctctcttccacctttctcgatacctccggcatccctcctctctccgcctccgggcctccctcctctctgcaccgccgtcggctgccgtcacttccaccgccgccggttgccttcacttccatcgtcgccacggcatccatcctcgggaacgcgagggcgaggaggagggatccgccgcggcctggctgtggggagcgtgcatccgccgccgtcaggccgcggggaggatggatccgctgccgccagcacgcggggagcacagagctgtcggcggtagctgcggggcctcgtcgtgtcgcggatctcatcgtcacggtcgccgccatcgggccgtggggagcgcggttccgccgcctccggccgtggggcctcgttgtcggttgcgtcgcagatctcgtcgtcatgaccgtcgccgccgggcgcggggagcgcggagctgacactgctgggccgcgggtagggatggcaatcgggcacgacgggcacaggtagtgcctacccatacccgtgcccatgagattatttgtgcccgtgggtatacccattactacatgacgggtaaggatggttgcccatgcccattgcccacgggcgccttgtgcccgcgggtgtgtgcccgtttacccgctacaacaaaagcagtggaacaaaaagtctacaagcttctaagttcgaatcgaactttaaacatcaaatattcttcgccttggtgtggtgtctctcctctggcggcgatagagtaaggggaagagaaataataagggaaataaaagggaaaccgtagaaaacaaagaacgtggctaatgtattctagtggactttgctcctcgcctacatgtaagttagactttgcgggtaaatgggcaaagtgggcatgggtagtgattacccatacccatacccatttacccatcgggcatagcttttgacccaataagatacccatgggtataaaatggagaacaaacccaaccctaatagagtttttacccacggataaacgggcaaacgggcacaattgccatccctagccgcgggcggtggtgctcggccggtgatcgttcgacgacggcgacaacaagcggtagcggcttaaagtttctttggatttgtgcaacgatccgatccggttaatgtgtttggagatgggaatggaaattggtgtgattctgaatgaaaatttttttaccgtaaattattgatgcaaattgctgtggatttgtggatcgaggagtggatttgggaataatttgaactggtgttgacgaaggtggacagagcgatgttgctccgtcattttttttagccttggacagtattaacactggcggctggtatagtgtaccgcctatgaaaaatggatcgtgtggtattcaagtttcgcaggcggttagcttacgaaaaccgtcagagaaaatggatctacgctggcggtcagctaccgccggcaaaaatactgtattaccattggcctttagtcactggcggtgctgtcagccaccagcaaaatttcattttggcaaaaaaataatgatttttctagccgtgactgtatttaatttgttccaaaatggtacggcggtgattccaaatttatgatgtgtttagttcacgctaaaattgaaagtttgattgaaattggaacgatgtgacggaaaagttggaagtttatgtgtgtagaaaagttttgatttgatgaaaaagttaaaagtttaaagaaaaagttgggaactaaaccaggccttatagtctatagctatattttgagatgggtagctacgttaatagcttgtcaacaatatatgttagtgtagaatgtcagttagcacttggaagatttgtttataatcttcccagtttaacactatcaatcttccgcgcacagttgttgtgatgatggtcgaaacaagtcggtcgaacaaacgcattccacgtatgatgtaatatagtaactgtgctataaaatacagtcttttattctctctggagaaggtagcataaaattaagtttttctggagggtaacataaattccagttgtttgtggcgctcgctagtcgctatcacagaaataggcaatggctcgtcgagtcgttttccgtcttccatcctgtcttgtcctagaaaggccttcagtccttcacccttcaagccctgcttttgtttccaccaaagtctctaactgggccttcaccaaatactttcgcgaacattgtactacgatggggctatttttctgggtccaccaaagaggaaaatctattgtgtggcctgcgcactacaaaaagggcttgggacacccatgatctgactgggccgggagatctgccttggatctgactgtttgagagtctcttctttctttcgctaaaaaaaggtctcacctttcttagtctcccctgcaagagatgtcatgaccaatatgcaatgaacatactcgagagtaacgcatagtctaatatgattgcaatcaacgatgcactgtattattagagcaagttttatggaggggtgcttgctagcctttagttttgttcacatcatcaactaattaattaagcgatagtatataaaatagattacctctaatacactagctccagtataatataattttttatttgcatccaatttacactggtctctcgagtctcaattttctcccttagagtttgttaagaggttaccttttgtatgaggagtggccttttctcttttttctttgtcctctccttcaattcacctcataatttagtcttagtatatggcatcatgggatctggcttaggtgtccttaatacttaggtggtgtttagtccctcccacccaaacaccaccttactcttatactggcataatgctcgccaggttctgaatgtggtctccaatagatatcttttataataaagtagaataacaccaaagttgaatgtaccttttttggagcgtgtatgtgataagcatatgcttttgtattgtgtttctcaaataataaaataaaataaagcagagtgacgtacattagattggtaaaaccaaacaaacaagtctaacgcgatcgcaattggtttcgtttgctcatgtcaatctatgggtttatgattacgggcatgtttagactattgccaaaacaactttttcataatttagcatacccaaattttttataagagacaacatcgccatgttttgatagggtaaagttaatttggatatgtttagtttggtgcccccatataggataccaaatgttggcaatattcaaaggataccggattttggtatgttactatggtattgccaaattcctgtagtcattgctatttgctaatgtttcttaacaaaccgacctatgttttgtattccactttaaaaaaaatagcatggtttaaattgttagaatcaatccgaataggtcttatgtccacttcacgaaattcctgctgctcgggcgactggccggggccggggggaggggagagagagagaattgggcgctctccatgtgctacccctggggccccatcatgtgcccctgttacctgccacgtgtctccaccgcatactccattgcaaaaaatcacccacatattttggaaaccctctattaagagaattcgttttatttttttccacaaaaaatgtttcacctagtatactcacgatgtttcactatgtatagatctaatgttgcagtgaattgaaacattcttttgcaacaaattatccacatattatagaaaccctctattaagggaattcgtttcattttttgttccacaaaaaatgttttacttagtgtacttataatgtttcactatgtatggatcaaatgttgcagtgaactgaaacattatttcgctatttgctgaaacattgttttttatataaggtgaaacaacacccgatttaaacgattgaaacattttcgatctacttagtgaaacaattccaaaatacttggtggaacatcgtgcaacatttaaaaataattcaataataagctaaaaaagtttcgccggaatatatctatgtgtgatcttgttttaaagatttaattataacgaatttaatggtgcaatcggattatgatttggacaaataatttaagagaaaaaaatagtttaaagtggttttgcacgtatgcgtcatgctgacgtcaacgtccgatttcccccctccctgtcgggagcccgacgcggagtcgtcttctccacttcatttatcaaatggagctgattttggataggcatgggatatgccggtccaaattttaggtgttagggtgtgcttttagagcaattttaataataatattgccaatcactagttttaaaaattgaaacattatttataaccaatctaatagctcatttatataatagttaattatagatatatactgcatcattaatacctaatatattaatgattaatactgtgtgtaacaagaactctcttccttttaatatattgacgtacaatctttttacgtgccttttatctctcccttcacataagcacaaatataatgtggtacttcctccgttccacagtataaaaccttctaacattatccaaattcatataaatgttaatgaatctagacacatatataaaatatatatattgatcaatggatgaatctagataagtccaaaaagtcttacgatataaaatggagggagtgacttggacaatctgtttacgtcatcttattatactcactcttatatggataagtatataaatgtgtatatgcgtaaatatgtttattgtgtttctaataaaattactaccacattgtttcgattttgaaggggtgggtaggagagaggggaaaaagtttcctcctaaaaaaactagaaagaggaggttgagtcgagggaccgatcgaatatgtttagttccacgctacaattaaaagtttgactaaaattgaaaatttgaagaaaaaaattataagtttatgtgtgtagaaaattttgatgtgataaaaaagttagaagtttgaaaaaaaagttaaaaagggtaccgcatagtgccagatagtacagtagccaccaaaaagcccacatatccgactaggagtacgtttttacttgcttcccccatcggtctccctctggcgcgccgctttggcttttccgaaaggaagccagtcatccatctcccccgatttaacccgacgccgtgccgctagtctgatccgccaccgccacggtctcctcctcgcccccgtgcctccgcctcctcctcctcccgtccagcccgtatcgacgagaccagcaaggcgccgccgcgcgcggagctctcgacgcccgccgacgacccgcccgccgtcagatccgcctgctgcatgcttcctccaggtttagatcgtttccaaaaatcctctgcttctcttcagtaattccacccgcgtacggggtttctcgatcagagcgggggttccgtttatgatcgggtcagggtttacctattccttgtgatttgggcggcatgcgatttttggattataggtgacgtttggaggatatgtaatattatgggttttcaggaaatcgtttggatgctgtagttaccaaccaccgcagcatgcctagcaatttgtgcaattactcgttactcttaacagcactcacgctgtcacgcgcggtgtggcacactgtcaaaatttgagatacgttgacacttcatcattggtggaatctcgtgaaggaattatttcagcggatgtgcatatgctatagtatgagaacatctatggtattatgtagatacaacaatcactaaccagtcacgagaagaaggtttttagttgtgattctataatatatttgagaatcaaaactaactttacaagcttatgtgggtttgacccttcaaaatttcttggagttttttatagttcaacaagcgtcaatgattgcgattcatatatatacattgtttactagtaatggtttgtgtgagttcttgagacaaaaatatgtggttgaccacgcaccaaatgcattgttccaccactgcttttggttgtgatcattttcgcatagatagcgtcatgtcatgctgcattttgatggtgatgttgtgattcgtgaatgcaagcaaaataaacgcaatggaaacattttttttgcaagtcatattttttgtttgtttctagttctcatcgttatcttcttttaataaatgtgtccctttgttctcttagagcattttcccctctcagaaaattggaaacatttaataagcatcagagtgatcaatcttagtgaatacttaatagagaacataattccatcaatgttctgttcagagcaaatttgtagaaaagaaaaccaggcaagcattgaccttctgacttgtggttagaaaaattatctggttgaatctccattctctttgtttttaacagtatttttatttgtacccatgtaacatcttgtttttcctttttggtccattatatttcgttgttgaactgcaggatttcagtatgactgaacatataaattatgatgtggtggagcagtgtgttaaaaacatcctctctctaatcaaaccagtggaggatgacagacgcaaacgactatctgcaattcaggagttatcaaattccattcctaaagttgcagccttaagaggtgagttatctcatatttgataatttttaagtttgtaacaatgtaatttttgataagctaaatatgaaatgcaatggccactgtggacagttatggtcagttatccttttggcacctacagctgaggcccttggtcacttctcttgtgatttgttgctagaatggtgggaacgggcaacaagtagaatatctaagaaacaatgtcttccagtgatagcagataggcctgcaggctgcagaaggtggtcacaagttgtcggcgaatacagatctaggcgacttaagtttagtctcacgcattgcattcttttcagtagctgtcagtttcgtattagggagaatcctccagttgtttgttgccttttttttcctttttgcttctaattatctgcatcatttgatctctcaagcctttttgcatgctgctaaaaagaaaataaaggcaatggtgaccagtgttcagtttattttttcactacagtcctaatgctgcataatgtggaactattaggtgtttgttttgctataatggggtcatgatctcttcaaatggtatagattgttcaataacttattttccttcatatacttgcttagtcaatgcacaggttctctaataagtttccatgatggcaaaatgaaatgtcaaaggatttaatgatgatatgatggtggtgatttagtgttgccttatctgaacttttaaatttctttaacaggtgctgttttcaaaccttttggatcctttgtatcaaatctttactcaaattcaggtgatttggatatatcggttcacctccctaataactcaatcataagcaagaagaaaaagcaatatgtcttgagggaattaatgagagtgctacaaaatagaggtaaaccttttttaccatattacataataaaggagcatgcagacttcttctcattgcatgatcattgtacccatgaaataataaccatggcttttgcggtaaaaccataaaaggattccatattatgcaaccacacatttacgcacataggatagcaaaatcatgtaggagtactaaatatgatgaaccgtgtatctttatttcaaaggagaattggacttgaaattcacaaccttgtgctactatattgggcaattctttttagtcatacaggtagctcttatttatattatgatttcgttggttgaattgtgtcaggtgttgccggatatgtgcaatttgttccttttgcaagagttccagttcttcagtatgtgagcaacaccttcggaatttcctgcgatatatctgtgaacaactaccctggtcgaattaaatccaaaatcttctgctggatcagttctttagatgtgcgttttggtgatatggttttactggtaagactaggtaactagtagagagtttcttgctgccccatcattttgttggaaagcccaaggttcaaactatgttttcttgcagatcaaagaatgggcgaaagctcaaaacattaatgatcccaaaactgggaccttaaactcctattcactttgcctactagtcctcttccattttcaggtaatattcatctgtggtatttcaagttatactgatacatgattttaggaatatccttgttactgtctttaccttattccagacatgtgagcctgcaatccttccacctcttaaggagatttatgaagggaacattgaagaaggtattgctggtaaaatgaactaatattttctttgatgatgattgtctagcatatctgtatctgaattcattgcatttacatacagaaatgacggtgtatgatgaggaacatcttgatgaggtttgctctgaaaatttagcaaaatttcaaagcaagaacaaggaacgaaggaatgaaagctctctttgccatctgcttgcaacctttttccacaaagtaattaaacagtatgctccgtttcattggtaaagttagtatgcttcttgtaaggacatatttgctgttcatgtcttggcgaagcatgtcttcatgtttctaggaatatttcctatgccatattttagtaagttatatcgaggttgctggtgctcatgtagtttaataagttgagttatttcaaaagtctttggcccttgcttttgttcagcatcgtggcatcttgttaaactcaaacataccttttctctttgtgttttgtattttttaaactaattaacacttgacagactcttccttttagagaagtaagacgatttttgttataactcaactcatcttccatgctagcctttgttttgctcattttgttataagtccaataagatgatttgtgttcaaatctaagctaagtgaaatagctacttatcttcctttcattaaacataattaaacaaatgagctaatccctcctttttgtggggctacttaattactttgctccattaaactatattttatccccattaaaataatgctactgtcactgaaagcatatttaagatttagatgccatgcacatttttcattcgttactttttgtaactcatgagatacgagctttaccagtaatcttacattgattgcagttttcctctatcggcaccctttcgggtgatgtgatatccacttacacgggccagttcaaacgaatagaggagaacccaagttggatggccagatcatacagcttatttgtaaggatttccttttatggttgcattcagcagtcttattgaaatttggactatttactaacacaatctcgttcgttcattatctccttttcaggtcaaagatccaattgagagacctgataatgccgctagagcggttgatttgaaaggccttgagcggattgctggggccttcaccgctgctaatcgtaagtttgcatctctccaacacgccaaacgaaatgacttactggagatgctgtgtacgcctgctgttggctcaaagcttggcataagagttagccaagaagttatggctaactcttgcacaaatactccacggaggaaccgtcatcatggtagaccaacggaacaagtctcagcgaggccatctgataatcaaaatcaccgcggggccagagaatttacagttgggagacaagttcataatcccccacgggcgcgccaatcaactggagcgtaccatgctcttaacagtcagcatgtaattcctgcattgagccaaccagcaggaatttatcaaacagttggcccataccagagtaatggtcatccacaggtgtatactagagatgtccaaacagtagggcaccaaaattataggcatccaatgggacacaacacacagctccaaacagtggaaccatatcagagtaataatagtcaaccacaggttcatgctaccagcatccaagcaccaagacaataccagaattatactcgataacgcccggccagaaactacaatcaccaagtgttacatgctacagcgaccgagacaacggccagaaactacaatcaccaattgttacatgctgcagcaaccgagacaacggccagaaactataatcaccaatcgttacatgctacagcaaccgagacagaaggatcataccggaatcagcagcagagacaacacacatctggccgtcaaacaaataggaacgctgtgaacacaaggtacgtgcctgttgttggaaggccacaaaatgtagcatgtgaatcacgagctcaagactcctcaggcaggggaacatggcaacaaagggagccgcgagcaggatcaacctaccaaaatagatagcaacggattatcttcagcttttgcatcgcagtgtgtatgagtttttggtagtttgtgatagctttcgtcagccagcagtttgatctcagtgccgctgcaatgcagcgaactgtattgggtaaaatgcagttacaagattttcttttgtgcagatgttgtcatgttgctacacgcgtggctacgattgattgcgctgtagctgagaactgtttaaaaaaatgaagaaaaaacagtttatttttatatgtatgataaactaataaacgaggtaatctgcagtatcagccgtttaaaagattaaggcttttgtagtagttgggaactcatccttatttacgaaaaagaagcaacaaattaatatataattaattaagtattagctatttttttaaaaaaagttaatatgatttttaaagtaactttcctatatttttttttcaaaaaatgtactgtagcgtgcgaacccagcctaaggccgagaaaagaaaccaaaaacttacatttaaagtaacttttaatacttacgttttggttgtggctgataacccaacaagcagacaattttactgaatatttttgcatctggctattttaattgtctagttgtgaaggaataggtaaatatagggtagaaactaagtcaaaactcatgtcacccaatcccccgaaaaaaaacataaaatcatatataagttccatataaattcatataaaaaatctcacgcgtagatgatatgatggtgggcaacgtttaggttcgactttctttgtgagatgtgatttttcataacttataaacaaagttcaatttggacaatatatctcggtgtccaccatcatctcatatatggccttgtttggcataggtttggatccaagattttatgaaattgggtatccctagcttcacaaatttatagaattggatctaagattttatgaaattgggtatcctagctgcatcaaacactctcatctatgttggggttttcacgtatataggagaggcttggatgccaaatagagtgcatatcagttcttgctaccataccctcttttttttttctcacaaaatctatatgttgcatttggaacactgccgtttcaaaaaaaaaaatcaaaactcataagggaaaaaaaaaccacgtttcaaacggcttcctctgtggtttccccagaaactggataagcgttcccctcgggccggctccgacgtgctacggactgggccttcgcgcgccgtcccgtccccgctcccgaagcgaaaccaacgcaacgcacgactccctcccactctaccctcgtctcgtgcgcgtggacgactccctttgcctagcttgactcgtgcgccgcctactttcgccaatcgccatggtgcaagccgcctcaacctcctcgcgctttctccgcacaacccgtctccacggctcctccacctccaccacgccagcggagcccgcagcctccgcgtagccggcggcggctcctcctcctctcatcgcgctatctctctctctcggtaaacccctggcctcggttagtatctgaagtggatttctcgcttggtctactggcggggttcgctcgatactcctcctcgagttagggtttggcgaatacgaccaaccccgcggatcgcggttggatggcgactagagcggccgcgctgctctgagaatgcaatgtacctttcaagggttcggtattttagttccttgcttgataattgctactactgcgacaatctcgcggttcgtttgcgaagaaatataaagagggtgccttgctgtggctgtgcacttctctctccttctttgttttcacccgaaagttgtgattttggtgtggggttttgatgtagagaaattgatgagtaccacgggtattgccagccaaatattaattgcggaatgtggggaatggggaaagggtgttgccttcgacgtggattcgcctgctgcgacacataagcatgcatatattcgtagagtggagcggaattctgctagcattctgtagttacccagttacgttaactactgtagtgctaatgttagagttaaatgatttatatgatgaagtgatgaagtatacttttggcctgccgacttcgtctggggtttaatttacacaaaacttcaataccttgtaaactacacacccaaatatcatgcatgcaaatcacatcctaggggtggtattgcgggtgttttggttgatgtggcatgcaggtgaacgtgggggcatgatgatttagggaaagaaaattatgtgggcctttttctctttcctagatggggtgtggtatgggtgggagtactgccatgtgttaaagaaattgatgatgtggtagccacatgacccaatggccaacacctctagtaacctctttgggtgtattctgcgctggaaactggtggagggatgaaaatatattaaattgcagggtgtacattaaactagagcaaagttaagaaacaattgtagggtgtacgtaggtcgttgcactgttggtttggacttatggagcaaatattttacaatttacattagaaaaccaggacaaccattattcttgtaactgtaatgggtttgaatgcggttatatctggttatggtgcttagcgacgccactgtgtacccatataatctcttttgatcatacgtctatatcatttgttgcccaggatttcaggatgtcgatttggcgtgtccctaattatgatgtgttggagaagtgtacagaagatatcctctctctaatcaaaccagtggagggtgaccgaaacaaacgaatatatgcaattcaggagctggcagatacaatctattcagctggggccttgagaggtaactcacacctaaagttaccacataacccctgtattatttgaaaatcttccgttgggttccttgtatttattgacggtatggtgttgtgatgtttctacatcaagcttggttagacttatctatgatcttgaagagaaaatgtgttttccactttattgctgtgaatgctagcttgggcatggatttctgatagatctctgaaagaaaagacccagtcttataggtgtaaggtgcctctgcggtgcctatcgtatttcttgttatattcataaggaaccttaagttttaaagttatcatcacactttgtctgggcaatagtttgaaaatacaatgagtgacatatttatgcaatccatagtacttaaaagtgatgtgtttgttttgtgatcgatgctagaaaatggtcttcatgctgcgattgctgtatggcaatgggaactctacggcagacccatgaggttgctagcaggcaactgttgacctatgacagttcacagtacacagtaaccgttaaccaacaatttgtcatatcatgcctgacaaatgacaatcacgataagcttgtgttgctagaattaagggtgggcataattacctgaaaccaaagaaccaatccaaactaactgagaccaaatacttatgtcagagtttctaactaaccgaatttaatttggttataggccttggttaaccgaattgaccgaaatatagttaataagcgcaaaatcaacctgttaagcctattaagtatcatgtttgaacagttgaattttgatgttaagttgcaagtgctatctttgtgttctatatcatttgttgtttattttgtgactttttactgtcaaacatgtcctgaaactggggaattgctgccaaattttttactaccgaaacatgtcctgaaattgatcaatcagttcggtcatgacctaggaccgaaccaaaatgaccaaaaccaaatagcttggcctttatgattttgcattgaatttcggtcttgattttcggatggccaaaattcgagaaaaccaaagaatcaatccgaattaattgttcaaaccgaatggttacccatagccagaatggagctgctcaaatgtcacataatgtttttactggattttttttttggttacattctcttgttatacaatggatagtgtcttcctcaatgcatatattatttatgaagtttgcatgttggaaaagggtaactgttagagaagtcagcagtgcaattattttagtgtttctttttctgagttcttaactttcctttataggtgcttctgtaaaaccttttggatccttcgtatcacaactttatgcaaaatcaggtgatttggatgtgtcagttgagctgttcaatgccttgaatctccctataagtaagagaaagaagcaagataccctgagagaagtaaggagagctttgcaaaagcgaggtaaactttcttttcgattaatgaaaacagctttaaccgaaatgatagaagttttggttgtgtgttctttgtgatcaaacaaatagtcactatatgcatatacatgcaccaaggaaagcaataagtgggctttgcgcgtctttgatgcagcggccaggttatccattatctaaaaaaaaaaaggaaagcaatatatcttgtgagaggtgaagtcactgtaatgaataagttttgatcaagctattcacgatcttctttttgttccgtacttcattcaatgcaaccctttttgttgaatttacaggatattcttatctgttttcattccttatttaggtattgctagacatatggagttcattcctaatgcaagagttccagtccttcagtatgtgagcaaccaatatggtatttcctgtgatatatccattagcaattaccctggtcgaattaaatcgaaaatcttctactggatcaatactttggatgatcgctttggtgatatggttttattggtaagctctgtgtaaccaagagaattctctttttgctacaatcttcctttttgttaagccatgttttttggcaggtcaaggaatgggccaaagctcaaaacattaatgatccaaaaaatggaaccctgaattcctattcactttgtctacttgttctctttcattttcaggtgttatttcttactttacaagttacctctatttcttatttattgttccattaaagttatctatatgcgttctttattctgagccttccagacatgtgaacctgcaatattaccaccgctgaaggagatttatgaagggaacatcatggaggacatttcagataagatttcattatgggaatatggcttacctgtgatggatagtgactatctatttgtcagtgccttgctgtttaactgctgcattcacatacagggagggcgtactataatgagaaacatcttgatgaggtttgctccataaatatagaaagattccggcgccaaaatatggggcaaagaaatcagagctctctttctcatctacttgcatcattctttcacaaggtaattgaacttatggccactatattggctagtcaaccttgtctaagagagtatgacttccttctaagtactgtagttctgttgttcaaatacaggtgtatgttttattcttgtctttaggcatgtatctccacattttgttcttaactatgttaatgaatcaacactggcatttttaggccatatatggtctctcttgagcttgttcaaacatatttggtctgcttaatctaactcactgggggtgtaaatccaatgacgacgactcatatgtaacctttttagtaactagtagctatcaaattgtcagtacatgagctaatctcatcagtgatttcatgttgcttaactcaagatagtcagtaaaatacatttaaaagttatctgcaattcagcatttgtagtatgtctacgcaatgaaatttggcctgaaacttccccaataccaaggttcaagggctagtgtcaaaattgtagcctttagttttcttgctttgtatctgggattattgcatctttctttagttttttaacctgaagagctagatgggcttaaccagcaatttatattgcctgcagtttttccgcatcgatgccctttcggataaggttatatcgacttacactggtcggttggagagaatccaggacaatccaagatggatggacaagtcatacagcttgtttgtaaggctttcctttttgatgcttttggtggttatgatgattgatgttgctaaaagttttagcccaagtgctgatattctatctacttgctatttattatgtaggttgaagatccatttgagaaacctgataatgctgctagagcagtcggttcctttgagttccaagatattgtcaatgccttcagcaacgcgagcaataagtttgtttctgatgcgcatgcgcttactgaccgaaatggattattgtcactgctttgcacacctgatgttggatcaaaacttggtggaagagccagtgccagccgttatacaaataccttagtgagtcctcatgacagatttttatgatatcttgactatgtggcacctaacccatacgatgatcatcatcaccagccagccagaggaggaagcaggtcaggtcagagtccacatgggtatactaccaaccgggaaactgcagtgcattaccagaacaataatcatccacaggcatataacacgcagcggcaaacaacagttcatcaccagaaccagaacaatcaacaggtgtatgctgcagggaggcaaacaggaggtcagtaccagaatacccagcgtagcaaggagaacacatcatatcgtcattcaaattggcgagcagcaactacattggcacgaggccagtttgtggatgattctacaatggagaatggcagtaacgctctcagaccggcctcaccatcagcatcagttgatcataactgatggtcctaggatagcaacagattatctttagctcttgcctgacaatatgtcaatatgcatcacatttcgattcccttaggtctcgacaaacaatatgtatgagctcatgaaatttagcgcaagttattgccagccagctcgtatggttgagcgagcctggggcttatgtgcattttgagatctagaagatgtattgctgaacatgcagctctatcacttctgatgttcaatatataactttaggccatcttccttctccatctatctcccatgagaaagattgcaatggaatgtgtatttctggagctctcttgatagaatgcatggtcatgtatgtaccagttgtgcttcgcgtctatgcatgcatgcctccatggccgcagacggaaacaagaaattgaatcaagcaggaacatcaacaatgcgctcaactttagctgcaaatttgaccatcacagaacatcggaacatgcatgtaacacgtcgacgaaaccgtgcgctctgaatgttgagcacaaacagatcagatagaaaccggaactatatgacttgcaacttatatatgacttatatgacttgcaacttacaaaccgttctttctcattgcactgaattatatgacttgcaacttacggaacttgcattttccactttccaaatttgcaatagagctgtgccaaatgttcgcagtgatcagagaaaacattagagacacaacaacgctgatcatggacgattgatctatctcattacacacctgctctgcaaggtatgcccacacgagtacagaacataagagcagatgttgggcattgcatgccgtgccgaactgccgatgcaaggtgacatgctatgtactcgtcgcccagtcgcccccacgcatatcgatcaatctatcatgcaacgcatgtgtaaaacttgtaaaacttggtttttagaaatttcactataattagtgcaaacccgagttgaaacttgtaaaacttgttagaaattagaaggggccgcgcgaacgcataccaccctactctctcacttgtggggagatggtaggttaacactccctcccatgtgtaatggaggccgttaaactaggccatgagctttcttgatcgctcatcgacctcgtccaggtaagaatttctcaacgttgtacccagcctttgttttataccttctctctggccccttcaactcaaaaggagtgatgtggtactaaactgaatcgttaggattcagttcggttcacctgttgggctctcagggggccgttccgtgtaaattcaacccaaataagtagctggctcctatcatagacaagtacaaaatgatcttacccatctggcatactgaattataatgtttacaagctcatcgtattcgttccttttactacaaggacgtttgagtctttgaggtctacaatttgacgtggatggtacatgatagctgaacataaaagaaacgatgcacatactagtacaagtcaaataaattgaatttagtaaagccctttggttaaaaaaaaacctgaattagtgtatcaataaaatcataagtatttctttgagtatggggaatgtctatctatttgtcgggtgatttctaaaaaaaattcacccagatttgttctacccttaaatttacatccaccggaccacaaaagaaaataaaaatgcatatttagttacacaatacttttatcaaaattacaatgcacttacatgccatatcaactgaatttacaaatgtaattttagttaaataggattgtaattttatatattaaaaaaataccaaataaatatttacttacacaacattgttatcaaaattacagtgcacttacatgtcatatcaactgaatttacaaatgtaattttagttatataggactgtaattttgtattttatttttattttagtttcaattgagagagaacgagagagaacagcgtgcatatcaattttttaggggtgtagctatatttatggcgccatatttttcatcaaaaagtagttggcatgtatttacattgtaagtccctaaattacatatgtaattttagtgtatttacaatgtaagtctcaaaattacatatgtaagtactaaaattacatatgtaaattcgaaaattacatactaattatatatgtaagtggggtgtaaatgaagtgtaactactgtgcaagtggctaaaaaaaatcaactgtagcatatggcgccatatttctagcaactccattttttagagcacaaaaaaagaaattagcgcctctaaccgtccgactaaatcctatgcggattcccagcgctatatgtgcacgaatcttggtacttatcgaactgcctaaaaaacgacaaatccgagagaaaaaatcacacgacaaatctatagcaaaattgttgctttaagtaatctagttttcctcctattgtaccaagttcgttcatcctatacatttctacaatcaaacaggggttatcagttggacaatacaagcgacataattcagaatacaaaatcaatttttctatcaaagtttaaaaaacgttttaaaattttaaatattggtaggggccgcgcgaacgcgtaccccctctgccacaaattatgacgtccactcccacttggggagatggtagacgagcgttcctcctaagtgcaatggaggccactaatctaggccatgagccttcttgatcgcccattaaccccgtccaggtaagtatgttcaaacgtagcacccaaccttcgtggttataccctaaaaaccaggtagggggatccg

SEQ ID NO: 5291 - DNA, 36256 bp, Oryza sativa
ttttcaggaagccggctgatacatgctttcagattgacatacctgaaagagaaatagaacataaagaatagcacaaaaaagattcatgccaaataaaacataacagcagtacaacagtccaatcaaacagtagctaaggccttgaatgatgtagtataatctacataaccagaaaaatgaatagccattatcacagattttgttgataatatgctttgcatttatgaggttttaatggtgaatggtttaacagatctaaccaatgatgatgcaaaaagaaaacattattgccatctagcccatcataaatcaatgatattaaaatattatatagacaaactgtagtgaatggtgatgtatttttatggtccaatagcacatgtgactgttaaaattttatccaatacgattgcagccagaaagacatagatttagaatggtacattgaggtttcatcaataaaaacaggacaaaatgaggtcgaaacataccagacatcatctggattatcatcaggatcacaaagtgcaggtttgaccccagggtcacggttcatgtagcatgagttatttaatggtttcctccacatagcaatatatccctctttcttcacaagctcccaacagagtcttgcagtgaagtcttccatctctacacataattttgttcacaagcaattctttcaaaacaaaccaaaaaaagcacttcattcaaagtaagcctgtcaaaccaatatattatgtaatcctgataaaaaccatgcaatacattcatatttctagacatgatacatcataacaaaaatctgcagctttagttggtttctagaaatgaaaagaatttgtagtttagctttgcatttactttacttcacgtggaagaatgcctcaggcttgccatggatttaatctggagatccatgcatattaaacattttgcattaatttttttcttcaaattactgtgtatacataaccatatgaatcactccagatatcgtaaaatttgacatatgtcattccagaccataataggaggttgattcaaacttcaaagcatatgaaacataatgctgatacacaacacaataaacaaggaaagaacggcaatgcatgaatgaggaataaaagagcagctgtcataaatctaaaaatgcaaacgacaagaacaaatatgaattcgtcatgtgggaaaataccaacagaataaatgaaagactagtgtgtttcccccacaatggaacaaaaattactaggggtacataggaaataatgcatacctttccatgcttcttgctgagcctcttcatgcttataaacaggctgtgctgcccaagcaaaataaccgccggctctgagcattctattaacctccagaagcaggattccatctttaaagtggcaaatcatggcaacaaaagttaagcaaattggaagtcagggtgctacaaaaaacagttatctttgtgttgatattttgttgaaaacaatcattggatgaaaaagcgtcttcacgtgctaaaaataacacactatctttgcaatgtttgagtgccttgagcatgtctatttttctaataaaggaacttccagtcattatttgaataaaatatttttcttatgccgtaggaatgaattcagactagctccttaaatactccttaaatatgttgcctttgctcaaacgcataactaagaaaaaaaaaggtagaactttacatcaaagtgagtgctcaccatcgtgggtccaatttattcggcagcgtgaacaatggattaagtcaaatgcttgactgggatatagtaatcggtgtgtcgcaaatgctgctgccattgcaggcacaccacgctcaagagcaaactgtatctgattctcatgaacgtctttgggagctatggataatgtcaacacatcacgtgaaagtaagtatgcaccaaaacttgctactccacagccaacatccagggcaactctagtgtgagagccaaatgcaatatctggtaccatctggatgaacagagagacaggtggtgctactgagagtcagcaacatgataaaattttcatcagataaaagtacaatcagcatacttgagaaatctgatccaggtattgatttgctccatggataaattgagttcctcctccaggaaatctaaatttatccttagctttactaatccaattctgccctcctttgtcatcaaccaaccgcgtgtgaggtacattgctaaaccatacctgcaattcatcaaagtgtgttatagaaactcctttacctgaacccagaggtctttgaaaaattaaaccaaatcagttggttatactccctccatttcataatataaggcacaactacttttttcagatatttcataatatgaggtgtgcatgcatgcatgcaattaaatagcacctcctctctattcaattattatatttaaatcctccacactcaagatctctaattctattgggtgcatgcattgcatttgttacggtgatccaaactaggaggtgatcgtaattgtttcttggtctttgggttaagggtggttatgccttatattttggaattttggaatggagggagtatttaattttgcattaaataaaatgctgtacttcaaatgctgcttcatcatgctctagttaatttgaattcatacttcatactgatggcagaatcagaagacatctcctctacttagcaaacagaaaacccagtatgagcttgctacaatgctagtaataacccacaaaatcaaacactaccccatgttccacgttcggaaaatccaaaggcaatccatcaatttttgaataccttgcatgttatactcgatgcctagtactatagggcatagagttatacactgaagaattgtatgcatcacactatcaaaacttttgtttacagcacactgtcaaaatgtgaaagagagaacaccaatgcgcacctcatctctgctccgaggccaaggaatgggtgccttataccccttgggtgccggcacgaggcagctcagacccttgtccttggcagggcagtgccgctcgaaccgctcgccacgctccgtcgagggcagcctcctgatctcttcctcgttgtcgaggcagggtatgtactccctcatgctctcaggacaaaccgggaacctcccaatccgaaccctgctcccgacggcggggcccgcgtcggtcggctcctgcggcagggcctcgtcggtggcggccagatcggtgtcgttggcgccgccgacgacgacgtcgaagtcgtcgcgcatcgcgccgtcctcgccgacgatgccgaggcgggcgggagggggaggggggcggaggggaggaggaggcggcggcagcgaaggtgggggcgaggcattggcagtaggagaagcaggcggcgtggaggcggcaggggtggggatcagggaggggtcgaaggagaggttggcgttgggggagacggcgacggaaggggagccggtggagaggagcggcgaggaggaggaggaggcggtggaggagaagaagagcaggcgcggggaggagtcggaccagtggtagccgacgaggaaggcggcggcgcaggcgaaggcgagggccgcagcgcggaggacgcgcgggccgcagagcaggtcggcgccgtgcgcgcccaggggcttcatgctcgcctcgcctcgcctcgcgtcgcgtcgcgtcgcggtgcggagagcggtcggcgcggcggtgccttgccgatgcgggagggatgggatcgtgcactgccggggactgaactgaactgaggggcactgctctgttatttttcacttgaaaaatctatccccttcttggagtactactgtataataataattcttccaagtgggtcctctttgtcagtggacgcccgggacaccggcgaattgaagtcggctttgccgtcgcttctaccgacctcgccgccgtcgatcgtcgcctcgtcggtgaaggatgggaaaatgggtatttttggatctgggctatgaaattctcgttttctgcgagagagagtattgctcctgaaatgggtgagcaggcctagaaatgttgggctgggcaatgagcaagaatttggaaaaagtaaactgaaggtccctaacgcatccctcaacttacaaaaccagtgcaaactagatccctcggtagttttgactctgtgtgttgtccgacgtgcgctgactcggtgtgggacccacatcggtctcttcttcccctcctctccaactcgcttcctctcctctcctcatactctctcttctctgtatctatccactctgtcccatgggagcagccgagcagaggggagcggagtaggtggagcagcgacgcacgaagccggcgggcggagtggggcgacggtggtgcgtgaagccaacgaggcggcgacgggcgaagaaggcaggtgaaatagggtgacggcaggcggggtggggcggagcgggatggcggcaagcggagcagccaggcgaagtgggacaacggcacacaaagctgacagggtgacggtgggcgaagcaggcaggcgaagtggagcaatctgtcgccggtgccgatctccacagcttcggcgcccccccccccccccaactccctctgtcgtcatcatcgtgcctcctccaccgagctccactctcgctgcggctgccgttcccgctttcccacctgcttcctgccgccgccagacgacaacgacgggttcgacgaggaagaggatgtgcaccacttcttcctctttcatgtctcctccatcttcatgccactgtcctctcgccacatctgtcgctaccgtatcatgcgggcccctcctcttctcctcactcccgccgcacgccaagctcctcaccctcccctccccccttccaaccgccacacccctcccggcgcggcctctgccacttcgtcgacctcgactccttctcgggagcgttgctcgtcgcgtcgtccccgcccttcttggcgccctccaacctgcttgctgtcctctgcaccccgtctccgccgtcctccgcaccgccctctgacctcgacggcgtcctcaccaagggcagcggctcgccgcgctatcccctcgccatgggcagaggaaatgggacccactacccgcgcccagctgctcccccactacttgtgcccgccggcccccactcacacgcagctgctcccttccctccctccccccaaccgcccgtggagagaagaggagagaggaagagaggtggagaggagaggggaagaagaggctaacatgcggggcccacgctgggtgagctgccacatcggacaaaacctgagtcaaaaccacagagggatctagtttgcactggtttcgtaagttaggggacacgttgtatctggttttacggtttaaggatgattttgtaacttgatggcaagttgtgagaccttgggtgtactttttcccaagaattttgtgttcctttgatcatactggacctgagtaaagctaagcctgcatggacgtttttatgtttgggctgtccttgaggttgggtttggcccgttaaaagagcggtataatgggcttccagctatgcagtgaccacaatgcgagttctgaattctggattgctccgtgaactgaagtactgctgaactgtgacttgtccttgtgagttgtgagagatgcctcccaccgattccgattatgtacattgctaacttaacaatcccttggtttgaagcgaagaatatggacaacaccgctgatttgccaattgtcatatactatattttgctggtggcaaacaacagttttacgtgttccctttgttacaacgcatcttactgaaaagagtgaacgcagtcttattttatggcggtcctaatatcttccattttcttgccaaacatgcttctaaaggaaggcctttttcctatgttattgcagtattgctacctgaaggatggacacgtttccacggtacatgaagcaccaccccatgtagcattctaaagggaaaagttgcgatttctacgagcagtctatcggaaattaaacaatctcatgtagcaagagtgcatgacgcatgtggatggttacaagaaatcaataatgcgtcgtcgcatcccgggtctcgctatcgcgcgatgaatgagaaaatcacaggtggttggttggttggtcgagaagcacgatactaacaaacacagcaactcgaccacggtgcgccgtacgctcaccacaggagaggcatcacacgaacgatttcattcagacaccgtgcgtgcacaacggctcatgatggttaggctcccatatggcgggtgcgggaggcgagtcaagtcaagtgctcgagcgaaagcaaacgcgaacggaggaggcagtacactggcagtggcagcagaagaacatcgtacgccggtcgctttcccctcctcccccacccgtcgccgtcgcaggagaggacaagtgtgaccaactggtgacacccacaggcacgtttacctgttaccgcaagagagacgttttttcctcgcacggcacgcgtgcgcgtgacgtttttctcccacaactgctcgactcgatcaagatgacggggctgcttgctgctacagtgttgttgacgcggccccctttttttcgctgctgattgatgcttgcgcggggcgggaaactgaggcttcgtgaagcttcgagacgttggccacaaagcgtcgcatcgcacgcaacctggcccccgccacgaagtgggccgatggcgtcttggcgcatcggctggctggcggccgccgctcgtgagtctcgtggcccctcgagcggtcaagccacggagggagataagaaactcatgatgcgtagacgaggttcgtcaccggagcgttcagggccgaataataaacgagcgcgcaccaaagccggtgcacggctgcacgctggtcacacgttctcaccgcgagcctgtgtgtttaccattcgatcgggtcatgtgtggagccaaaaaatggtttcgatatttagaatattattttaaggattagttttacataagcagctatcttttacattctaaccctttcgaaaaacatatttcagaaatggacgcaaaactctacactagatattgttgacgccgaagttaaaccgcccacgagacaacccaccctagtctgattggcatgggtgaaaaatgttgtgcgcataacgaactacagtatcgtgtggatttctattaaaaatatcatgaaatttatgtattccagacatataaatcgcacattagtgcatatgcctttcagataaaacatggtgttatcaatcggtgaatctactgcacgccacaattacgctactaaaagtactcttttatgtattcattttttttttttgcaactggatatagttgaactatttaagttttttttatgacaaaacctactttctccgtttcatattataagactttatagtatttttcacattcatatatatatgttaataaacctagacatatatgtgtgtttagattcattaatatctatataaatatggacaatgctaaaaagtcttataacctgaaacagaggtagtactaactagatctaaattttaggcttagcacgaatgctcatgtatacatcagtagagagacaggtatggtaacttcttcagccttaagatatcccaaccgtcttcctcgtacgggtaaggtaaggtgtacgtacgtgcgtctatagggatgagaggtaactctgttaatttcaatcattttttaaatatgttggtccaatttttagagatgctcatatgcgtagaacgtgtgtgcatgtttatagagatgagtgtgtacatgtgtgtccgtatataggcctggtttagttctcaattttttcttcaaactttcaacttttctaccacatcaaaactttcatacacacacaaatttccaaattttccatcatatcatttcaatttcaatcaaacttccaattttagcgtgtactaaacacgccctctcccttatgccttttgtttttttttcgtacggtgtttaaaatcacgatggtccaatggtccaggatgttcgagctaccaacatattacatataagcatttactccattcaataaccagctttagatgatattgcattcttaaaaactgcgaaataaaactccctactaaaactatccttataattattttcaacatttattctatcatatactcaaccaatcacaataattttgtatttgatttatgtatataacttttaacctcaaattaatcactattatttattatttataattttttacctcaaacaatcacaactactcgtatgtttttcttattttattttttttgaaaattgataaaagtagctagtataatatactcccaccgtttcacagtgtaagtcattctagcatttcccacattcatattgatggaagtagacatacagttgtactccatcatataggaaaacaaattgccattccatcgggaaaaggcggtttagagcatgtacaatagtcggctataagccagctataaacatatttaaaagagacaaaggaagagagagaagagcagcgggctgcagtacggactccaaatcgtacaatgtgtatgacaggtaggaccatgtattaatagtgtagtaagcaactattgtatgaattggctataaatgatatggagctagttgttggctatactattaaacttgctcttagagcaggtacaatagcaggctataagctagctataaacatattttaaagagataaaggaagagacagaaaagtagcgggctacagatctgtagctggctgtagcacggactccaagacgtaatgtgtgtatgacacaggtgggaccagatattaatattatagtaagcaactattatatgaattggctattacattggctatatatgatttgaagatagtagtggcctgtactattaaacttgagcaattctacggttcttaagaaggtaccatgaggtatcatttttttctattgtaaatttagtacctcttggtacctagatactatgagataccaaaaatttagtataaaatctgatatctcatattacctcctcaaaaactgtagaattgctcattaaacttactcttaggaaggctaccagcaaatttaattggtggatgcggcgccggggagtcaaattgcagccggccacgttttccctggccgcgtctcctggctccgacccgcacgacgtggcctctcccacgggccgacacgtagcccctccaagccctgggcctcaaacctttccagaagcttccggccgtttcctggccaggaattcgccgtcccgatccagcggcccgccgagcgccacgtgtctggggcccagccacgtcggcatccgacgtggcgcccccggccccggagaaactgatacgcccaaatctcgcagctcacagcctcacgctcggaaagcaagtggccgccgcttccccaccccaaccaaaccaacgccttctcctcctcctcccccccgtggccgccgcgaggcgagagcgatcgagacggaggcggcgacgacggcgacggagaaggtagcggaggaatcggcggcggatacggggaggacgggtgctcccgaggagatgaacggccgcggcggcggcggaggcggaggcgtgggggtggtgggagcgggaggcgaggagcagatggagatggaggaggacggcgccgggcttcgcgcgcgggtttctgcggggaggaaggagcgggtggtgcttatgtgggggtacctccccggcgtctcgccgcagcgctccccgctgctcgggcccgtacccgtgaggctaccggccgcggcgggcggcgatgggtggagggacgtatgcggaggcggctgcggcttcgccatggccatctcaggtgacgtcccgtgactctccttctcattgctgttccgctcgtgctccgttgctctcgattcgttgggtttttcggggtgggctgtggtagatctactggagttgtcgactcttacaattaccgtggtggattgatgatagtaataggtagtgaatttggcgaaaatttgcgaacagatagtataggacgggtttacggggcattaatactcgtgacgatttttttttacagcttgcatttattgggcacatttgaattagttgattgtgatgtacttacatttcaagtggaggtccagttttgcacgacttggtgcggcaagtttgagctcggacttgtcctcttgttccgattgtgctttagttacaaccatttcatagctgtgggtgaatgtgtgaaatggggatttgtttgtcgagagctatatagtgaaagaagatgaatacacagctgaaatttgttaaattaagtgtatttctgaattttctgagaccttattcgtgtgatacccagaaacaacgataaaaaatcgtgtgatcgaggagaggtgaaagaagaacgtcatatcatgttcttagttgcctctaacatgatcacacgagtgaccttttaattcattttgttcggttgaccgtgatggggaatttgcattcttgttggccggccccacgaattaatttgatgtaccaaatcagagtgttcgaattaaaactattagttcaggagattgtatgtgttcagactcaacaatatgccaatagaaacgagctttctctgaaaatttctgtaatcggttgctcaccatgttcaagataaatttgatactaaactggggtttttatttggatcagagtctggtaaactcctcacttggggttctgctgatgatatgggccaaagctatgtgactgccgggaagcatgaggtaaaaatgctacccgtatctgtattgatgctttatgctctcatcactcggagatatttctaaggacaattttgtacttctcaggaaactccagaagcttttccacttcctagtgacgtggcaatagtgagagctgatgctggatgggctcattgtgttgcaataactggtatactactagttgaacacacatagcgtactttaggacagcaagagctcataatttttgtgttactagtaatttcgtaaatgtcatactggaccagatgaaggggatgtctatacatggggttggaaagaatgtgttccaacaggaagggtcatttctgaccaatcttctggtggaactttggaaaaagatgaaagacagagtgcgattgccgctgaccaaggtggtgatgattactgcctaccttgtttcatttgtgcctaaaaagtataagcttctctacatcaattgttttcagatataacaaaggcaactccattacagtgagccccaggtcgcaggtgtctaggacaagtagcggagcagcatctggtccttctgaaagtagaggtactgatgatagcacgaagagacgaaggttgtcttcaaccaaacatgcacccgaaagttcaacgtccagtgatgaaaacctttcagcacccccttgtgtagtgacatttaatacaggagttaaaataatggcagtagctgctggtggtcgtcatacattagcactatcaggtagcctacattttgcactaacactatggcactacatttgctgggctagggaactttgctgattaaaactaaatgttttctcgaaagcttcagatttaggccaagtatggggttggggctatggaggagaagggcaactaggcctgggttctagaatccggactgtttcctctccacatcctatcccgtgcattgaatcagcattgtacagcaaagatcggccagcagctatgaaaggaaacaaaagtgctgaagtgcagattagcaaagtcatgggaaattgcgtgaaggccattgcatgtgggggtcgccacagtgctgtagtaacaggtaagccctttctttcaagctcactctgggaaccttttatcctacttatttaaagttgatgtcgatcatatatgatcttaaggtggtatgtgtgaatacctcagttgggtcggtttttttcttgtggatgacaatacatactttcaaattggtagttcagtttgctttggtacagtataaagtaatgttttgtgatgtagtattacgaatttacaagaatggacaacatgctttttttcatgtttgttttcacatagaaaatagttggtgattagaggcaacaaggtgcattgcttgattggaccatatattgtagttaacttttaagtaactacgatattatgtatatgagattttctgtgtaaaatcaccaaagaacatgttccaaagaagttactttaaatccaaggatgtgcacaaaagtctaataatcaaaactgcagatctagacgagttacatctaggaggaatttcaattcaaaccaaaatattagcaactgttcagctctgttcatatcttctagtgaattccaacctgcttttacaacacatggaaccctaaattctagtaaaaattttggccctgcacttttaacagctagttcttttgcagattcaggagcactacttacatttggatggggactgtacggacaggttagtgcttctaccatagcatatcagttggaccaagcttgtgtgagatttcaaagcatcatttgcatgactaaacacatccaagtagctaggaaaagaaatatgtattcaagggatggagaagtgtatgatttgttttgggtaatccatctatgtattcaacaagattaggcattgaagagttgtttgtacttgctttccgactgaacaagtacacagcaaacttatgctacaatttaatttggtttacatgtgatatgtagtttcattgaaagtctctctctctctctctctctctctctctctgttttcaactttgacatcttccataacaatggtgatgacagttcttgctcactcacttgacactattttggcatggtatatattagatttttcccccattttgaaacctatgagtaggagcaacaaaagttctgttgcactagtgctcttaattattgtataatttattcttcagtgtggacaaggaaacacagatgatgttttaagtccaacgtgtgtatcgtctatcctgggagtcaagatgcaagacattggtgcagggctgtggcacactgtatgcacatctgtagatggcgatgtctattccttcggaggaaaccagtttgggcagctgggcactggttctgatcaagctgaggtacaaattctattgagtaaagtgcattggtggtccttaaacttgtagggttggtcatataggtccctaaactctcgaaatgcatatctagatcccagaacttgtcaaagtgtcccaaatcgacacatcccctctaagatctacgtggcgctgatgtggcatgccatatggacgtgacgtatccttttctttttttctttttttctttttcttttttgttttcttctcattcttcttttttttccctttcttctactcgggtcacagagaaaggagaagaaagggaaaaaagagaagaaaaaataaaaaggaaaaattttaaatgggtctcatttgtaaatcaaaatgatgccatgtcatgtccgtgtggcatgtcacatcaacgccacgtaggatactgaagagtttgtggcgatttgggacttagataacacactatgacaagttttgggacttagatatgcattttgagagtttaggaacctagatgacatacccctacaagtttaaggaccgcccgtacactttactcaattctattcttttcgatgttaatggaggttaattacataaagtaagtttagggaaaataactacagttaacataatgattgcctcccaaaatggagttagctgtatgtgaggtgcatgtttactcagtaagtgataaccataagtatattgcttttttttttatgcagactgtaccaaaactggtagatgcctcaagcttggagaataagaatgcacgagctgtttcttgtggagctcgtcatagtgcaataataactggtacctttgactgtactagtatttttcccctagaaggaatttgctatcctatctgtctaatataactgcatattaataaaatgctcttctcatgctcatttaaatcaaggaaatatttctggcaagggtttgttgaataaacccaattatccaaacaagacctttagggtttgttgaagaggtagagattatactcgatcccttagaaagccatgagtattttagtttaatctgtctgccaaccgaacgtactgagcctaatccccatataagcaagccctattgaatcttcctagatattctgatgtgtaatcatattatgagtcactgtagttattagcgtattatcagtaacttgtgcttggaaagttggaattctacaataagctgttccatgtgtgattgaagtacttaaattcttgttaatctttggcctccctgacaatttgtttaaacatgcccgtagaaagtgctgttcctggtctaacatctactgacaaaatgtggtgacatttatgcagatgaaggcgaggtcttctgctggggatggaacaagtacggacaggtgcgtatttcagctctgcacttggagaagaaaaacattcaccgttgcagttctttttataacttttgagttgcgcgtgcagctcggtctcggcgattccatggacagaaacgtgccttgcagtgttcctgtcgacgcataccacccactgaatgtgtcgtgcggttggtggcacaccttggtgctcgcggagtcccctacttaaaacctgacggcgaacaaacttccctagttgacaattttgttaggagtttggtaggctttcatcaaggtgcggccgtgttgcatttcgtgtatatacatggcagtgcatgcagatatggtgtattcattctttccggtgcgctcttcaacgggcaacgtacacaagcttgtatcgcaccgcgtatacagttgggtaggaatggctgtaaggcctgtgcttgaaagtgcatgcggtgatgactgtgtccatgcttcgtcttgcattttccagttgctatatgcagacgaaattaaccggttgctatatgcagacgaaattaaccggaacgctgattacgctagaacagggacgatcatgtatggggctgatgagctatacatttctgctcccgcctctgaaatccttcagaatttgacggtcacttcgtgttaattttccctcaatccagactttatataaggcagctactactgacgcaaagacttttcatttgaatcacctcaataaatacaatatacaatgtacacatttaagattagagaccctcatttagatcatccttataaacaatgtacacaccagaattagagatcttcaggatgacggatttaaaaaaacgagcgcaatggtacagtttaagaccgcaaaggctgaattgtattgtgatcggagacatgcaagacgcccaatgacacgatataatgacatttttttctgatcttttagatcaacttatgagttgtagcaaatacacgataccataatatgggttctacatctatataggaacaacaagaacgaaaagggctgccccgttcgcaaaaaaacatttatgtacaacgagaggggtcagctacagcgatcaacgaatacttctaataaggttacacaagagctcctggatgaggctgtcgcgaacaatctgtcagtcagcaacttctttcctttaaagaacacaagcatcccacttttgcccgtagatgctcatacatttattgtgcttccatttgctagcaatcctcaagttagatactaattaataccaagctgtatgtgaaatgtcctagaacctgtactgaaaacttcagatgattagaacgaggatgtattgtggtatgaaagagtgaaagatgagagcaaccatattttgtttcaaagttccatttatatgggaggcgagtatgtaatagctgataatgattataatggaaaaatggcttcaccatggacgggcaaagcctgatagctcgagtgcccgtaaataatgcccagtttacataatcactgtcagctgactgaagggtataccagaaagttgactaaggtctatgcattgttaataaacatcccaaggcaattgtgcaaaactattattatgtttattactaaaagacatgcaaattccaactgtagtatcatcacaattctgatgaagcaatgttaaagtaagaaaaggaatgattctatctgctgaacagacttacatgtaatttcccttttcccttgcactgatgaggaggcatgatgcttagaaacggggcacttttgacagaggccccattgtgggcattggtgaaggctcagtaaccggaggtcttgtttgatggttggcaactgaattgttaattaccaatttatttcctgtgcttctaataccagcagcatcacattctggttgttgagggtccactgatacctttacctgttgcagtttattgttttaaataatccaatcaaacttttgtttgagcttattgctgaatagcacagcagcagtacatgcaatgcaagatgcccagatgatgagaataaaggcaatggcaaaaatataagtgctagttctatttcaaaataacaaacagacaacattgcattctaaacttttataaccaaacaaacaaaggaaacagggaaaattgctgaattaatgttccctttactaagtaaattctactagaaagcactagactatggtactttgatagcgattacccccatacattcaaagtcataaaacctaaaacccaaaaacaacaaaatggctacaatagccaggtcaattccctcagaagttgggtccagatgtccagttggcatattgcataacatgagtgcacatgaacgaagattaagaaaaacagtttcacaaaatataataagtaatagaatggcatttcttagtcttacaggatgtctttgcggattcttgtcctcccttaagaaaccaggaacagataagtgccaatttttttctgcatgaaaatatattcagatttaataagcaaataaagttgattctatcacatcagagaggagggttatcaacctaggtgcagcaatacatccttggcttccaggactgatgatttcctatgcttcgcaagggtacacgcaaatgcagtcacctagtaacaaataaaaaaggtcagttgatacaagttttgtccatcagataaaagaagcaaaatcagaagctcaaggtactcagattctgaatcacacggaatcacatttttcaaccaaatagaaattcactaagagcaagtgtgctgtaaaagcatgatttacaaacaacaaacacattaccgaatcaatgaagtcatcagcaatctccaaaagcaaatcttccacttctggatcaaccttgcccaggggatctacctgtaaataggagttcacaattcaaagacaaagcaaagtattattcaaccaaaagagtaaagtattattcgaccaaaagagcaaaatattattattcaaccaacaaagagaatatgcttctgaaaaatgggaatgcgattctaatatttcaagaaaaatctcaaagatcatgatacgatcacatcataccagtgatacagaagctcataagaatgaacccagaaggttatttgttacctgtgaaaccaaatcttgtatttttctcttcccaagaagttgattagttacttctgctccttgacttgcacttccaccagtcatagttccacctgataaaggagtgcccggttgtgatcctgtcaggttcatggacttctgggaaccagatgctgatatccttggagattgttgttgttgctgaagttgctgtagaatgtgttgctgctgtaaaagctgggtattgagatgaggatgctgttgttgggtttgtgcgatttggtgttgattcaatcctgactgctgttgaagttgatgtattaatagcatcctttgttgatgctgaaattgttgtggagaaacaggtgatcccagcgatgattgcatttgttttaaccatgctgcctgctgctgtttctgaggaagggacatttgtgccatcggcccatttgtcgacgatccaggtagctgtggatttaatgcagcaatcgatgctgttcttgtcaagccttgacccacaaccttctgataaataaaccaagatagaagttatccgcataaacatgagaggtgctagaaaaattgatgcacgcaactgtcacaagttaaaaatagaatatccatggtgcaaagttaataagcatagttctgattaatcctaaaagaaaaagggaaaaggacacacaaatgcttaactctcatgcagttttagtgggtaaaagcataattttagtaactgtgtgtaaagatacatcagaaagctgccaagagattaatattagcttctttgatcagtacctgttaatatatgttctttaaaaaggaccttggctatttgctgcggcatgcattcacatataataacaataaggccatgaaagatacatatggtaaggtaaggactaaggaggtgggtgcttgataaccaaagataattcttttgcttacggaagtcaagtacctgtggagacagtgtgccttgctgtgatgtctgctgcggcctcaattgtgcttgtgcatgggcaaaacgttgctgattatatggaatagttccatttcctctcataccacccatgactcccatggactgcataccttgtaatgcttgagctgcattggcagtattaaattgtgcaccttgcaccatacccttctgccttggctgcagcaacaagaaaaaccaattatgctagtaatacaatcagatggtgatagttactagttaccttcaactgaattattttccccaataataataatttcttaacataggcaaaactagtacgaatcactcctcttaatgtggtttccaataaaaaaaagcagagggtgtttcattaagcaattctaaatataatacagatattcgaacaattgtggttgcgcctgcaaagattccaacaacagaaggcttcttatcagagcttatatttgattctaaaagaaatcacaaatattttaccaatggaacatagtacgagaaatgtagatttctagtttttctttcttgtggtatgcaccatcacacccaaggagttatctccactacttaaataccatgatgctacaagaaaaaaaagtcaaaactgtttaagaaatttcaagattctggatccacgattcatttccttttgattcacaatcaactggtaaatgcaaagtttcagccggacctggcattctgatcaaattgatctaattttgtgtgcgtaccctcctaaaaatattcagcatagatatttgagtcaccaattcactaagccatgttacaaaactgttaccatatacgatacgctaccctgttaagctgatagaaaaactctaaccacaagtaaacaagtctacaattaaaagagtctgtgtttcccacttccgttaaaagtggaattcatgatgattagatgcaaaattcagctaactcaaagcgtgcctgagaccccaaatttacctgcgccatcatctgtgactggagaccatagtgcgccgcagatgctgcgttcccctgcccttgcagcatcccaatctggccttgactaagcatggccgcgcgagcagccagctgctgctgctgctgctgctgttgtcccacctgtcctccacctcccgagaagttcacctgactgccgtacatcctggccgcagcagcagcgtactgtggaagctggccgacagcggcgaggcgggagcccgagcccgagcggtggatctggccgaagcctccagccccggccgccgcctggccgggcgaaggagcctgcatctgcggcggccgcggggggtagtccatggccccgccgcccgccgcggacgggtcgagctgcggggacgagatggcggacaggtcggagacggtgggcgacggtgggatttggggggagaggagggggttagggttggggttttgcggggtggagacggcggcggcggcgagctgatcgggctgcggcgaggcggtggcggccgcggacggcggatccgccatggcgggctgggggcggcggggctccggcggcggtgggcggcggccggagacgacgcggggtggacgattgcgtcggggggtgcgggggcaggtacgggtcctgtggggtagtttgacgtgtgcgcgtagtcttttcgtggttgagtcaggaggggggtggttgctgtctttagggtcactgccaggttggccccacgggatcatttagcggataagaagaatccgctcagagtttgcttctcgttgccatcactatgcttgcttgtactctcctgggttgatctaggaacatgttcgaggcatttgaggtgtaacaatcatattcaggttccctgcaaaaaaaaaaaaaacaatcatattcaggtgcagtgaccgtcgaaaaaataagcccagacgcaggagaaaccaatgctgtctgggcgattggagactaaattaacaagagacggtaatcactcgccgttacacgtgcctgctggccgctgccaacgagcaaagcacggcacgctcgcatggccgtgtctcagcagcttacctcctggagaccggcagtctcgccttcgatttctctttgatcctttccgtgacccgaccggctccgagtcgacgcgctccgcccagctagcgcttgccgtctttcttgctctttgccgaggcagcgacgcccgctcgccgaaactctcgcggctcgcgctgacatcaacagcagcggggggcaacgcgcatgcgcgattgcgcgtggccgtgggagacaagccaaacaccgcccggctccgactcgacggggcaaccgtctcgctcgcgcgcgcgcgcgtcttggcgttcgcagtcgccgcgcgcttatcctatgggtcgcgaggagccgaaatatttcgcgttccagtggctgcgagtctgcaacctgcgactacgcctttctccattccactcccgctggccaaactcgtccgcacatacgccaacagagaacacccttctgcctacgaattacccgcgcccgcacgcgggatatctctctatgctttccgcggtcagttcttgctgctatacacctatattcctacgctgctgtcaagttcaaaagcacatgatcagtttcagactttcagttccagtggacgaatggcacctaggcacgcagacgcagagaagaaacgtccattcctgtgctgatcaacagggttaggctgcgggagtgtgtggggtatctacatagcgctgatcgatcaggttgattgctttatattttccagtggattagtgcaataatactacagtgaacgaagctgaaagtttcaacgggacaacggcgtaccggcattgtcaagatcaaggtttaaaaacgctgtcttatttctcctcccgtagcaggtacgctagattatagcatcatcaacttcaagagctgaaaaggtcatccacaggtttgcatcctgatatgattgccgtccaatcgggaacgcgccttgtaagactggctaacccctcattccctccaagtcttcatggattacactggattaattatccaaaaattaatccgttggctgaagagaaaaaccacggggctagctgccggtatatgatacatccacgtcagagtaaagccgatcaagattgccatttcaacctaatacagttaactagtagtatttgggattccgatcgatcttgtttcaacgtcattttgctgcgtctgttacagtagctcgtgtcactttctcggcaactttacctgctctttttatagcccccatcagttcaagcctcactcatcctaatccagcatcagtcccagctcgatctccctacaactcgcaaggaaaatcctctgaatctctcccatggaaggcatcatcccgttcatcttcaaggcggtagcgcagtacaaggagggagggcacgtatccctcagcgacatgatctccgacaggccgtcgccggcgtcgtacgtgctcctgccgggggactctgacggccgacacgccgatgacaagacccagccacttcgtcttcaggcttccaccggctccgaggaggaggtcaccacctgcaccgcccgggcgtcgcacctccggtgctccacgctgcgccggcgagcttaggatgccgtgaactgctacgccgatcaaactgcaggtgccagtcgttcagacaatttgaggtttgtggtgctgtgcttgtgcagtgcagacagtgagagatgtaaggagcctagtactttagctagtttgggcttttcagcctatagcatctataagcgacctttactttttttttttagctgtttatgctctgtaacgaggtgcaggtctccaaagggaagatttgtgcgtcgaagggcgaaacgctttgtatcttgagaaaaacgaatttgtaaaacaatactgtgcgtgtaactgtataaatttggtgataggttctgtatgcagagaggtacgcatatgcaagtgctatctcggtcactgtgattgatttgcctctgaagaaaaaattctcctgttacctgatgcaggactgccgtttgtttgggttgggctttgctgggcgtaattagacagtggaaaaagtacactaaaagtcctttgtcttgtcgttgaattacaaaatcgtcgctcaaccgaaaaaccaaactatgtaatatctctcaacttaaaaaaggaattactttagatccttagatggttttgaccccgattttatccaacgtagcagttgaatcaacatgggactcacatgggccccacatgtcagcgactatttcccctcctctctttctcttcatatttccctctctactctttctcctcgacacgaagcatttgactaagatggaggagatgacccctccgccgaggagtatcttcaggagcacgtcaactatgaagatttttagggttccgagcctagttccaaaaccgtgcctatgaaataagttagtcgcttaggcgcttagcctagcgcttagtcgttaagtcgccttccgccgttagctcccgctatgttgttttcgcgttatgttgctgtcttttgtgttccaaagttgtctatatgggatctgtccacgatggcaacctatgtaaggactaccctagtgatgtaataatattagactgttttggatcaccgatgttccgtgtgtatcagcttgtgtatcctgggactggtacatgttacacaagtacagtatcgtggcctccggacttgcgaggttcggggcactatagttgccagtgttgcagagacggtgcgcggcagctgttggcaagtgccactgccacctttccactgcccacccgccattgcagcctttccgctaatgagctggcatgggcggctgtggcgtcaccgatgcggcgggaaggagggccagcgcgacatgggaggaatgcggcggagaggagggccagcgcgacagacggcggccggcaaacgagagcagggcggtggcgtcaacgatgtagcaggaaggaggggctgatagagagaagttgggcattggcagcggtggtgtcactgacacggcagggaggagggccggcgagcaggcgcagctggtggctggcgggggaagagcgcggtggtggctcccagccgaccgactctcgagctcctgattcacgggctcagcgacgccgccgccgcagagctcatctacgccggcagccactcttccccaatgccgcgctgtcgccgcacagccttcgagcttcctccactctctctctctctctccactgtcaccgccgccagcattcttgggagccacccgccgccgaccgcactcgaatctccagtgccaccgcatcttgggccacctccgtcgccgtcgaggtcgcccatagccattggagtcgtgcgccctcctctggccttcctccctgtgcgcaggaaagagaggaagaagagagaaagagggatctaacatgcgggtcctaccttttattattttattatttccccagaaactgccacgtaagccccacgtcaatctcacgtgggatgaagaactagtaaaagaagctacgtaggtgtcacgtcaatcaaaactggggacaataccaccggaggacctcatttgcactgtttttgtaagttgatggatgagttgtaactgggtttttttttagggacgatttataattcggttacaagacgagggatctccggtgtactttttccttagacagccagtagcttttccaagattctgttttttcaggcccagttcatctggccacagagaggcccatcatcacgtaacgaaatgtaacccgactaggccttatggcccaaaaagtcgtaagaacggctaagccttatccaaaattccgaagcttatcacgaaacggacaataaggtatacaccctaatcccaaaaaccattgaactcaaaaggggaataaaatatcgactgggaggttttttctgacggttgtatcacaggatcacacagtattactagtgtattactgcagcgttttcagatcataaacagattctggcggcaccatacacgagaatacgagattaagtaatcacaagatcagcttggaagcaaggaagaaaaagaaaagagcaccgacacggcatttctctcgcatgcgcgtttgcgtatcagtgagtgcgcatttgggtcccgtcactcgcaaccaaagaaagattagtcgaagcaaggtgcagatatcttggataccggagagccggttgaccctagaaagaggagccaagatcatcagatctgccgggtttccggacgcatcaggattagcacatggaatatcctatgttatgcgtgattacaatgggcagcgcaatgcctcgccttggttggttgcctgcatctacagtctggacagatgacagtccgaagcggcttcattgtgacaaaaaagaagaagcaatctttggtttcttggatcagggaaagtggaaagcataaactggaacagaaggccaggcggaaataaactggacaagaagaaaaggcgtatgtaacgtactaacgtgcatgtttttttcctcattcaaagatttcccctcgacttctcattcaaacaaagcaaacatagcgttttctaaaatttatttattttaataatattctcccatgattagaaggggattaaaagaaaatctcttccgttgacagaaaccacatctctactgtagttatctgaattctgaaagcctgaacctctcgtcgtgtctcgtactctcgttcccctcccctcgcgtcgcctctccacttcgtctctataaagtcccacccaattctcgattcccaatccagcgcagcacaaagccctcctccttccaccgcagctgcgctacctacctccaagagggctggtccgctggtcgtggagaaggaagagagatcttccaggctgatccctcctattggtacggaagccctaaactcatcggagctttgccgcggccgcgagcgatcaaatcgaaatctttctttctttgttctttgatgctccaacctagtgtcggatttgattttgactgttgcaatggcagctttctccttcccgagcccgcttgaggatccccgccggagtagggattagggaggggagaacaggaggcggcgattcaccatgaaggcgctcattcttgttggaggcttcggcactcgccttcggcctttgacgctcagtttcccaaagcctcttgttgatttcgcgaacaagcccatgattctgcatcaggtaataagtggtttcgctagtactctgatggagtaataagagtacttatttgcagtgccaatggatgaattgggcacaagttaattatagtacagtattctttaccaacagtccaacaatggcactggcctctccatgaaaggagggagagggtgctaaactggtcagagaacattaatactatttgatttgtttattactcccacataaacatggtgtaacaactaaaaatccatggtaggttgcacttggatgtgattgaatgcacctttttactattcaattgtttctttccttagttatcaatttggttacatgattttggaaaactcttttggtatcacaccaaattttctctgtcctcgaaaattccaatcggttatcaagagtacttgatttatatccaaaatgttggctccagcaaacatgagcatgaggattgaggagagtaatgagctctgaattaaaagttttccgatttatgcagattgaggccttgaaagaagttggagtaacagaagttgttttagccatcaactaccgaccggaggtaaaaaggagataatcttttactgttgtctcatggtataagtataactaacttcacattctaattggtttgctctgatccgtcttttaggtaatgctcaatttcctgaaggactttgaggataagcttggcatcacaatcacgtgttcccaagagactgagcccttgggaactgctggccctcttgctctagcaagggacaagcttgtggatggatctggtgagccattctttgtcctcaacagtgacgtcataagtgaatacccttttgctgagctcataaaatttcacaagagccatggtggtgaggcaacgattatggtcaccaaggtagatcctttctttgaccactctcttgaattgtaaacttgtgtactgtgtatactgactattatttcaatataggtggacgaaccatcaaaatatggtgttgtggttatggaggaggtcactggaatggtggaaaaatttgttgagaaaccaaaaatatttgtaggcaacaagatcaatgcgggaatttacttgttgaatccatctgtcctggaccgcatcgagctgaagccaacttcaattgagaaagaggtctttcctcgaattgcatctgatgcaaagctctttgctctggtccttccaggtttttggatggatgttggccaaccaagggattacattacaggcttgcgcctttatctggattcacttaggaagagatcaaccaacaggttagccactggagcacacattgttgggaatgtgctagttcacgagagtgccaagattggcgaaggctgtctgattggtcctgatgttgctatcggtcctggatgcgtcgtggaggatggtgtgaggctttcccgttgcacggtgatgcgtggcgtgcacattaagaagcatgcttgcatatcaaacagcattattggatggcactcaactgttggacaatgggcacggatagaaaatatgactatcctgggagaggacgtacatgtaggtgatgaggtctataccaacggcggtgttgttctcccgcacaaagagatcaagtcaagcatcctgaagcctgagattgtcatgtgaactaaccctccttttatgttatggtatactcaagttcttttaatgcagtatctttagtttatacctgtgatccttccaagatgttgacctagcatgtgtgttactcacattctgaaaactgcttctcaatgagaattcagtgtgccatatttgattgtaccttcatttggaccatccagtaaagttctcaaccctgcaccaagaggaccagaagaaactctttttcctataaaagaagaggatcagccttgtactttgttctttttgaaacaaatatatactgctatatggaacagacccatgatgtattgcacaatttgtagcaaatgatgcaaagtggataataataaggatcaggcagatccatataaactataggccaattatttgtacaagctcatcgcaaaaactagaaaaagaaaaaataaaagtagaactactggtatgtaagtatgaaacggcaatttgctcatgctgctgtgctgagcttcgcagttgcggttgtgatttgtggtggtgatttcgatctgtactggcaattcaagccttgtcattttctgtataccgatgagtgatggtttatggatctgaagttcttcagtatctcaatcaataaaccaaatgagctagtggagcaactgaagccaacgagatgagaaaccatcctaggccatgcttcttgttcttccatcagcctcagtcttgcaagccattgtgaggacgagagtgttccatattattttctactccacaaaatagctccctgaaatgggtagccatatacatatggccaagagaaacgttggaagcgaatatgcatcggaccttttcttggttgggacaagacacaagtacctaccatgttgtcctctcaaaaagaaagaaaaaaaactatcatgtgttgcaataagggctgggatgactcaaaatcatgtggactggaggcttagtgaattaaaaaccacgtcactctcggatacagtccttgtcgttgggtcatttagatagaacatgtttcatctcaatgcgcctatctgatgacattacaagtttacccgtccttaattcagttaaccattgtttcggtagagaaaatttcgtttgtttggtgaaaattatgcagtaaaaagcttcatctgtatcgtttagtaattaatgtagaagtacaagtttaagaggttatagtgcctcattgcattaaattcagagaggggttggaaacaatcgacgataactttgcaccaatggaaacaaaaaaaaacaaacccaaaagaaaaatgacgatgagaaggaaacgtgcttgagcatatggaacataaattttctgcagatgttccattcaattagtttctcggaaacagagttcatggagcttgtatgacatttcagaacttctgttgtgttgtcgtcttcaaaaattagttcgtatacagagaagggatcaaacagaggggagctacagacagaggttgtacaaatttattcacaatgaagcgaggagccaaaacattacgagagcagatgtggcactaaacgcccaagaaagaaaagcacatgctatggctagttcaaatcttccacaagggagttggggattcctgcaagcgtatatgtccctatcgaagagaacaactacacctgctgctgagcatgatgccgcgaacgacaggattgctgttacctgcatcatgtacaactgttgctttagtacatcagaaaacacactttaaatgtttagatatggcacaaaatgttttatgttctttatgccccaaattcaaattgtgcggtaagatggattggaaactgtatagtaatgcgaacgattcgcaagtcatggaaatatttatgtgcttaagctaagattttcgcatgaaattgcccatttcctgtaggaatagcgaaacctcttgtgtttgaaactttattttccagtttgttaactaaccatcccaatttattgatgttccagtcctcacataattggcagtccaaattgcatacatttatttgatttagttggtaagtggagaactaggacaagtcaagagttggtctcgccccacctggatcctaattctacctacaatcagaatgtactaaatgaaaattatgacaaattcgatctcaacaacatccagctaatattaatatttgataccatgtagctcaagctttactagcctgcatcatgcgaacggaagtcgattaattctgttgcctgtctcttaacatgtgatgcaattacaaatcctaaaacagaatgatccaggaatgctaaatgtggttcaaaatactgcagaatatggttttgatgtgctaaagcaaatcatttctaagtggatatttttataatgagttctatctgagtataatacttatgctttgacaggcctggcagagaaattttcagaaatttaaatttttacttgatttgtttctaaatatttatccatttcaatggttgtgggaactactgaggtgaataatacatgagatgaaaaaaaatcattaataattacccagtcgccaacaacaaataagctcaggagaacagcactgtggagatctttcttgaatttcaaggcatagcaatcaaggcaagcaagtcccaagctccagagtgcctgtagtcccatcgatgcaatcaagtaactgaaattgagagttcaccaaaaactggttacttaacaggatactattcaatctgcaagttctgtcatagtgcagatcaaatggttttgctttgatggatgcatagacgaatgttcacatatgcaaacgactgccagattccttccacaaaatgaacacaccaatcttaacagcacagacaacactgagacttcctatgtcactcatcaaattaaatagagtaataaataggacaaacaaacaaagaacagattatcatgaatgattggcatgcctaccctacttaaacaatgaatgttggatatgagtaaagttgctcaatgttccagcaacataaaaattttaaatttcattatattgactacctttggtctctcctagtgcttcaaacatttagataacggaataacaacatccccggctgctgcacccgaagatgaacaaagccattctactgcttgaaacagatgcctcagtcactgaatagttttaactgattgtcaattttgaaggagtgtctattcaaatcttacagctatcagtggctacaaacttagaccaaaagcctaaggccaacttatattcaaagcaacagtgacaatatatttactttgatgatccaaattgcacaaacttgaattacgaaatgaatcgttctgtcaatgaaattgtgaataatataatgcacaaaggaaacctcattgccacaaaacttccatccccaattacagtagcagacggctccaggaagcaagcagtcggatatagaataaagccacaacaatgattatccagcaacaaagctgcatatcaatcagcaaattgcagggcggcgtgacatgccggccaaattttaataagctactctatcaatcagcaaattggccgactcaatcatgattgttcaagcgtgtatgatactatgatgcctatgatccgcactaaatcactctgcccaagcacgcgaaacgccgtcaccagagcatccccaatcgatttgcaaacgcataaggcacgcagcgagggttgctcgtagcaatcgagcgacagactactcgtctactcgtacgggatgacgtcgagacaagggtggggagaagagggggcgggacggcacgcaccagaaggcggtgtatgcggcgaagccgagggcggaggccgtggcgcagacggacgcggcggcgaagacgagctgccccacccgcagcgagaggccgctccacgtcccggggctgccggcgagctccctcatctcgatcgccctcctccgcttccgacccgcgccgcgcgccgcgcgggcgccctctcagacgccgccccggcgaccggcggccatgcggcgaaagttggtgggcggtttccgtgctgggagttgaactggcgtttcggtttttcaaagaagcgttgggggcgatgggtggacggcgaaaggtggcgcgcgctctctgacgagagaatttttggtggaattggtgcgcggtgacgacgccgggttggggttggggtcgcgttgcgcggcgtcgggtgcggtggggcaagccaggacgcggtcgcttgcgtgcgtttgcttgcaaagacggcgaaaattggtgggctttggtgttggtgggcactgcacacagaaatttgtgattattgattaaggccaagttttttttctcaactccaaattttaactttctctttttttttcattagcatgatttttaagcggtacgtttttttaagataataatagaagttgtttgaaaaattcaaataaactatttttaaaattttaattgttaatgcttaattaatcatatgttaatgaggtttctcgttttaggtgtattaaaaatatgccttcaaaattgacgatcgatcgcagcgagtcgtgcttctatgcttctaaagaaaagaacgcacgaaaattgaagtgcataaatggctcggattaaaagttactccagtttacatgacaaacatcattagagaggggcattttcgtccatggaaaattttttcgcgaacacaaatgagaccaatctagaaaggactagattgattttgaattaagaagggggtgaggctcaaacccggaccggctagctcgcagcttgtgttgctagtcgggaagaccccggacctttctccatgggaaaattcagtccatctccagccatgcccgtcctggcgccgggagctcgcgctgctcgaggcgacgcgagcggcggtgggagctcgaggcgaggcgaggcggcagtggcggcgaaggaggaggcgagcgcggcgggcgacgccatgcgcgacaaccagccccagcccgcggccgcgcccgcgatgaagcggaggaacagatgggaccaatcgcgtcgcttgtcgtcgtcgctcgcgccgcgcgccgtcgccatctcccctcgagccctgcccgtgccgcgcgccgtcgttcgtcgcccgtcgccgtcgtcgcctcgagcctcgttcgcgcgccgtcaccccgcgccgccgcctcgcctcacctcgagcagcgcgaactcccgctgccgctcgcctcctccactgccttgccccgccgccctaccacctagtcctcgcgcgccgccgaccaccgcgcgcccacgacgaggaggagcccgcggtggcggtggtgtcccaccacgtgtccccatgcgcccacgatgaggaggcacccgccgcgtgtccccgcgcgcccggtcagcctccgcctctgtcgccactcccctccgtcgcctctgccgcctccgcctccgcgtcgacattcgagccgtcctcgctaaccatcctcgctgtgcacgctgcatgagccgcgagagagaaaagagcaagagagagaatagaaagagagaggaagaagagtatggcaggcgggtctcacaattttttattaaaaaaacgctgactggattgtcacgtgtgcgccacgttggacaaaaccgctctgaattggtttgagggggataattcgcccggtttgcatagttaggggtgaagaatatccatttttttggtttaggggtaattcggatgactgcaaaagtttaggaaggtaattcgtgctttttttccctacaaactatgccccgtccactcgacacaacctgccaccataacggtgaacctgaagcctcccgtagtctcgtggccgcgccggactgccgggacaacctagccgagcgctcccgctggccgctgcctacagtaaagcagcgcgctgcgcccgcctcgccgccgcctccgcagggtccccgtgccttctcgcaccggcggcaccgctcgatctctgcgtgacggcgtgtgaggctgtggggtggtagtaggggcgggcggagatggcgaagcatttcgtgctcaacaccggcgccaagatcccctcggtggggctcggcacctggcagtccgacccgggcgtcgtcggcgacgccgtctacgccgctgtcaaggtcccccactcgcggcgtctcctcctctcctcttcatcacctttttcgtttcgtttttttttctctctctactttgtgatggatgatgatggcaaaccgatataaggttgttttcggattgtgcaggcggggtaccggcacatcgattgcgccagaatgtacaaaaatgaaaatgaggtaacttggttggtccaaaactttgaatcattcccgcattactggggtatcactgcagaattctgtaggcatggtcctcctagttctcgtctatgtttttgtttgaaacgattcgtgtatcaattttgcattaacagcattagtgaaaacagatcagcggcacaaaacagatgatttccgttcttgattcaattgggcaacctactgttatggaaacttgtatgatattcctccattttatatggactgatagtgaactactcgtttagataataagttgatgatcttccaccttctcaaaaaaagaaaaaagaaaaaaagtttacatagtaaaagacaaatctgcactactcagggccatgcgctggcaatcagaactcaaaactagcacttacctgtctttcttactactatatgctttacactagaccccaattttatcttgtttcaagacgagtaataattaataaacgcattttgggttttcaggtggggatagctctgaagaagctatttgaagaaggtgttgtcaagcgtgaagatttatttatcacatctaagctatggtaaccttttgcgtgattgtcctgtaaatatgtcttgtctttgcagttgaattggattacctagtgcctgcttgagcttttacttaaactgattggtgctgatgggtatgtttgtcaggtgtgattgtcatgccccagaggatgtgcctgagtcactagacaaaactctgagtgacttacagcttgagtacctggatctttaccttgtatttatcttattttcttaagaatttggatcaatacgtgacttgctagattctgtactttccatcgtcaaagtcttgctttggaaccattggcatcaatctatacaactatctctacatgctgcagaataagcctcctgatcagtcgatgcacattgataaactgttacattatccagcaaaatttctgcgagcttttatggattagccctgagacatccaatcataatcatcatgtgctagactgtagtccattgcacgagaacttccttttatcattcattgggtctgtaggaagatattcctttagtcctgccacgcaaccacaataaataaattaatatagaattatgttgttcatatcagttcaccttctttccttgaattatggtggatttttttttcatcctaaggtttcttctgggatcattacatatacctatatggttaatgactttgataaccttgacaatattattcagacaaatttgcaatagtaacataatatattgaacttgaataagtcttttctccacataaatgggaggatacctatggttaacctttgacttaataggttccttgttaaaatagtttcagcatgttgttacactaataataaaaaattctgatcaccattacgtttatgcagattcattggccattcagagtcaagaagggctcaggcattagtaacactgaagactacataccacctgacatcccatctacctggggagcaatggagaagctatatgattctggtaaatctcgtgccattggtgtaagtaacttctcatcaaaaaaactgggtgacctgcttgctgtagcctgtgtacctccagctgttgatcaggtagaatgccatcctggttggcagcaaacgaagctacataacttctgccagtcaactggcgttcatctttctgtaagtctgtggtacttatataattactctgagtcaatgctcttgttaatgagtcccgtggtttttaattttctgaatactgctaatccttttcttcctcttctttttaggcatactcgcctctaggttcacctggttcaacatggatgaacagtaacgtccttaaggaatccgtcatcatctcaattgcagagaagctcggcaaaactcctgcacaagtggcactgcactggaacattcagatgggtcacagtgtactcccaaaaagtgtgaccgaagaaaggataaagcagaacatagatgtttatgactggtctattccagaggacttgcttgttaagttctctgagattaagcaggttagttcaacatcctttgatcacctatatttaattgtcaatgttttcaaacatctctacagactttttcttaacaaccagtgtctgcatatgatttggacaaacttacattgatacctgctaacaattggtagaaggctatatagaggaaattaaagttgcaaaggtcatccataaaatgtttctaacttccatatggcgacctttacttttggaaaataaatcatttgcgaatactctcaaagaaatttgttttccttgaagcatgctacatttggcggtaattaagtaaatgaagcggtatactgtatgtagcttctactccctccgtcccaaaatataagggattttggacggttgggacactttctagtacaatgaatctggacatgagtgtccagattcattgtactagaaagtggattttgg

SEQ ID NO: 5292 - DNA, 80141 bp, Oryza sativa
cgaacggacggcgccgccggtgacatgggcgcaagcgcgggcgatggacgacgatgatattggtgacggaggacggacactggcgcggctaacaccggcgtcggcgccggcggtggcggactccctctctccgcggccacgccacgccgtagacgatgacgatggacgccgacaaggatggacgatgccggcgacggacggacgccggcgcgggcggtggcggactgacggcggcggcaccggacggagaagacgacggcgctacggacggaagaaacggagtggcacggaacgaaggaaattcgcgctttgatggtgtattttgaaaatagcacgaattaggtggcatatcttgaaagtagtgtgaattagatggcatattgtgaaagttaaagcgcagggcaacgcagtgaagagccctgggctcctggccctgtgacctgcctacctaccagccgccggcggcctaccgattgcccctctcgtcgcgtgaccgtgagcgtgaccgacgggccaaacccccagtccgtcacttagcctcggcgcgaaacacgccaccggatcgatcggcgcacgcggggcttgccggctgcacgcggtgcccgcgcacccgtggcgcggcgcagtagcgtgatgtggctctgccaaccaaccgtcagtccgcgtcatctcctgccaggccgcccggtcacgagtggctttcccgcggccgagacattacatagcttttggatctcacgtccgatccggtggcggacgagagcagagagccagacccccacgcacgcggcgcgggtgcaggtcaatgcaggtcatcgtacttttcgttcgttcggtcacgggatggatgctgctcggcgctgccaacaatatgttcaaccgggtggaatttggtgtttactcgcctgatggggacacgagcggaaacttgacgcgtgtcgcacgtacgagttagactcaaaccgacaataacaaggtttgacgcggggaacgagcctctcttctcccgttggatcggtggtcgcaacagcgcaaattttcatccacggcggattggtttgtgtggtgcaggtgcgaccggcatctccgcttcctggacaaaaaaatgagcgtctatcaaattgtaacgatgtgcgtgtcctcctttcttggactaagtcatgaataccgaccgatcttctcttgaaaaatgatcgcgttttcatccttcggtgccaaatgacaaaccacaagttagttccggaggacccaagtcagacggaataccaagcaagcttgctttctgcggcttaattaatttggttactcggtgacaggagatgatgctgtatgggcccctaacgtctctagcggtctaggcgcctaatgcaacaaggacggatcgagagcgacgcctacccgactagacccaacgcggcggccaacaatcgtgtccgtctggtggattcccacttcagatacatattggcgtccatcattccattgggcgacctgcatgcccaggccaagaattgggatccgcttaacaattgcacgtaacttcgaccgtccattttattcaggctttgtttagttttaagttttttcttcaaacttttaacttttccatcacatcaaaatttttctacccacataagctttcaacttttccatcacatcgtttcaatttcaaccaaacttctaattttagcataaactaaacacaccctcaggtctaaagctatagtacccatgtgaacagtgacccgtgctacaatattactgctacagtgctgtgaacagtgcattgtgtgatctgagccgtccagggtgtatccaatgatgtgtactgctactgcttattttgcacttgactgcacctgatccaaatccccaggccaatcaaacacaagagaatatcctacatctcttcatactgacaaagtgacaattaatccagcacaccgttttataagtcaatctcccgtgtgagctcgtgttaatgttgataaaatatactccatctgttctagaatataagaagttttagaggtagacacggttattaagaaagtaggtaaaattatatatgaagagtttgtgattggttgagaagcggaggtagatgagaaaagtgagggttggagggctgtaattggttgggaagggaatgttgatgaagaagttgttatattttaagacaaatattgagtactaaaagtggttatattttaatatagagggagtagatacacacgttgtaacaagcctacaagacatgcctattagctagtcacttttctgaagttccccggtcactacggcatttcttttgtccatttcgacgggtgagactgagaatcaatgggcaaattagagaaattcctcacgactaagagggcagaggctacgaagacgtagcattcatagcgcacgcgtgtagccgtaagcctgtcctgcttgcgagccactgcatcaggctgataataacttctcaacatgtttctttgaatgactcgcacgaaacgatacgaaattctattaataaagtaggaaaaaattataatattataattctggagggtcataaccagtaaaaaatgaaaaaatataccgtcacccgtacaccgacaacaccaacacacagatccgggagaaggctagcaccgaaccacttttcaacatgttggcagtgccgttgttataaaaacgtttctgcagtcaggcactgccatatccacggaaacgaatggaagaaaaaaaaaactttgtgatttgtcagcagaccacttgctaaaagaccagttaaaatcagcagtatggcactaaatgggcaggaccatctccactaaattgaaagacgaggattaatgaaaggatttcgctgactggtgccggataggctcatcctcacgtcctcaccaaccaaccatgcaagcccgctcgaccccggataggagggctacttcaacgtccgcatcgtctgcgtcgctctaccccttcggacgcatgtgccctccggtggtggcatggtgcattgcaattcatgtcaggctaaatcgatcaaccaaccacacgggcctacggaagccgccgatccaatgtaatctacacgcgtcgcgcccgcgcgcaaaagaaaggcgagaaaaacgacctatatatgcgacgtgctcggccacgacccacacgacagcgaacgtgcgcgcgtgcgtgtgcaacggcggcccaaggcgcaaacgcgaacgcctcaatctttccacttcgttccacctctcctccgtgcaaaatccccagcgcgcacgcctcgtccccctacgtgccgcgggcgtggttgcacgtcgtacgtacgcaggcgtcctcgcgagggcgcgcacgcaggtgcgagctcgtggcgggtgacgaagcggtgaaggcaaggcatcgcggcggctgtttgatccggggcctctttttgctccccgtgatcaggtattcgggtgctatacttaggtctggcaaaagtcagccgggccgcgcgcggtttggccatggctgcggcgccgccgtccgtggcgtcgtcgtcgtcgtcgtccagccccgtcctgtcggccgcgcaccgccgccggctcaacgacgtcgagcgagacgcgttcgactacggcggcccgtgcgacgtcgacgtcgatcatgatgacgacgacggcggcggcggagtgcgccgcgggcacggcgccggcgtggcgggtgtcagggcgctgttctcgtcggccaggaggagcaagagggcgtccgtgattatcgatcaggcatggctgcggaacgtggtcgcgtgcctgctcggcctcaccgtcgtcgccgggctcgtgctgagctcgcaccgagtgagcggcgccggcggcgggaggctcgtgcagaggatggacctcggtgacggcgaagtgatgggctggacggaggagaacttgacggctgttgctcgccagtcacctgacacgccggtaagtacgtatcgccgttaacggttcggttaatcaatcccacacaaaccggtgcttagcggttggtgcacatactagacggtagatagagtcaagattatttaagaaaagaggaaattatgacgcgccatgaatgatatatatttgagtagaagtgtagaactcgttccagcttttgttcctgggtatagacattgaattggcacagacgtgttggaacctactctcttcgtggactggatgtcaccatgtgtgtacgcaagagaagtatagaacttagagaaaaattcatggcgagcgtccatggccttcaggtctcagctgtcttttgtattcttgcttagaaacacgctgaacacggtagagacatttcttcttcagaagttacaggggaagcccttccatccgtgtctttgtcgatggataagtgcctgttcttgtcgcccgtggtgtagcataatggtattttctttagcacatcgctgtttcttctttttcgcgtagttattatcgctggtggtcatccgttgcagaattcaatcgggagagtgattccctaaggttaacgccacttatgtaggcccttggcgcctgcagcgcgaggcccttccaaattgcttgatgttgatgtccaggcactcaaagctgggatttgctacaacatttcaagaaactcacattgaagaaactcacagcgttacacaaacattcatttcattgctagtgccaaaacaatcaagcagcataggagaaaaaacatttttcaagtttcagcactgaaactatcgccaagttgaaacagaggttcaagacacaaataaccaacagatgcactaaatcttgcaaatgaaaagaaaaagtgggttcctagtgtttcctggctatctaaatcctctgcattaggttataggaatgaaaatctgactgtcgcaattctagtcccatgccctcgacaaggaaagatgagaaaatgaagtgggaaatatacatcaatcaattatatcctcactaagtgctagaatagtgcttctatgactagaacactaggaaaaagatttatttgatgaaacatgattatcacctgtttccctctaattaaaagcgtcttctgtagacctgcaagtaaagtagcaggatgatcattgtcatatacgatgttcctaattacaagagagatttttttttaattcaatcagctgttttttcccattcatgaaagcaaaatatggttgaaatgctactatgctagtaataatattctatgatcaacgagctctatactgaagttcacctacaaaatgaacagatgaagatatggatgacgccagatagtgaaggttatggcaaatgcattgaacgcccgaagaaacatgacagtaagctattactctccatctttcaagttcatgctagtttaaactgagtgcctacgcttaaccacatatcatatgcttcttgccaggaatgaacagtgcaacagctggttatataattgttaatgccaatggtggattgaaccagatgagactgggagtatgtacacatctatgttagggaaaaaaaacctttaaacatatcaagatgattacgacttccagctcacttacattgcttcaaaatctttcatgcagataagcgacatggttgcagttgctaagctcatgaatgcaacactagtaatccctactctggatcacaaatcattttggactgatccaaggttaatctctttatgaccagtataaatatactataatgagggtcctagagaaactactgggatatataactgatgttttggtcctaacatgcagtgatttcaaagatatatttgatgtggaacacttcaagaaaactttagagggtgacatttcgattgtggattccttgccactagcttataaaggattgaaactttatatgagagcacccacttcttgggccaaggtatggaccaatcactcaagtgggcatcaaagttatttagaaaaagacataatatactgcagtcgaagagttatgaactgctagttacttttctgcaggcttcttactacagagctttctcaaggacactgaagaaggccaaagttgtgaaattcacacatacagattcacgaattgttaacaatggtcttcccccatccatccaacgactccgttgtcgggcaaattatgaggcactaagattccacaaagaaattgaagagctgagtactgctctagtagatagactgaggaatggatccaatcattatatcgcacttcacttaaggtgattgaaactggaaatgttaagtgaagctgacataattttgctgcaaataatcttgcagatcagtaatgtacttccttttcttatcaattaacaggtatgagaaggacatgctctcatttactggttgcagccacaacctaacacataaagaggcagatgagctgagagaaatgagactcaacgtgcggcactggaaagagaaggaaatcaacagtagggagaggagactccaaggacgctgccctatgactcctcgtgaagtagctcttttcctcaaagctatgggctatccttccagcacaaagatctatattgtagcaggtgaaatatatggtggacatagcatggattcattaaaggctgaatatccaaacatatatacacattatagtctggcaacggtagatgagttagagcctttcaagctataccaaaacagattagctgccttggactataatgtagccgtccaaagtgatgtttttgtgtatacgtatgatggaaatatggctaaagcagtacagggtcacagaagatttgaaggattccaaaaaaccatcaacccagacaggtacagttctaggaatgttgtaattattatacctcaattgtaagagctgaattttttaactgattgtaggcagaagcttgtgggactcattgacaagcttgatgaaggtacactaacatggaatgagttccaaagtgaagtgaagatacatcatgaaaacagacttgggggtccatatcagaggttatctggtcgaagtcctaggcaagaggagtacttctacgcaaatccccttccaggctgcttgtgcaaaagaatgcaaaggattaaatgacgctgatttgttatgaagaggatgtgatattattgtcttcaaaagttccaaccacttccctgatgtagcatggatatacaaacacaaaatcttctaacaaagaattacactggtaatggacagggacagcccacagataattttcctagattaacagtgtatgcagccatcattcatagaaaaggaagcaggaggggcaggtccatttattatcgtctgagatctgcatctccagttgattatttattcaagtatacaggaaacggaagagtaaaaaagattttaaataccagcaaagcatagatgtgccagaagtgatgggatagcttgaaagaataccttttttagtgcatgtatgtagttcacacttcacacactccatatgtacagtctgtcctctttttatattttgtattcatcccaaaattgcagctttattcagataggcatgtatgatgtatatagagagagcaggatgtacccaagaagaaacaagtgatgaatggtaaattcttttttagtttatttcattccattgagtctttgcatttcaagtttgctttaggaatttgtgctgccatgatgccaacaaacattttatcactaagttcagttgattgttttggatttctatgctttgctccatttcatatcaatcatcctcgatatcataactaaatatcatccatgttgccagttcctctcaaacagagtactgttgttcttaattcttaaacacattccctgttaagtttccttgaatgtgtgaaactaagtcaatttcagaaattgtgacttcattctgattatttagctttatcactaacataaatgtgtgcagaaaaagaagcaccaatttagtgacatgggtcagtgggttagacacttgcatccctaccatggaagtcaataggtaaacatagctcttcaaaactgtaaagcaatggaagcctccaagtggcagacacatttttccaactaaaactgaacactgaaacaatatggaacggacgataggatgatacctgaaaagcctgtaagctgttttggtaaaacttttcccttgaccacctctgttgcagcactcatgaaatacacttgtatatcatgagcattgttcttttaatcacaaatgattaccagtccgccagtcaccacatagaaggcacatatacttgctccttcaagttctgggcagcactctcagtagggaatcctcgcacagcaccaatagtccattgcgaaatgattccggcagcaacagcgaatctcagattcctctccaatgtatcctggtcctcatacatctcaggacaagacgtcaattttctaatagcagcagcaacaacagcatctccagaacctgtccggtcagttgtgtatggagttatgagtgcatcctccgtcccaatcacgcagccatgaaacttgggtgtgtagtagtggatcctaagtgttccgtatgtcacaagcaagagttttatcccatcatgccaaatgggagcaatttcttcgggggtgtaatggtagtactgtggccagttccttgttagatgaaaaccatccagataatactgaggtggattggcacgcttatattgatagtactcgtgatcaaggaggaattccaactcatcccttgacacctctataatatcagcctcattccatgccttgtttatcaactcctttgtttcatcccttgacctccacaaaggcaatggcaagttaagatcaaagaatattttacttccaaatttcttggacagttcaattgctctgaagagtgtgctttccattgagggagtcaataggacctctgaattgaaatggaacactctagcctgcaattacagcacgttaggtctaaaattcatttttttttgctttccatcaaatcataaataaagaaaagacggtctacaatctactttcacgggcacataaaaaattcatcttctaaggataaacatcatataacagggtaaaatttgtttgtctttttaatctgcaaaactggttggcttggcaccattgtatgttcaactgaactaatgaatagacataagcaattgtgctctgtagtacactactcacatagagtcggtgtttttcaatgcaacaatgtaccgcagctgagcggtggatatccttgccgagaaataaaaatgcagcaatggagtatgcagaagtcaccaatttcaatcatttaccacaaaatcaccgactcacctctttcaaaacatccacattgatctcagccttgctgagggagtcctcggcagcgctcttcaccgtctcagccacaagcctcgttccgccgctgccgtcctcacggtcccggaacccgaccttcatgcgcgcagtggccgtggccgcgccgtcgtcgaacctgatggcgcgcgtctgcactcgctcgcagttcatgcggtacacaagctcgcggccgaagtcgtcgtcaccgaccttgccgagcaccgcggcgcggccgccgagcctggtgagcgcgatggccacgttgctcgccgcgctccccggcgcgcgcgcgaactccggaggctcccactgcagatgcagccacgtggagtatatgtccgggtgcatctgccggtccgacacccgcaccgtcgggacgaactcccaccgcggcgccccgaagcagcacaccagcggcggccagtcgtacggcgaatcctccccgtcttcggagtcgctccccgtcgcctccgcctccccatcctcatcttggaccgctctcttcgaatcctccgttccggggctcgccgcccggacctcatcctccttctccgccgcctcctgctcggcctcttgcttggatttccttgtccgacggccccgccgcttcggcggctcctcctcgccctctgaatcagactcctgcgtattcttcttggtcctgcgcctcgtggtcttcgccttcggcggcgacggggatggggacttcctgcgcccgcggcgtggggcgggttcaggggattccggtacggcggcgccgttcggggagcagcgaatatggcggcctcggaagatgctggggtggatgcgcgcggcgaggatggtgggcttggggaataaggatggcaagatgaggaatggggaggccgccatggccatagccggctctctccttcggtgggaagcctggtagaagacgaaggtgttcgactctatccagttcgcgttgaagggtttagcgaccgttaaggatgtcgggttgcgcccgaatccataaactgggttgcagccttgcgggtatggatctgagcgctttgtaggcccaacattgaaacggaacggtgctgcaccgctaactaatatgggccaaattcgatctcgacggccagcctgaagtttagatttgacagttgcgttggctcaagtatgaggttgcagtgagcgtctccaataagttcaggccggaacaaatttaccgtcaaggagcataactgcataagctgtgtactctgcccgtgactgaactgcagagtattcttgtgtgcatgcttgattcatttttccggactactgaaatttttcccaagatatgtccattattcgttgatccaaacatacatcagtacagaacaaagtcaaaaggataaagaaatagagaaatagctagggcctaggagtaacaaggacaccctgataaaagtacatgcgcatcagtacatcactagacaccaacaatggagtctcgccgtatcactcgacggggaccatgacctcgttggtgcgcagcggaggcagagtaaacggcgggttgtaccgcgccagcacgaaggggcccttgacggtgaacccgtccttctccagcgcggccttgagccactccgccttctccttcaccaccttgtctccggtcaggccgctgaacctcaccaccccgtacttcctctcccccacctgccgcagcaccacccgctcgtccgtcggccgcggcgcctcctccaccttgctgtacttggacggcagcagaaactgcattgtcatctgacccttcccctggctgcgctcttcggccgtgatcaccggcgcggtcatcgccaccggctcaggctcaccggaggtgatgaccggggccgtcatggcgatactctcgggctcgccggaggtgatgaccggcgcggtcatgtcgatcttctctggcttggtgttctgcgggttgccgagggcgccgatgtagttgccgaggacggtgaacccgccgtcgcggtcgcctttcatctccgcggggtcgtaggtgacctcggcgacgacgcacggcgggtacttgcggacctcgtagccggcgccggtgtggagcacctcgtgcttgggcgtctccaccgtgatcttgcccagcaccatccccatggcggtcgacggccggcgagatcagcgagcaggtgaaaattaaggtcggattcgatctcagcggcgggggtgggtttgttctttgttggatacttggatgagtgattggcggtgggcttggccgcttggagtttaaagaagcggcgaggaggcgggatgtgtggacgaagtggggagcctgaatcgcggcgcgtgttgctccacgtccgcggtgcgttttgtcttcggcttggcgggcaagtccagcactctgcaacaacctcgatacgtcctccgttggctttcgctttgactagaggtctagagccgctggcgcacggtattttgctgctttctggagttcatgggctggactttgggctttaccaaaataacaggaccaaatgagggccagacggccagtaaataatgggctcgacgctttcgaccaagttatatgagcatgtgacaaagttcggctctgatcatatatctattatattattaaaacagctttgaaaggagacaccatgttcactgtgggggctagaaattttcacattaatcggagaaaaataaaaaaaaagaaaaaggagagtccaagtagaagtacaatttaaaaatagctgaaattcgaaattaaaaataagcaatattgaaagaagtttctatataagaacccaatatgagattaatcaaaattcgaaataaaaataaaaaaatccaaaatcaaaaaaggaaaggagagtccaagtagaaatacaatttaaaaatagctgaaattcgaaattaaaaataaggaatattaaaataagtttccatataagaacccaatacgagattaatcaaaaatcaaaataataataaaataaaatctaaaattagaaaagaaaataagagtccaagtaggaatacaatataaaaatatctgaattcggaattaaaaataaggaatattaaaataagagtctatataataacccaatacaagattaattaaaattcagaataaaaataattcccacattaattggagaaaaagaaaaaaaagaaaaaggagagtccaagtagaagtataatttaaaaataactgaaattcaaaattaaaaataagaaatattgaaagaagaatccaatacgagattaattaaaaattagaataaaaaataaaataatatctaaaactagaaaaattaaaagagagttcaaataggaatacaattttgaaacaactgaaattgaaaataaaaaataaaaacattaaaataacacaatacgatattaactaaaattttttaaaaaattctgaaattagaaaaataaaaataagatatcaattaggaatacaatttataaataactaaaatttgtgataaaaataaagatcattgaaagaaaagaccatctaaaacacatgacgagataaattaagtaacatgcctataaagaagtagagtggtggcggttgatatgagatataaaaattgttaataaaacaccaaatagaatcctaatgacgattaaaaggagagacgtcaggcaggccatgaagcaaacgagtaaggcgattgccgggacttctagaaagtaaaaaaaaacccattgataatcatattcaatttttaaaatctcaatgataataaaaaggagaagcagcgggcggggtgtataagagcatagttgtagagccgccgacggttgacaggacttctagaaaataaaaaatgaattccaacgacagttatgttcgatttttagaatcacaatgtcaataaagagttggcggcggacaggctgtagaggggcattgtagcatcgtttgatgggacttctaaaaattataaaaaataaaactacaagtccaatttttaaaggttttgaacttctaaaaagtaaaaaaacccaacgataatcatgttcgattctaaaatctcaatgccaataagaagggaggcagcgggtgagccgtagaggagtacaatagcaaagccgctgacggtttggcggaacttctagaaagtaaaaaatgaacccaaacaaaaattatgttcgatttttaaaatctcaatgacaacaatgagaagagaccgtggacgggccgtagagtagtataatggcaacgtttgatgggacatctagaaattataaaaatgaaacccaacatgacaataaactctaaaaactataaaatctaatttttaaaggttccaagaagaatgaatgaaaatagtggtagatcgagcaagcaaataaagaaggagatgacataagggatagcaactggtgtgacttttaaaaactatataattagaaacacgaggatgataaggtttggtctttcaaagtcttaagacaatgaaatagctagatagctatttaataaattttaaataaaatcatacttaaaaactatatgattttgtttggatgctagccgctcaattgcgcgggccacccagctaatttaaaaaaaaacaaaaagaaaagttcggttctgattgtttgattccaaaaagaatgaagcaagaaaaataatttacatgtagaatccctcaaaatcaactctaaatagtaaaattcaatttgtggttgcaattgatatgccaacaagtaaacatagcttattcattcttttggtgaagtagttcgttccgtgagcctatgtgcaaatattccaattcttgcagcaatgaaaaatttcatgaggagctattgtagtaatccagcttacaatgagaggctaaaaggaggaagtagtaacaagacagtgacgaattggaaggctccagaagcccatcctttattcagtactgaaatcttaaaaagtggcgaacttcgaacatgattgtcctaaacacaagcaggatgagaaaagaatgaccacacgagcagtaagtacatggaatttgaatacgggcacgcctcgcacactcaaatctttctttttcaggtgaaaactcctatacccaatctcattcctggtatcatgaacttgtcgagtatactctgtatatacgcacataatctgtaaggcgttcatccatggcattttggatggtcaacaggaggtggagggagcagattcggggctggtccgttcagcacctcgaaaaccatggccagccccaacggcaggtgcgcgtccaagtgacagtgcatgaaccacatacctacagtttcatccccgatgcatggaaccaatcagaaatcagttgcaactcaacaactcgacagtcacttgcacggttgcaccaaatcatgtaaggtaaaaataaattaagcgccgcgggctcacctgggttgttcgccatgaaccggatcaccgcccagccgccggccggcacggcgacggtgttgcgcacctgcgggtccacgaggttgtacttgctcttcatcgacgggttgaaccggccgagcccctgcgccagcaggtagaagtcgaacccgtgcaggtggatcgggtggttctcggtgccgagcgtgctactgtactgctcgctctgcagcaccacctccaccacgtcgttgtacttcactttcttcaccgccgtcgccttcctgaacccctgcatcggcggcgggaagtccgggaagtcctcggagtacacgcccggtacgcccttgtagagcgcctcgagtagcgacaccttctgatccgggaactggaacgagttcctgttcatggccgccacgagcgcgaacccgctgcacttcgtctggttgggcgcgcacggcgcctggtccagcccgaacgtcaccaccatgttgtggtcgacggttgttggcacgcccgggtcgctcgggcgcgcgaggccggtgagtgaccagtagaatctgccggcggtgacgacgtcgtcgtggggcggcagggacggcatggccgccggggcgtaattcggcacgcccttgtacttcacgatgcccgtggcggtggactggtcgaacggcacggcgacggtcttgctgtcgaagacgtgtgccgccatgtagtaccgaccgggcgatgctgtggtgttcatgagggcgtccaccgtctggcccggcgcgatgacgatgacgtccgtggcgtatggtttggtgtagctggcgtcggcggcgaccacggtgaaggtgtggccggccaccttgaagaagagctccacattgactgcagcgttgatgatgcgcaggaggcaagtcttgccgtactccacctccacttcatacatggcggaacctaatgtgttgcacacacacaaaaaaaatgcaggtcgggaaaatgttggtcacaggtaaactatctaatacgtgctggtggagctgtacctttgcagcgattctggtcacctggcatgccgttgatggtgagcgcatctgaaatctgaggccctaagccggtcaggtacccatcattctccacatcgtccacatttctgttccaccactcacctgccagagaaaacaacaattacgtaatatcgtgacgagccacacagcaaaaatgaaccatgccacattgccaccatctctccatcgtgtatacggtactagttcttgcgtacctagtaggatcgggatctcttcatatggttcagggaacgggtacccactcggcccattcctgggttttatgatgagcgcgccgtagatggttgctcggaggagcgaggagtgcgcgtgccaccacagcgtcccctcctggccggtgatgttgaaccggtacgtgaaattgccagaaggctggatggggcattgcgtgatcttgttggccccgtcattccaaccactccggagctggtatacaccgtgcctgcatcaatcaccaccggagaggaaacacatgagttttgggccggtttgtccaggtgtggtaggccggaagcccagaatgattgagggactatgggctgtgtgggctggatatgtgaggcccacaaacattggcagtctgttgtattcagatcacgccccctgtttggcaaaggaaagttcagagaatgtcaaagcgcttaccaatggagtgacagagggtacggtgagtcgttcacggcgtggacgaccagtgtatcgccttcggtaacctctatggtcggtcccggcagctgctggttggccgtgtagatcacactgttcatgcatagctgggtgatcttcgtaccgcccacctgaattcaggtatacgcagaacttagaaagacatagccgtggacccttgcaacactccactccaaaacgaacaagcaccacagccacaggtggagcgacgcgcgcgaaagccagagtacagtacataacgctggatatatacgaagagagcaaacatgcacacaaacaagtttctgggcaggaatttttaccttgaaggtgtgctccacgacggccgcgcttgctgctgccgtgcagagaaccagcacgagcggcacgagcatggctgccgatgccatggccggagtcttcagtagcaactggagtagcaaagttgaggagacacaccgccatggcgcgcgcgtccttaagtattagcacaatagtacatcctattgaactgacattggaactagtctatcttattacttcttcttgcagaacgacgtatgaaacagcgtattcgtgaatgcgtacgtaagtctaatgaaccgattccacttggccgtcatggcgtgagagctttagtaacaacgaaatcagattgcgacggcatgagccatggagggatgctgttttcctcgaaaacgcagttggattaaatcaccattacagtatatggcacgtcatgaagttggtaaaggaagaagtttggctagatgtagcatctatcaattattctaagtgtgtatctgaggtcaagagcatccagtagaaaatttctacacttatacatattgttttactaaagctccatctagcacgtatagtacgtaccgtctcttcagttaaaaaattcaaataattgagtttaataacaacgtggatgacacattcaacaagaaaaactcgtagtgtctgcgcatgtaccatgtgttttaaaaaacaacacacactctcgcacacgcgtacaaaacttccatcaagttctgactaaatggtggactccacgaccctacacctcctggccaaatgtaggctaacaaagagaatatggacagaaatccagagatggacatgcaccgaccttcagatgggtagttgggaaacttgtcactctgttgggcagtggtggactctcgtagcggagtccccaaacacccccgcaagcctctaaagactatgattatcctagtctcgtgggaaatctggtgcgaacacaatgcaagaattttccgaaactctgcgtcatcaccgtcctcaatcctagcaaagatcaaggaggaaggaagagcatgggtcaaagcagaggcaacaaccctacaggagtttggaatcctgggagatatcacttagctcttttccttttttgcggggtagtctttttcctcggctaaccctatatatacccttgtttatttttctcctgctctattaatatacacaaggcaaagcttttgcctttcttcaaaaacttccatcaagttctcgttactaagttaagtatcaaaacaataagaaagctaatgcgtatcatagagaacatagacacaacggtgaatatgggacgttcatgcaagctaccaaagttgctcaacttctctatacacttagggccctttaaatcgcagaattagaaaaacacagaattttgacaagaatacaagtataaagaagaggattgcaaaacatagaaaaacacatgaatgaccgtttgattagatcacaagaaaaacgtatgaatcagataagagagatatactcaaagggaaatttttaagaggttgaagttctcggtaaatttcgtacaaaatctctataggattgttcaatccataggaattataaaagatggagtatgattcaatcctttcttttaaagacttcataaaaaaatttcatataggattgaaacactctaaaatttcttttctttgttttttctctaaatcaaaggggcccttaaaataaaggggcccttaaaatgttagtctagctattgcaatgcacgaacatactactatcactactactgtaaaatggaaatggtaatttcatttatccgctaccccttgaacgcgattccacgtgatttcgggagttaccgttcctcttcccatggccaaataaagaaaatgatcagataaaaactcatgtgaccgataaaaaatgatagacaacttaatgggtgatcgataaaaaaaatggatacaaaattggatagcaaaaaccaaaaactaaacccccaccatcaaccaataaaaaaatagatataaataaaatgaaccgctccctaagtagattcgtcggcccgtgcttgcacaaaatcccattgcaatgtacaacatgctgttctttttgtcagggaaagcctagtgtgtgtttactcataaaaatatcatctggtttttgtgggtcttaattcttaacaaaaacatttttgtagcattagaaaaagaacaaactctatatttaaatgtttggactagaatactcaccatgcatgcctacatggcatgaatactatactatatctatataatactccatttgttttatattataagtcgtttgactttttttctagtcaaactttgttacgtttgaccaaatttatagaaaaaatttcaatatttaatttttgtcaaattagtttcattaaatctagcattgaatatattttgataatatgtttgttttgtgttgaaaatattactatatttttgtataaatttggaaatttgataaggaaaaaaagttaaacatcctatagcgcccgttccgtcgtggcgcctagcgggaaaattaaattcttaaaaaccctaattgcaaaatttgttctttgagtgttgtcaagcatccgtgccattccggatctcaaaatccccgatctatcgtcaaattcaaatcccgaatccaaatctttcccaaatcaaattcctccgcaaaagtctaaaatgcctccccgtcgtttggtgggccgattctctctctctcagcccgctctctctccccccctcagctccgtctctctctccctcgctctgcccgtgtgccgcacgcgcgtgtgcgcgtgcgccgagccgagcgctctcccctctctcgctctctctccccgctccatccccagcgagctccccacccgcaatttcgaatccgcgtgccgttgcttcacgcgtgcgcccgcgcggtcgccgccgtcgtcagccacctgctacccatgcctacgccgtccggccccgcgccctaccgcgctgcgccgcttgcgtcgcgccttgccccgcgagccagcgcgcgtgcccgagccgctccacctgcatccgtccaaaaaccggagacagcgcctcccgctcccatctctctcccttcccaaatcggcatggctcgagctccctttctccccctctgttttcccctttcctcactcggcccggcctctgtttctcccgcttggttccagcgccatgggcagggaggagcgcctgacgccgagccatcgcccatgccgtttgaccccgcgcccgtgagcccgttccttcccctcgaagctccctcgccccagtaccgctcgaggtcggtttcctctcctcccaaaccgacataaccaccccataaaagccgcccctccccctctcgctcgattcccctgtttcgctccaagccgccgagccattgccgcctcgcccgtgccctgcttgctgtcgccttccgccgtcgcgtgtgccggaggagccagtgcgcgctaggaacggaaggggactccgggcgcacgtcttcctcctcttccccggcccgaggccggagcgatcacgccccgcgccgtcagccatcgtcactgcgcccttcacctcgtcgcggtagtgcactccccgttctccctcctcgttcctcctcctgcccctagctttcggtagtagcacgagtagacccccgtagtcagctggcgccgccccaagccttgccaccgcccgctgtgtgctcaccgccgtcgccgcccgagctcggtagcgcctctcgtcgccggcctccctcggtgcgtttcctcctaatccggcacaaggaatggattcccggagtcgcgtagatgctctagtgcgaaggaatcgaactcccgtcgcgccgtcgccatttcccccttctcttgccgccggttgccaccgccgcaatccgccgccgtcgcactccctccggcgaatccgagcagttagctcgtctcctctagtctcgcgctacctcccggtgtgttcgccctcgcccgcatcgccgtatatcgccccgccgctcgccgccgccgtcccccgtccgttcgcgggcgcgtcgtcgtcttcctctcgccggtccgcgtggcggccacgtaggcgccacctcggcgccacctcggccgcgaccgggtcaagatgaccccggtccgccgctcccctccgccccgctcgtgcgcgcggtccactgcgagccgtgaggctgcgtgtgggcccgccgcatccgcatcccaccgcgagccgcgcgcgtgcaccgcgccccctccaaaccctagcgccgcgtcgcgtgctcctcactcttggtgagccgagccgccgacaagcgggtcccactcgggaccacgcgaggtggacccggcccaccggttccccctccctctctccctgcgcgtgcccttgggccgccttctcgggccggccggcccatttagctcagctgagccgctctctcctctcgggccgcggctatcccgagggaagtctaaactcccttcctccttcttttctttttcaaaagggtttaattaaatcctttttcctttagaccaaaaatccaataatcttagaaattcaataacttctcaactgtacatccgtttgactctgttcaacttccaaaaatcctcaagtctcgagatctatctaatggcacgcttagaggtcaataatacggctttattttcaccgtttgttgagttgtcccgtttcgcgtgtagtttcggagcccgaagacccacagcgcgaggatttcgaggatcaagctcaagatctcgagcaaggcaagtcacctttgaacattttgcacctataatttaaatataagtatttcttttccgcaaatattgcatgaataggtttaacacacgtaattcggccgcggcttgcgagatagcctgcctgccccaaatcctaaattgctgcaattaccctccgtgaattattgaatacctaaaactcctttgtcgactgttgtgcttcgatgcacgggccttcgggcatgggcatcggaacacctcccctcaaatttaaaacatccaacgatgggtaaaacttggggtttacaaaagacttggaaaaaaaccctgatacctgggtcggtgcttgcgaactaaatgaatttccaaaatcgcagaccgggggacgtaccgagagtacggtttcccactcttgcactaaggaccgtttccttggaatttcatccgaacataagacaagtgcgaccacatgggtgtaatgggacgcccctggctgagtaattagctaatcgggggagccatgatgccaagagacatgtggattcaatggggtggtgccggggagaacccctaggtttcctgacacagtatggtctgggacctaacctggtgttggtctggacccctcttgttggcatatggtgaacctgtgtcggctttcgaaatgccttgtcatgaaagcctcaaggtctccagacgtggccgttctgcacgggctgggtgatccgggttagtaatgtcgtgtgggtaaagtgtaccccctctgtagaggttattaaactgttcgaacagccgtgcccacggtcatgggcggatgtgaggtgattcctagcgtagttttgtttgactactgcttgtgaaattgctgatgtggaaagggttcgatgtttggaaaaatctgcggctgatgggatcagccaggcctgggtggccgtttgaaagctgttggccgggtgccaacctcgatccaatcaaagactgatacattgcacatactccgaccggacaagacgcactgtctcatccgtgtcgtttgagaagcactcacttagttgtttcaaaagggggtttaaataaaatcaattgcacaaacaacagcctttcctttgaagcctgcattaaatacttaattcccatgtcttgctgagtactcctgtactcacccttgctctacataaataatcccccccagttgctgaagaagatgaagtaggtctcgctgatgaggagttcttccaggagcaagtcggctacgatgagttttagggtttctgcctagttctcaagtcgcgcctgtgatgaatggtccaagtcttggcttccgcttttccttttgtaatgcagttgtgagttcgggatctgtccgtagcccaacatgattgtacccctactctgtaataaggagacctctgttgctgtgataatctgtcttcctgtgataccggcactgtttcctgggactggtatcgattaacaggttaatttggagagtcacgggctagttccgttcagggctagttcggggcgtgacaagggttctactgttctgattgcatttttgtttcacagtttcacaaccatctgtgttctatattagtgttctacatacagaggaacatgaaaggctcaaataatagtcatccatgaatggacctgaattctgccaacgtcacacgcatactttgatcaagtcagggaaaaaccgcggcgatgaaatagcacatatatataagtgacgcattgacatttcgttttgtaaggtaatgtcccattgacaattggcgataagattggcacttgaacaaaaatataattgcaaatgggccgagggtgtcgtgagcttgtgactcgtaagacgacgtcgtcctttggtgaaaaccaatcagagcttgccctcctggctcctgctaggctaaatggccaaatgcacccctggcagcttatctaaacacaggaatctttagctgaaaactaagaattgcaagcaaaccaacgtcattctcccaaatcgttgcttaattggtatcctggaataaattcatgtttaacacagtcaaaggaatctgaagtttgacatttgttgctttacagtttacacgttcccccggagaggaaaaaaaaaacagacctctttacagtttacacatgatacacatacacagaacaaataaacgaacggcactacctcgtttcgtgcctcctgtactccatttacacaaacacaagaacaaatatgaagtaaaatttggctacgaaagtgcattacaatttgacaccaacgccagaatcttgcaggttctagcacttcggcagatcggcaggcggcggagggaggaaggagtcaggcgtcgtcccgttatccaccgcgaacaccatgccgagccccatcggaacgtgcgcgtcaaggtggcaatggaagaaccacatgcctgcgtccaaagtccaaaaccagcacccgtcattttcagcccatacgttaggcccaaacagcccatctctagtttgggccggagaaatacgacagatttagcgacagtaggattcctacctggattgttggcaacgaaacggatgacggcccagccgccggtcggcacggcgagggtgttgcgcgaaaccgggtcgacgaggttgtagccgctcacgttgcccggcgtgaagttgccgaggccctgggccagcacgaagaagttgaagccgtggaggtggatcgggtggttctccgacgggaaggcggtcgggttctgcagcacgatctccaccgtcgagttgtacttgagcctccgcaccttggtcccctcgaccatcggcgtgccgctcggctgcggggcgtccgggaagtcggcggtgtacacccccggcgtgcggttgaactgcgcctccaggagggacatctgcgacgggaggcggaacgacacgccgttcatcgccgccgcgacggatttccccgagcagctgctctgtgtggagtcgcacggcagctggccgaggcccagctcgatggtcatgttcacgtccaccttggtcggcacggccggcgcgctgggagacggcgggcccctcagcccgaagtagaaggcgttggccgtcgcggagtcggagctctggggcatggtgggcatgacgggcgtcgcgtttttcttggtcgacgtggtgttgtagtgcacgatggccgtggcggtggtgtcgtcggttacggccatggtggtcggagacaggctgtcgtacgcctgcaccgccatgtagtagctgccggccgacgcgttggtgaccatgagcgcgtccacggtgtgccccggcgcgagcacgagcgtgtccgtggtgtagttggcggtgtagcacgcgtcgacggccacgacggtgaacgcgtggccggccaccttgaagaagaggtgcgtgttgagtccagcgttgatgacccggagtagcaccgtcgtgttgggctgcacgtccaccgtgaacgtgtcatctacgaaccaattttttacagagttatttcttcgatttgagcagaggatttacatttttcgcctgcagtaaattaaactgtgtcattccatcaggatttaccaaatgacgtacgtacttgcgcattggtagagctcgccggtaacaccattaacggtgaacgcgtcggattctctgggaagctggccagatgagacggcgtcgctctcgatgtcgacgacattccggctccaccattcccctgtgtccaccaaggcctcatccagaatcaagatatgcccaatttccgtatcaatgcatagtacgacagctaggagattcggcggctaccaagcacgatggggacctcttggtccggcgcggggaagggataggcggagccgtttcttggccggatgatgagagcgccgtacacggtggcgcgcaggaaggaggagtgggcgtgccaccacagcgtgccttcttgtccggtgacgttgaacctgtacgtgtacgagctgttcggctggatagggcactgcgtgaccatgctcgggccgtccgcccatggcgtcagtagctggagtatgccatgcctgtaaaattttccaccagcagcagtcacacgtgcaggggttagacccaactctgcttatgccaaatggttaggttaagtgtaccgaactaaattgagctaaaaaaaaaagtgcactgaattgctgcactactccctctatctcaaaatataagcatttttagcatagtgccaaatcaaatatttgcaatcttaactattaatagaaaaaatataaaaaagattaaaattgatgttattagatttattattaaacaaactatcacaatatgcaactttttttatttaaaacatactatatattgttggtcaaaatagcatctcgaagactgtgttgaagtccaaaaatatttatattttgggatggagggaatactacttttattttcaagagcaacacaagcagcctgacaatcaactcctagtagcatgcgaaatgcagaaagtctttgcacttattactttatcagcggcatactccctccgtactcgtaaacgaagtcgatttggacagcgacacggtctccaatatataactttgacttcttgtttctataaaaatatttatttaaaagtgatatatgtatacttttatgaaagtatttttcaagacaaatctattcatatgatttttacattttcaaattcaacaacttgagagttattcatgattttttttctaaggtttgacttaaacattatcctaaacgactttctttacaagtacgtaggaagtatctttcatgacatccaattcgggaaaatttataaaaaagatttaacatcaaaggtcatgttgtcagccaaatttattatttttctccttccccattctataaataatacgcacgcttcctaaactcctaaatgttatgtgtctgcaaaagaacttcaaatatattaatttattaagatattattttaaatccacttaccaactttatgatatttaatttgttcatttgtatcctctgataattattaaaagaaacaatcagctattcagtaattcaaccattcagcgcaaaagggggattttatgagacaatagattagtatcatgacaatgttgtaaaatatttttagaattttttgttgctataagattgatatctaggaagaaacatacccttatggtctttaacagtcacagtcacatattcacatatctttcttgcaagtgattttcaaggcaactcattggacaaggttttggtttttgtttcttaaagaagacgataaaatggaagttcaagtcaaatgaagttttctggataagagagtaatagagttcttttctacctttggttggaattttagtagaagaattgaggcttagactgatgttattcttttaactattttgttaaactattatttggtatccccatgtagtgggtggagtcttatgtacttttaattgcggtttaggctgtgtataactttctaaggtgtagaggcctggttaatataatccattataaaaaaaatcacctttcttttcagaaaacatttgtagtttgcattggtgcagttgagggtatattgctccgtatctctacttacgatggtttaaattctagcattttttttaacgactcgcacaaaacggtgcgaagttctattgatagagcaggaaatatatcctagcatctttaagtaagaaatttttgaggataatactttgtctctaatatgtaaagtgaacgttttcttatatgtgtggtgtatgaacacttgtatctccagtataattgaaacatgactttttttcctatgctttattttaaacttgtaacagttatcagctgtacaacacttggcaaatagtaagatgagctttcgtacatttaacggcttaattggcatcgtcaggtagggtgtccttttcaggactttcactttcggctctaatcatatattcatatatagatatgctcaagagttcgggtaggaactactaatcactcgtacttatcaaaggaccagctagcccccgaatctaaataactagcccgattgcaggactctcacgccatcccacatgctactacaaagacgacttgacgttactgcttaaaatgaagaaaaggttacagcaacttgattaccggaagtttctgaggcacaaggattagtgacgtaccagtgtatggttaagttatatggtgatccgttgatgacctcgacagcaactgcgtcaccttcattcacttctatcattgggcctggcagtaggccgttcaccgcaataatgtcagtgctgttgcatagccgactgactcgcatgctttccacctatgtgattgcaaacaaatgtggcatcagtcttatatacagacaaccgaactcttctcatactactactgaagaaattaaggaaaaaccaacaaattgtatacagtttcaggtttatgaattctcatgctttccacacacaagttgatcaataactctagcttgcaggtatagcaagtatctaagttcttgttgctgtacaaagcttcttgaaatcaatgacatgaacgaatacaactacatgtatgcagagagatgagatgatgatgatgatgatgatgatgatgatgatgatgatgagagagagagagagagagagagagggtacagtgaaagtgtagttcgcagttgcagcatctgccaccgatctggcaagaagaagcgcgaacaagaaccacaaaagccgcatcatggacgaacaccaaggtataaccatctaagaggattcaggagcgccagagaaggataggcaaatccttattggtgatcttggccaacttgtatatagcaaagtcttcagagaaacacgataagtatatatactatggaatgcttttggcacttccccgagaatcacttgcgtagggcaatggcacatttgtctatttttttctccgattgcgacataaagcttctagcgatatcacacgctcataatctaggtgttgctgacccctaattatttatgtggcctgataaaatgatagagaaagcaatgccactcgtcaattgctagcttgttcactgctatctttgattgcagtatcaaattcacggtctatcaacctgaacattgtcaattcctctttcttggctagcattaccgccacgtccacaaaaaatgccgttttcatcataatcaatcaggagttttactattggacacactaggtatatagttttctgacgaattatgaggccaacgtataagctaaacgtgtaacaggaaaaaactggctgagaaaacattagaactaatcccatgtctcaaagtgtccttatattactcccccatctggatcaataaaagcagctctcataatagctgaggtgtaccaaaagtaccctgaaccaagcattccttgtcagtggtttgaatatcggatcaggagaagctaattaggacaacaatctactcattagtctatcatgtcacggatttgggcccaagcaataatattctatacaaattctgcccaatgaattaagcaacgaattcttctgatatagtgaagtaatgcacaggatggatgcataaccggacaaacagcattctctagataaccaatacagcgtgcatatgttgataaagatgacacgaaaacggaaaatgacctgggatcatgtggtagttgatcatggaggtctatcttgacgagataacgttatgatgtttatacatacggctatacggtgtagagctcaggaaaaaaaaaacaaaacaacactcggagtctatcttgtggagaccttgttttccctttgcatgaatgccagggaacatccagaagtaccatctccgaataaacgattaagttctgaaggcatggacacgatggagacctctcacctaactgcaggatgtgcgcagggtcagcatggttgccagaagcccagaaccatgcggaaagcaaattgaatttgctcgtctgaaacatgcacgcagttcatcagatatgcagggagcgattgttttagcaaggggtatgcatgggtaattcagtgaattttgcttttgtgaaagaaatcaggagcacttccgaattccatggaagtgggaaatgatctgcaaaaagctttacatagatacaagatcacaaggcacaagctcttcagtgattcattatctaaaaaaatttcttcactgattgtgttcctaggaaaaatcacgtacatgaatttctgcttttcttgtgatttgttgttatttactctttgattctgacccctcttatttacatgttaacgtgcagaactgcagaatccaggaacgatcaaatatcaacacagaaaagaaggtaaaactctacggataaaatacacttgcaatcaatcggaatcgaattgtcgaaacaatgtatctcttcaaagattaccaagatgtgtatggaacttaattgtcatctccctgtcgtccgaagcattttacatcatgatggcagcccatctttcaccggatcgaagaaggccagaactgaactttcagagagcaaccttagcagctagtagctgccagctagcattgcggcaagtcggggggcggcggcggcagcgtcgtccccggcgtcggcccgctctccacctcgaacaccattgccaagccaatggcgaagtgagaatcgatatggcagtgcatggcccacattcctgcaagcagaaaaagtttccaactaatcagaacatgcgttctttactctgtttatccccttgcaaaccgcaacaagataagcttcttgacagtgcaaactatatcaagctgataagattcttgagatgacagaagcataatggttagtgacttagttggcttcttataaaaggagaagataaaccgtgagtccgtgattgcgtatcctacacaccatcagtacgtcagcgccgagcgcttcagcatcggaacttctggggaaatttaactatttgccacttttgggatatagcaattaacaatttgtcactcactatctatgacatgtagatctagtggcaaatcgttaagcacgccccgaagttccccgcaaaaaaaaaagccccgaagttctgaacgggccagattacttgacattatctatatttcggcctgacaagactgggctgaaaacggcccatataggcccaacataatatgcacggatgcaaaacagcccaaagcttcaactttgtgcgaactcaaaccggtgttggtctcttttaggcccaatttggaggggcccaaatcccaattaaactttacctgtttactgcagccgtaaacgttcatatacgaagttgattacagatgactactgtacctgggttatcggcgacgaagcggatgactgcccacccaccggtcggcacggcgacggtgttccgctcctgcgggttgacgaggttgaactcacctgctccagccgcttcgccgtcgttgttgccgaacccctgcgccaccacgaagaagttgaacccgtgcaggtgcatcgggtggctctcgagtcccaccagcgcggtgttctggagcaccatctccaccgtcgcgttgtacctgagcgtcttcaccttcgtcgacgggctccccgtggatgccagaggcgagttaccgagcaacccgcggctagtgtagtcgaacgcgacgggcggctggtcggggaagtccctggtgtacacgccgtccgccgtgttccggtacagcgcctcaagcatggagacggtgttcgggagagcgaatgacacgttgttcatgttcgccaagaccaccggggcgctcctgttgcactgcgtctgttcgggctggcaggaggagaagccgagcccgacggtgacgagcatgcgggtgtccacggtgagcggcacggtccgcctgccggggcggatgagcgccgtcaagctggtgtagaactggttagccgtgtacgtgtcgttcggttttggcatgacgggtagcacaggggagccagcatcggtcgttgccgtcgcgtcgacgtactccacgatggctgtgctggtgttgccattgaaccccgcgggacgcggcgggaaggggatcgcgctctggtaggaggagatcgccatgtggtagcagccgggggaggcgtcggccgccatgagcgcgtcgacggtctgccccggcgcgatcacgatcacgtcggtcgcgtacggctccgtgtagctcgcgtccgccgcgacgacggtgaacgtgtgccccgccaccttgaagaagaacgccgtgttgagcgcagcgttgatgatccggagcaagtaggtcttgtcgcggcgcacctcgaacttggcaattcctgcacaagaacgtacttgattgttgcagaacataatcgtcacacatatgcgcgcgtgatactaactcgaacgtacggttagtcgtctctggacagaggtacgaatctcccggcattccgttgatggtgtacgcgtcggcgttcggcgccggtatgccggtcgagaaggactggctctccagggcgacggggtcgccgttccaccactcccccagcaagacggtcttctcctcgtatggcgtcgggaacgggtagccaccggcgcgcctcggccggatgacgagggcgccgtacaccgtggctcgcatgtacgagctgtgcgcgtgccaccacagggtgccctcctgcccggccacggcgaacctgtacgtgtaccggtggcccggccggatggggcactgcgtcaccatcgccggcccgtccgcccacggcgtgccgcgctggaacacgccatgcctgcacgtacgcaccgttcgccgcgccgtttgttagtttgtcacacatcgggcggcgaggagtaggtgagatacatgtaccagtggactgtcacgttgtatggcgagtcgttgatgacgtgaatcaccacggtgtcgccttcgcgggcttcgacttggggaccgggcactcgtccgtttacggcggtgacgctcgtattccctggctgacatatacggggaagagatagtgtagcgacctgacaaaaatcatatagaaacaatatcatgagcatgactgttaagactggggtttagtaccataggcaagacttgagaattgacagagaaataatgggtttctagtgtgtggtacgagaatattagatatgaggtggcaagctgccaagctgacaattttcttggacgctcgcatacaaccgcgctacccgcttgtcgagaaagtttaaatcttctctctcatttaggacatattcgagcaaacttttgaaattgtgatcatcaactttgaattagaaagtttaaaccacgtaaagtcgttatattttgggacggaattatagtaagtttgtgctatctttgtagtacttttcaaggtaaactccacattttttacaactaagcattttagaagatattgattgtaaaagttttgaaagtttaattaaatctaattttaaacataaaatattattgatcagaggtagtaatcatggttccccttaccgtttttggcgcagttactgcactcccgcggtaaggcggttaccgcgtgaaaaccgcgtgataatcgcgagacataccgtggtttcaaaaactgaaaaggttaccgtgcatggtaaccgcacggttttaaaaaccctggtagtaataaatattagttgtagaaattttgttttggcaacttgtggtgtgatgtcatctactagctgttactccctccgtctcaaaatataataacttttagctctcaggatttgtcccaaaatataacaacttctccactaacattcttttcctaactaatcacaaccctccatcattcattttccccacctaccttcactactcattcaatcacaaccctccaccactcacttctacttactttcttaataactgtttccaaccctaaaacttcttcttacattctgggactgagggagtacaaaatatcagatgttattgaaaaatgtatcttaatattaaaaaagatgctagaaaaataattccaaaatatataaaaaaggaaaatatgatcacttaaacttatcacttgtctttgttgcttctccttgatacattacttgattaaatattttttccatatatttgttattaaaccgactataaaacaattacacgttcgtgacgttccttggttgtgcaaactttctcctttttttcccgactacatagaagatacacacgtcactacactaagtatgtacatgagtacatgacatgcacacacttgtgagtgcacctgctaacacaagctctgagggatggatgccaactacaaacccttatacgtattaaattcctattaaaaatatactcgtgtgtgtaatagttttcatggcactatttttttgttgtgcaaaggacaaatgaacaattcaatgcggattttgtttgtagagagagagagagaatgattacattgaaggtatgctccacgacgtcagcttgggccgcggatgcaacaaaagccagaatagcgaacactgggatcatccaagaacacgacatgccgtatgtttgattccaaggccaaagctagctagcaactctcaatgatatggtgaacagaaaaattgatctggaccttactcaaaatctgaaaaaaggacttttttttttttttggggggggggggaccagaaataacacttaccagcagtgattgtcgaagttaaggggatgacaaaatgcagccggaatgccgctatatatatagctgcccgatgcccctggttgacttgatcaatcaagtattggggtgaataatgctgacttgcgtgtcattttgttagttcaactgcaacttgttgaatccttctcatggaacatgaagtttatggatgcttattgcagagtacttcctatttattatcagttagaacggtttcccaagtcaaggctcagatatagactgactcatattgtttacttttcactgatcaaaatttaaaaagaaaaggtttaaaagtataacttatgtgttttagttatggctttaacaactaactaggatcatacatatccaaatgatgaccatagcattatatttttacaatttctatcaactactctgctaacaacttcctagacatggacctgggcttattgtaacgactgataccttgtttgctgagagtagaataactcaaaacaaaaggaattttcaatgattgatggctggccatatatcaaggtctccagcgtacctttactagaaactaggaatagcttgtatgcttgggcatctgattcaagttctatctagaagaacttctttttagagcgactttttaatttttatccatactacatttcttctgtactcatcacgacttatattttattttaattgaacagtatttactaaccttacagtggaagttacagttttgctttcaaggaggaacccacttcgaagttcaaaagaggactactaattgacatgcgaaatagacaaaacaaaacaagacaaagtttattgaaaatttatatatttatgcagtgattgctactacccttgaaactttacagctagtacgtgatgttgagagaatacaagacatttctacagaataccaactacagagtctgatttctaaccccttgccgactggtcaagactaggtgaagcaaccattcagccacctagtggatttttcctatatgctgtaaatatttatcaaataatatttgcacgcgttcagtttaaacaagcaccaggagctcatttgtgttcgctgtcacttgcaagttgcagagctagtttgagctagactagagtctcgacttgaattctcttcagaagtttcttcaggaatttatataagcaatttttgcatgagacatttacaaacaatgtattgtttttattttttttcttttaactctgtatgtattgttgattactactccctccgttcaggttataagacgttttgactttagtcaaagtcaaactgctttaagtttgatcaagtttgtagaaaaaagtagtaacattttcaacccaagacaaatttattatgaaaatatattcaattattgatttgataaaactaatttaatattataaatattactatatttgtctataaacttagtcaaacttgaaacaatttaattttgaccaaagtcaaaatgttttataacttgaaatggagagagtacttcacatgatttattctttatcgtaatcttatttttattcttttaagataacaattcggtctttactttagagaagctttagtcacctattacaatgttttagtctagacaactccaagttatatatagcagacaaccgacaggatagcaaaaggacacaccaccatataaacagagatattacaatctccatatatattttttttagagaatggtattttttacccggcctctacatccaatcggatatatacggccattgaagtagggaacttagccccgcaaacaacccaatctgaaattcgctccataagagatttgaaccaaacaacccaatctgaaattcgctccataagagatttgaactcaggaccttggggtactactcaggtcactgtaaccactaggctaaatctctatatatggttggcaaatatctctatgatcgtttctctaagctttgacatgcttgttgcataaacttcttgtcattgtcacacctttttagcataactcaatatcgaagccaacgaatttttttgagaattaatattatttttatggaaaatcgcaaaagtagtggtcaaccggggaaaatcgcgaaaataggtccctgtcgaacgggtgcagttcgatagggcgcctatcgaacggccagagcgcgactggcgacgagatcggaaggctgccgttcaacaggacctgtcgaacagcccccgttcgacaggcagggctgtcgaacagcccccgttcgacaggctgggctgtcgaactgccgcagttcgacaggatgtccgtcgaactgccgcagttcgacagggtcgcgttctccatttatttgtaataagttatttttttaataatatgtaatttattttagtgtgtaagaaaggaaaatatttttgtaatgttatatgtatgtgatttagggttttgataatgtttggtcagaaattgtagtatttatttgttggttaaaatatttgaattatttagtttcattatttgtatatttgaatgataatttgtcatgattcattcgaagggtatgctactgagtaattatccgaagaagtttatgaaatagtactgatagtactaagttaatcgtaaagtgtttctcaaatagtacggacagaacataaatgactaaaagtttaatacaaatagataagtcaaggacgataagtgcccttcgcacgcttgctaggtcctcccttcttcctacgcctaatctgctcagtgggatatgtcaaattatcaggggggtgcctatctctagctgcctgctgtggtgtcacgtctggcccctgaccggcctccgtctcctgcgtcggctgtgtgacctgaggtgctgcgtgccagtaatccatccctacttccccctggggaggatcagtggaaaagaagtcctcaatgaatgctgtgcgaggggagtaagcaggcactccgtgatgcgtcgacgccgaaccatactcatcgtctgtttgtacaagagggagaaaccaaaaaatatggcgtagttagtaacgatacatataattagaaactaaagcgtgttattgtttaaaatgacttacatgtgtgctgtgtgtggccctgctctggcgcacgcggagtgatatgaagtccccatgctggtgtgttcaacacgttgtcccccgttggcatgtaagggaagtgtgccgacccagatgctccctgcgaggggtgaacataaggcggagtttggaatacctgcggacgtggtggtgccgtgctcgacgtgggtacccctgatccggctgaccccctggtgtactccggtgctggggtgtgctgaaaggaaggacgaccgtgagatgtgtgggctgcttcgtacccgcgacgtgaagaggatggaccactccgatccacgctggaacgtcggggtagtggtggtgatggccgtcggcccgacgtttgcaccacatctgccgcgctccgacaggagacacgacgtagtagtgcggcagcacgtgcacggaagttgcgaaggacactcgccacgtcgtcagacctgacgactggaggtctcgcctctagtctttgcagcagggtgtcggactccacgtgaacgtgctcaacaaattccgcctgttccacaaataatcaaggcaattaaaattatttaaccagttgcacatttattaagagtatttaacaagatgcacatttgttagaaataatgaactagttgcacatcatttataaatactgaactagttccacatttatgtaagaaaaggaactaggtgaaccaattgcacatttattagacatactgaactacttgctaactttttaaaaatattgaactagttgctcaaattccacaaataaacacgtaccattgagttgtaagctgatctaggctgaggggcaaacgtgtcagtaatcgctgcctggtgggggacggtgctatctccttgtggaggaaaacacctccatcgtgtaacactgcggtaccaacgaaggtaagctccataataactcccatcgtctggaggtgtctgaagtgccaagttatcagctgcgtgctcccactcttgtaccgtcgggtttgctgaggttcagactagccatggaataccttttacagagatacttctgtgtacccctcgtgatgccctccaggatagcaacaagtggtagaggtcgtgtattcttcataacccaattatacacttcagcaagatttgttgtcatcacaccatacctcgatccatctgtatcgtacaacaacgaccatttctcccttggctcaaattctacccactccgtgaagcacttcgtggcccgtccacgtttcctgcgccgagtaatacttggtgcttcattaggaatgggttcaagtccctccggctcctcctgtctggcaactatgggttttttcctaacctcttccatgtgtatagtggtcaaacgatccagttgctcccatatggcatcaaactttctttgttgattctgcttgcataacttcttgaacaggtccatcaatctcttactcctgaattgtctataaaaattagccccaaaatgtcgcatgcaccatctgctatgtaaatctggccatggcacggactgtgtgacatcttcttgaagcttctgtatcgctgatagcaaaccggcgtgtcggtcatgcagaacacacacattttgtctgttttcaacaacacacattttaatgtgccgcaaaaaccatagccagcttgatgtgttctcgctttcaacaaatgcaaaagcaacaggaacgacatggctatccgcgtcgactccgatcgcggttagaattgttcctctgtacttgcctgtcatgaaagtgccatcaacacagagcaaaggaatgcaatttttaaaggcctctatcatgcacccaaatgaccagaaagcccgacgaagaacattctccccatattcattcacctcatcgagaatagccatgtgtgtgcccgggtttcttgcctgcatcacctccaatagtgggggaagattgtgataagaatcctcataagttccaaacctcatctccaatgctttctgttttgccctccaagccttgtcgtacgatatctcatatccgtactctttctcaacgtcatgcattatggtgaaaggggacaaagatgtttttctaaccacctttgaatataccatttgtgccacaaatgccgctgtcaggtttctgtgcaccagatgggtattctccaacaaacacgtatgttgctcaaccctcgaagctacccataaagtgtcatgttgtggcttgtaaccatgcactctccaaggacatccaccctgtatgcacttcacgtcatacgtcgtcctatttgaaaccttcaccctgaactcacgcttctggacaaatgcccacctcttcaccgcatcttgtaagtgacctttgtcatgaaacatctgtccaactttcacctgcttactatcataacaccagtgggcatctaaaccatcgtttaccttcatacgactcattgatatggtcgtccaattatcgggtatgtaagtttcgttgtcccacagtgttgtatcttctccttccactacaagcgcaatgtattcctcgttttccacttccatctgatccactaccgcctcattctcctccgctgcatcaacacgcataggcgaatccggttcttcatcgtccgagtcgttggcctcacgattagtaccacaaacaatgacctctccttgtgtattaccctctactacttcttcccctcgaccttgctcagtccgccaaacattttcagcttgtccaccttccaacggagtttcttccaccacggcatgacttgactcccccgatcgatcaacacattttgtcttctgcaccactattgccaggctatagcctttctcccttactttactaacaaacttcctccaactcccagttgacgcaacctccactactctccactgccatccatgttgacccctcactggccacacggcatttatgacaaatttatcgtgcactggatctaccccaaacatattatacaaccaccctaacacgtcgttcaaacccatatgctccggtgcattcagactagtatcatggaaggcatatacagtcaaatccaccccgctatcacatatttgtataggagcatcgccataatacagacgaatgggcatatcacctgacatcctgataaaacatgataaatagtctcacgtttaatcatttaatcattcgataattaccctattacaacttatactacattgccgtgtactaatttacaactattagtaacaaacaactagtttaataatccaaataaaatataacacctttgtacatattttaacacacaacatatcaataatatgtactaactaagaactaatttaaccgtacaattacttaaatacctctaccaacatttagcaataacaaatatgtgctaaccatacatactaacatcgaacaatgcgaaacaattaacaactcttaaaccaattttttattaaactttcatatgcattgtacttagggattactaatgtataccttaacttcactgctggagggcgtcgccaaccctttcctcccggccggcgcctcctctccggcctgctatcccctcccctcgctccctccggcgctcacggcgacgatgtggcgactctcgacggcggctggcgatgtggtcctcaaataaatcgaacaagcatcgcgggctggggagacggggctttaaaccggcctgtcgaacgcccattgttcgacagggtcggtggagggacctgtcgaacgcccccggttcgacaggcctggcggcgcggggtggtgggccctgtcgaactccctccgttcgacaggcgagcgtgtcgaacgccagccgttcgacagggctctgtcgactgtccgtcgttcgataggtgccctatcgaattgcacccgttcgacagggacctactttcgcgattttccccggttggccactacttttgcgattttccataaaaataatattaatcctcaaaaaaattcgaagccaacaagttgttatcaggaaatccatttcatcaagtacttgtgatcaggaaatccatttccagcatgaatgcatatttgcataactctgtagtatcattttttgtccagacaggaatatacatatagcgcaaaagattgtaggaaccaaatcgttgctcactccttcgttattgtttttgtattagtcacagatgagaccaacaaggcacacaaagaaaatacaccacttgcatgttgtctactgcgtctaattttactccacttgacagtgaaaacaatagttttgattgtgaatgtctggttgtacatggacaaattgatctggggaacaaacaagagcgtgggatgggcagagtgacggtgaaacatgcagttttattcgcctagctagtttagtcaggttactattgtcaagatttggtacaggaaagcaacggcgccatgcagccatcacctcacgcacgtatacctgcccaagtctttacataccgagtagattcacctatttgctgtcccggccggtgtgtcagtgtgtggcaaagaacaacactactatttgctacgaacatctttatcaacccagccatatgtataggccatatgccaattttttcttttttgggggacaagttgatccaacaacggcttgaaaacgatttcttttaattttgagggaggaaacggtttcttatttttctgagagttgaaaaatgaaaaacgcccacgctacatgaatgggagaagtagtcaacactagaatcaaatatgttcatactattttttaactgaacagccatagtttaacattaacccaaaatatagcttcacacgctgtagtacaccaaatagtcatgaggtttggtttatatcggatagataaaacataaaaaatatataaataaatataaacaacactaaacaagatcatggaagatgcaatactttaaatgatcatcaagtgcaatatacgaattggctgtgtgcatccgtctcaggatgtagaggccggttctcccattatcttaaaaaaaaaatgcaatatacaaaagattattccgatgattaaaaaagcatatgattaattgttaaagaaacaaaaatattcctcatttttttctaattaagatgcaaattttaccttggtttttgtcactcccttcatttcaggttataagacgttttaactttggtcaaagtcaaactgctttaagtttgaccaggtttgtagaaaaaagtaataacatttttaatccaagacaaatttattatgaaaatatattcaattattgatttgatgccactaattcagtattctaaatattattatatttgtttataaatttagtcaaacttaaaataatttatctttgaccaaagtcaaaacgtcttacaacccgaaacagagggagtagtatgcttttcaaaccgctaaatggtacatttcatgcaaaaattttctatatataagctgctttaaaatatcatataaatctatttcaaatttaaaataattgtacttaatttttcatattcatcaaattaaatggctggtaccgtggtacgccgttttccacaacgctgcaaatctgcaatggattgcctgagacctcgtttggatgggctgaaatcctggtccatctaaagggacctcgatgggctccaaaaagcccatttaataatcgaagggccgagaggcccacgcgaagatgactgacaatatgggacccggaagtcagtcaacggaggatagaaaatgaaagggcacgtctccggaacactcgccacaacgaacgaactagcaccaaccccacagcaccagccaccaccatgtcgtccgaaaccgccgcttcgccgccgccgccgccgccgaatccaccggccgccgactccacccattccagccccgcctccatgaccgacgagacgcacggcgcaggagcccatcccgacgagtcccaaccgcatcgctcctcatcgtcgtcctcctcccctcccgtggccgtcgacggcgagacgcgcgtcccactcccagtccggtccctgccccaacctagccacccatcgccgcctccttcgggggaggacgaggatgacgtcgtcatcaccggccaaatcgcagtgggtgacgccgcgggggcggcgatggaggagcgggtgaaggggccctggtcctcggatgaggacacgctgctgagcaatctggtggagaaactcgggccgaggaactggacgctgatagcgcgcgggatacccgggcgctccggcaagtcctgccgcctccgctggtgtaaccaactcgacccccaagtcaagcgcaagcccttcactggtacaatctgcctttcatccagtagtatctgtatcctataggatacgtgatgttaaccttaatccaaagagtatttgtcttgtctatgaggcaatgctagtttggttgtagcattatgggcatgaacattgcgcgttcagtctgttgtgtagtttcgttgcatctctgtaaaacttgcttgttaaattattattgctgtttctgcagaggaggaagaccgcattataatggctgctcatgcaatccatggaaacaagtgggcggctattgcaaagcttttggttgggagaaccgataatgcaatcaagaatcactggaactctaccctgaggcgtcggcactgcactggtggccgatgcacacaaggtggtgttatgaagagagctattccggagaggcctaggtcggtttcagaagaaccttggccattgggcaatcttagttccttaaatgttagggaagcaatggaagctcccgcacaaacagtatctgaaagttatgttggggcatggcaaatcggggatcagagttgcaaaactgaagttgttgatccaccttatcttgcccgaccagttgcaaaggttggtgcattcaaaccatacaatgtaggacctgctcaatcatcacaaaaggaaatgctgagctttgccaccaagtttgactcaaaccttcatcctttcaagcctgaaaatggggtctgcaagtttgttgatcctacaagttttgctgctgaggtgccaaataaatgtgggcatggctgctgcagttctcatgggcaacttcgtaagaactcattgctgggtcccgagtttaatgagtttgaagatcatccaccaatttcagatagtagttttgcttcgttggtgtcagaaattagcagcattgcctggatgaaaagtggtttgcaaagcagtgacaccttagcgcggtctgttccaccagcttaacagattaggataatgtaaattagtgagatgaaacttttggagtcaatttttatatattaaggtgtaatcaagtcaaatcatggttattgttgtatttttggtagatggacatgcatgtagtacttgcagttcttaccatattttatttcaggtgctcagtacccaactaggtgaagcatggaggttctgcttaggcattgggacaagcctacctcaaaaatggaattttagaaaaacttactaggcaatcctgatcgtaatttaatgatatttttagttccatgtctgaatactaaattttataaatagaacaagccctcagctatgagaagtgaatattataattgtcatttgttgttaaatattaattgtcaaataatgactctctctctccccccttttaatgactcatgaaattagtattatttgatgttatagttattgacttgtgccacagttttttttaataacatcaggaatcaagatcttctgataatggaataatctaatatatgagaatttttgtttactagggaacatgtgggatctgtctatgtgctatgtctggcataaataaagtcaactgataaattaaaatacattagcaatagaacagtgctatcatacaaaattgtgatgacaaccgattaagtgcagagaattaaaatttgaaaaaagaaacattaggttactctcttggatttgcgcaaatgtttatttccaactatgatccttgaaagttgagatttaattttgttacattttgttgcatatgcatgactattccttaggcagaataaaccgtttagtgtaattatgcgattcggtttagtgtactatgaagactcaacttttctcaagctaatttcgaatcagggtttcttaatgatggtggttttcatgatttaggggtgattcatatatttgagttcaatgctgataatagcatctaatactataatggtaagtcgtaaatatgctgcgcaaaattgagggttaattcctttcctgtctgtgagaacaagtaggatttcctcccttttcccgagagcttttaaccatgcatcaccagactattatataattgaaatggaataagtatcttcacttaaaattcgtttattatctactacctgctatcatatatttatttatttatttatttgcagtagtgctttagaaatgatgtagtgttctatctttcgctttgcttaaaatgagtggtctttccttttcttggaagtatacaaaaccaaaataatggtgtagctgaaattgtagtttcatgcctctagtggttcaccagttatccatgtttcttaaagatcaggtttcgtcaagtgttactgcgtttgaattgcggaggactatcaggttatatgctttttcctctatgcagttatcagttatacgaagttatagatgagtatgtttttggttatcgatttgtgaactgtgataattgactagaagatagtacaatcacaatatcacaatagacacaaagctggtcaggcttgctttcatgggtttgtacattctgctttgcacttattaggatagagaccagcatttactatcccgctttttttcctttcaaattttcatttgggaccaggtattgccctagtctgttcaatgtcttccataattgctgaggtcttgtgctgttacttttttttttatcagtgaccaattcatatctctgggaagatgaatgctggcacattcatgaggagttaaaatattgaacactgccagaattgccaaggtttgatctatcttctgcgatcatctcccgtcttccttctagtagtccattagtccatctacttaccagttaccactgctcgctttccttttgagggatgacaaatagtttcattttttattgttaattatatctcttgttgttcaagaaattttcattagtatgattatgatatatttgcaaatacatccatgatatgacctgggttgtaaatcctttcgttttgtggacctgccccactgttatttgtatttatgatgttgctgtaactttatatgccacactcttgatctagacacatctagtttacaaaggcagataaagatcagattgtacaggctcctcaggtgatctagacacatctagtttacaaaggcagataaagatcagattgtacaggctcctcaggtgttcttgcctgtaatttctgtggatttactacgaatttgctggacgaaataactcttttgttttcttgaggttccataggcaatatttagacactaaagggtagtttcagagagatagaccatgcaaaattgcaaagcctaatttatgtagtatactgcatggattatggtctacttgtctgttgctttgttgatgccagagtgggactgtgggagaatttgcacctaatcccttatcatgcccatcttcgctttaaccggtgagaaatatcgatgtgtgtacaggctatacaatcttttggaagatgaaagctgaagcagcctgttgctttgtcatcgactggtaggcccgggggacctgtctcaaattataggatatgcatcctgtcatgctgatataaagattctgtatttcatgggaccggctatggatgtgatttggaaataactgggtgcatcgaaaatttctgcacaattcatcaggaaatggatacagggtgctgcttagactggtttcatggttttgctgggtagttggattagtattttaccttcccagccgagatggtttagatctccctggattcctgcactccttgcatgtgttagttcagaggtagcatcagcaagtataatttattggatttttgggcgatcgtggggcttcattcttcactcggtgtcagtgcccatcatcttcaatccagttggattgttctggtttttgctacgagtgatgatttgctaatcgtgtactgatttttctccaacagaagtgtctatagggttttggctgatcttgctcgtagaatcttctgctgttaagttgcgatatgtatagttgggttgaattgtggacttgtggtgctgcgcatggccgaaggcacttccagttccagccttttgataacacgaatcttgcagtgtgtcagttcagttcctctcctttgttctttgttctgtcccatataaggatggttttgtaagcttaataataaactagtatggtgtatggtggcccgcgcagattacgcggctagcatcattatattttctctcgtataatagcatatatgttttcttattatattattcaaatatattaaaatgacatcataattttaaattttgcaataactttacgaaactacaaatgtgtaatattcacactgtattttatatacgtgttagttattaattatttttaatatcaaattttagttatttgtaaattatatatattcctgtatgtactctagactcgttttttaatattttttttaattccaaattttaatatttttaattccgaattttctgtaaattgtatttctatatagactctatactcttcttccaatattatttattttgatttctgaatttttattatttctaattgtatttatatgtggactctaaactcatctctcaatattcttaaatttttaatttcgaatttcagttacttctaaattgtattcctatattgactttaaactcttcttcccatgtttttcttaattttgaattttagttatttgtaaattgtatttttatacggactcaaaactctacttttaattttattatgtttattctgaattttagttagttttaaatttctatatggactctacactctacttctaatattccttattttttaattccgaatttctattttttttcttaattgtatttctatatggactctataatctacttctaatatttcttatttttaattcctaatttctattatttcataattgtatttctatatggactctatactctacttctaatattccttgtttttaattccgaatttcagttatttcctaattgtatttctatatggactctagtctcctcttctaatatttcttattttttaatttcgaattttcactatttctaaattgtatttctatatggactctagtctcctcttctaatatttcttattttttaattccgaattttagctatttctaaattgtatttctatatggactctgttttttctttttctccgattaatgtgagaatttctagaccatgagagcgaacgtggaggctcttttttctattcctttaataatataatagatagatagatggatccaaaccggagacgactttgttctccaccagaaaccaacaaagatcgccgaaactatttttgtctcaccatcggcactactcctacccagctagtagtcagctgtcggctgtagatagactcctgaggccctgtttagttctaattttttttttcaaaaaatatcatatcgaatctttggacagctaaaaccctatagatacttttaattagtctatgattagccataagtctatgattagccataagtgctacagtaacccacatgtgctaatggcggattaattaagcttaaaagattcgtctcgcggtttccatgcgagttatgaaattagttttttcattcgtgtccgaaaacccttttcgacatccggtcaaacgtccgatgtgacacccaaaaattttcatttcgtgatctaaacatgcccggatgtaagcctgtttgcacgcacagttccttccctattttgataggtacagttgaccatcatgaaacttccaggactcttctggctagcttcatatggtggtgggctagacgatttgagttcgaagcctcaccttttctaattatttgatattaggtcattccttagtattcgcgtcttttaggtaggtacagttgatcatcggtcaaacatcaagcagtgtatctatcttactctctgtcctaaaataaatcaacttagattatgatgtgatataatctactataataaatatatatgtcctaaataaaattaacttagattgtgatgccatataacctactacaatatatttaaatagaggttatcttattttgtgctaggtcgatttatagatggttcgtacacaccgtccgccgctagaaaataaacagaggacaatttttctttctcctagctactcccagcattcagaatctttttttgctgttggaatcacgcgaaagatggataaatatacaggagggatagccgaggatatcggcggtgcccatatccagtgcatctgatcggcggcgagatgcacgagagtgtgatggcgagcgctgtgaatcactgtgaggactgaggagagctgaaaagcatagtgcgggcggcgaaaagaggaggattcgggcggcgccgcgacagaaatatctcgttgtgtatatctcaacttctgaagacggaaggtggcggtgcccaagtgccaccggttaattagctgctgcttcactgaaagctccgtttcgaatccaggtgacgggcgccatcgaccaatgatttgtgactagattctcaaaaaataaaaaagatttgcgactagattcaggtaaagttgagtgagtgaaaggccggcctccttatttggcttattcgagaaataaatgaaacggtatatttacaaccgaaaaataatttataaataaaagttttatatacgtactcttagcgatctaaaaataaaggcagaaaaataaattttagtgaaaaaatttcaaaaatcaactttaaatttgagtgaaaatttaaattttggtcctaagtataagtataaatgaaaagatggtattcgtttccctaaaatatggccttcggtggtatccacgtagagctttacgttaactctgcttaatgattagagtaagattaaaaggtgatagcgttgtcaaccataaaaattctaggcaaaacaggtgtcgaacgggatcaaattcacagttggcgcgggggctgtgtacaccaacacgagatttttcgtgaagcaaaaactcgtggatggtcaatttcttctctcccatcacatgacacggtcttctctacttcattgctgacccaagagaccgtctcatatgcttcatttcttctcctcttctcttccccttcgtccccgacaaagcaccacaactccgcaagttttctcttttcttttttccccttctctctttcgcctactccttgttcaatcgattcttcccagctacgcgactcttcctcgctttctcgcttctctctctgcgccactgtggatcaagaaacagctttaaaatccaatcttttttaggcacctgatgcctcgtcggtagcagtatattttcaattcgttatttttttagagcttagaatctactggcagcttggatttttcttgggtggttgctcccagtgatcggccgcattgcttgcgtggtggcacaccgtcagctttggagtaacctgtaactgcaagagtgagtatttagtgctcgctttcggcgattcttgtttgcttgctcccttctctgctcttgtccggatttggtatagaagcaatttcgagtgattcttttcctttttttctcgaattgctttttttttttggtaggtttgtttggcgtgagcaatggtgaacgacggcgagcaggcgttgacgatcgctcccgccgccgccgcggattctagcgcggagccggcccgccacgtcggcggcggcggaggaggaggaggcgggcttgcggaggagagctcggatgaggataaggggagccagcgcttctccgacgcggaggaccactcatggcggtcgcactcgcgccagggctccgttgccctcgaggacttcatctcgacgtgcgcgtccgtccgctccggcgccggggacgcggacgcggacggcggcggcaggaggaagtcgtgcgtgtcggagtgctcgctgggcgacgtggacctcgaggccgggctggccgagatcagcaaggccagcccggacacggccgagaggaattgccgcatctgccacctcggcctcgagagcgccgccgccgagtccggctccggcatgttcctcggctgctcctgcaaggacgacctctcctgcgcccataagcagtgcgccgagacctggttcaagatcaggggaaacaggtaatatctctcagctgctgctaattccacacttcacttctgatgatttaatctgctaatactatgcacaaactcgaatgaaaatatttggctactgtaactggatggatcttttagtacgaaatgttccttgtttttgctttatttaggtagggatatgaaggatagagtgtgatgtgagaggtaagggcaaagtggagtatgattaaccagtaggatctaggaaaagcttaggaaccccaacatggtgtagaacatttcagatggaggataaagttagattcctttcggtctgctttttcttgcagattcttgtgtaactctcatgatctccgaaagtggaagcgctgacccttttcttggcatgccttcgttgtggtgatctagactctatagggagtgctatggtgtcacattcctaaaagaatgtacttagatacttctacacgaacattatggccaatagtagttaagttacctgacggtcatttcattaagagatcacgagctatgtttatctgacatcgaattccaaggaactagactattagaattctcactggtatacatactaattaatcttaactattaaaaaaatgaagtgagaaaaaaagaagaagatggagggtcctcatacaagaatatatgagtaagatatagtaagctgaagattgtttcttatcctatccttgctcttcaaatcatttgatgagcatgtaccatgtagaaccaatatgaatggaaaataaatttgcatcaagctatcatctttaagcaattaaatgattggtgtttttcagtacaacattcacaagagaaatataacagatagtcccttgaggcaagcatccagatggatgggctattttctccctatacatatgttcactgttttactaacaccagtatttcctttattatgcattttatagttatagttactttttttagatagtgaaaatgttttacatccctagcctctagttactatgggatgactgttggtaaatgctaggaccagagctctgaattaaggtgtatttcacagccttttgtgtattactgttgcttaaatggaagggaatataatattgaaagtgggaacctgtttttgtgctagtatatcgtaccaacatagttacttgggttttatcacctcaattgaggtgaggattagagtcaggataagataaatacatgcttgatatttctgaccaaattacaagcatctgtgctattgatcagtgttgagatgtaactgcacttgtgcccttccacttcatgttgtgctttgatagtggttcaagtgaaatattaattgttaaagcattcataatgttgttactctctttgtattgtagaggcataaaagaatgtgttagcattattctccttatgatctgtaatataactacataagcataactccattttctgcttttgcaattggaatctagaaaattaaaatgctccatgttcctttacttgtcttaggatctgcgaaatctgtggctcaactgcatgcaatgtggtaggtatcggtgatgccgagttcatcgagcagtggaatgaatcaagtaacaccgcggcttcgcaaatgcctgccagtgaacctcggaggttttggcaaggccaccggtttctcaacttccttcttgcttgcatggtgtttgcttttgttatatcttggctctttcacttcaatgtccctggatgagttttccaaaagaaaatgtcgtaataaaatcttcaaagccattgttacaagtaaatactagcccagcatcaggaaatccaaaaggatgctgagctgaactgaaaatttgatgaagagggcgttggttaacagtaaggttgatgttagttttgtagaaagtttatggcataacatccaagaaagaagtcactgtgtgaagagttggtcacggtgagcaactgtgaattatgttgatcatcagatcatcggtggtggaattgaaagcagagaaaagaaatatctcatgcttcgttaacattagaatggtttgaacaagtttttgttatgtgcatacacatattctgtgtgttatctgtgtattacatttttgtcacaattcgagcggtacgggccagtttggtttgaggcctaaattaggcttgccaattttttggcaacctcaacaataattgtgtatgtttggattgaagccaaattttggcatgcctatataacataggccatttcaatagctaaattagtttaatttggcttcaatccaaacacatgttggccttaccaaaaattggcatgccaaaacttgcgtgtccatgcacttggccgtctggtcagctatcctgatctcttacccgcccggatcaatctgggtggttcaaatatataaagcacatccctggatttaatatccaccatgttaaatctgaagtttataagtcaaattaggaacaaaatagtttatctaaatgttattaatataattgtggatttagatttatggagctaagaatagctcattcgaagaaatcttggacttggagctatttcaaacaggtaatagcatgcaactgagatatgttgattgcagaacgatacgagataagcttgcttagaatacaactattcacatgagttttttggacgaaaggcgtcatgttaactacagccacttgacgaatttggtttgcccaaggaaggcacggagaagtggagaacccaggagaaatcagttcgaagattttttggggacagaagattttatactagtttaaatgaccaagatttgtgttggagtaaccgcagcggtcagcacgttggttggggtgcaggagagtaacgtgcaggtcgcaggaattctgggaggacgacgcaatcagccgagcaacatacaggaatgcagtcgactcaattgttggcgccttctgtaaaacgtaatgacagattctcaaatccatatgtctgctaacatgaactcctagttagggccccattttaaacgtagtagaaaattctccctattccaaccgaaattgaatttgtgaaacggctataagatcctacgattttattatgttctaaacaggggattgctgtgctatccctacaatcattcaaggtgtatgcagagacattgccattgccagcgatagcagagacatcagtctgctcagagcaagtttaatggtatagccagctattggctccaaatcatctatagtcaatttaatagccaattcatataatagttagagcaagttttgtaataggagtggttgccacatctaattttatccatgtaagatcagaggtgatatatacaatacatcacacctacactacctctagcatactaacccaaatgattttattttatttgtatgccatatccactctttctttcatcttttttttaggtttgtgtggaggttacatgacgggtgcctcattttctatttcctcacttatttcttccacctcatcatccaatcttatgcggcatgtttagggggggggggggggtggtggcaacacatctagctgtagcgcccgttccgtcgtggcgcctagcgggaaaatgtaattcctaaaaaccctaatttcgaaatctgtttccttgcttattgtctagtgtccgtgccaattccggatctcaaatccccgatcgatcgtcaagttcaatcccgaatccaaatccttcccaaatcaaatccctccgcaaaagtctatttcgcctccctcaggttcgatgggccgaattcctctcggcccatctccctctccctccccatccctctctctctctctctctccctctccccctgctctgcccgtgcgctgcgcccgcgtgcgcgtgagccgcgccgagtcgagcgcccttcgccctcgctgccgtttcctgtcgacgccgcccaaatcgccgcgccgcccgttgcttcccgcgcgcgcgcgcgccatggtggccgaccggccagtcgccgccgccgtcagcgcctgcccgcgcctgccgcccgtgccgttgctccgctccaaaccgcccggccgtcatcgccgtcgtcatcgacttggccccgcctctcctcgcgcgtgcttccaagggacggaggcagagcttccccccctctgccgcatcggcgtctctccctcttccttttcccccaaagtggcaagggggcaaccccctttctctccaccccccttttcccttttcccttttccctcccgccggcgtcatcctcccccccccccggttgccgtttgggccgcgactgccgagcactggctcgctcccttgaccgcccaaggtcggtttccaaaccgacattgccgaaatataaacccaggcgccctccctttcttttttcccctcccaatcttccccgtttttcacccacgccattggcgtcctctcgccgaccggcgccgttgcgtgtgccggaggagccggtgcgcgctaggacgcggaaggggactccgggcgctcgtcttcttcctcttccccggcccgaggccggagagatcactcccgtgccgtcggcctctcgtcactgcgccccatcacccccgcacggtagtgcctcccttcgttctccctcctcgttccatctcctccccttagactcgggtagtagcacgagtagcctccccgtagctagctggcgccgccccgaccgttgctgccgctcgccgtgtgctcgccgccatcgccgcccgtgctccgtagcacccgctcgttgccggcctcgctcggcgtagctccgcccaatccgacgctagcaacgaactcccggagtcgcgtagatgctctagctcgcccgaatcggtctcccgtcgtgccgtcgccgtttcccccttctctcgccaccggttgccgccaccacaatccgccgccgtcgagcatcccccggcaaatccgagtcgttggctcgtctcccctcatcccgtgcaaccttccggtgtgctcgctttcgcctgtatcgccgtggttcgccccgccgttcgcagccaccgtccgccgtccgttccggccggcgtcttcttcaacctcccgccggtccgcgtggcagccacataggcgccacgtcggcgccagctcggctaagaccgggtcgagctgacccggccagctgctccctccgttcccccccgtgcgcatggtccgcggtgagccatgaggctgcgcgtgggcccgccgtatccgcgtcctcctcgaaccgcgcgcatgcgccgcgcctcccctccccaaaccctagcacgccccgcgtgcacctcgctcacggtgagccgagtcgccgacaagcgggtcccacccgggaccacgcgggatggacccggcccaccggctctctctctctcctccccgcccgcgcgcgcgctttgggccgccttcttgggccggccggcccattaagctcggccgagccgcccctttctctcgggccgcgccctagccgcccgaggaaagtataatttccctcccttcttcttttcttttcttttcttttccaaaaaggatttaaataaatccttttcctttagaccaaaaatccaataatcttataaattcaatatcttctcaaccgtaagtccgtttgactccgttcaacttctaaaattcctcaaatctcgagatctatctaatggcacgcttagaggtcaataatagggctttattttcgccgtttgctgagttgtcccgtttcgcgtgtagtttcggagcccgaagacccgcagtgcgaggatttcgaggatcaagctcaagatctcgagcaaggcaagccacctttgaacatcttgagcctatatttgaacttaagtatgttgcttgaaaaatattatgcattgataggattgcacttaatctacatgtctcgtctgcaaggcagattggcggacctacctaacttgttgcagttgacccctccattgtaattattataccatgttcccttgtaaccacctagttgcgcctcggtaatcgtgcactctgcacgaatatcgacggtcgccttcaaacttaaaatctgagaaacatcttgggtaaaacttgggttttacaaaacacttggaaaacccgacacctgggtcggtgcttgcgaacctaaatgaatttccaaattcgcggaccggggaacgtaccgggtgtacggttccccgctcttgcacttaaggaccgtttccttggaatttcatccgaacataagacaagtacgaccacatgggtggaatgggacacccctggctgagtaactagctaatcgggggagccatgatgccaagagacatgtggattcaacggggtggtgtcggggaggacccccgggtttcctggcacagtatggtctgggatccctctcgttggcatatggtgaacctgtgtcggctttcgaaatgccttgtcgtgaaagccttaaggtctctagtcgtggccgttctgcacgggctggatgatccgggttagtaatatcgtgtgggtaaagtgtacccccctctgcagaggttattaaactgttcgaacagccgtgcccacggtcatgggcggatgtgaggtgattcctagcgtagttttgtttgactactgctttgtgaaatttgctgatgtggtttgggttcgatgtttggaaaacctgcggctgatgggatcagccaggcccgggtggccgtttaaaagtcgttggccgggtgccaaccttgaccaattcaaaagactgataccttgcacatactccgaccgggcgagacgcactgtctcatccgtgtcgtttgagaagatctcacttagttgtttcagaaaagagtttaaataaaatcaattgcaaaaacaacagcctttccttgaagcctgcattaaacacttatttcccatggcttgctgagtacttctgtactcatccttgccctatataaataatccccccccagttgctgaagaagatgaagcggatcccgctgacgaggagttcttccaggagcaagccggctacgatgagttttagggtttcagcctagttcctaagtcgcgcctgtgatgtatggtccaagtcttggcttccgtttcccttttgtaatgcagttgtgagctcgggatctgtccgcagcccaacatgactgtactcctactctataataaagagacctctgttgctgtgatattctgtcttcctgtgataccagcactgtttcctgggactggtatcgattaacaggttaatttggagcgtcacgggctagtcccgctcggggctagttcggggcgtgacaagagatggtatcagagcccaggcttggccctagggcgaaacccgacgtttaggacgaccctaaggatactaagttcaaaactacttgcgaaaagctaaggcttttttttttggtttctttattttcaatagtttgttgctaaaatggttactgatcttttctccctctttcaaaattgtagatggtagtgaacgccagcttcagttcccacggttttggtgagggtcaccacgtcgctcagcttcgtgacctcgcccgcttccttggcttttcgtgtcccgagtacacggggtactccgtggaccatgttccccctcgctgtgagctctctgtgtacctttaccctcgtggaggtatacacggagctggtcttcgcccacaccacttcactgtggctaggcccactctccagatcgcgtaccaggacctctcctggactgcgcttcgtcgcttcgcccacgactacagccaccgtctcgggggctctgccttccggcagcttccacgccttccttctggccacgcagacgccaggtacccttgtccgtacaacgagtctcagctagtgctgactcgcatggttgagctttcggaggctcaggccactcagcacgacctactcctcgaggcttaccgctcccttgcccgccgctacgccgctctggaggcccgtctggccgaggagggagtcacctcagttgacactgtctcttgggactcaggccgcctctgccacgccagccacctatcctcccacagctctcgcggctctgcccgcactcccagtggcccgcgctcccccagcttgcgtgcgccgtactcaccagtgtactccccctacccacacccagttagcccctcctacacccccggacacactcccgttgcttcctcccgccgtggcccacgctttatccgcactgcgcggaagcgtgttgttggttcttccaccgtgttccgcttcgactacccagctcccccaccgccagcggcccgtgctgctgacggctctcgacaggttccgctggtcccttcgcgtcagccgatcgacgtttcttcgactgaggagccgactacaggaggcagccaggcagacgaggagtagaggaggcagtcttcagcagccgtccgtgtgttaggcccttttgttccaccgccaactcctttggagtcatggcgaggtagtgcatgcgtgcgtttgatgtgggtgttgtttggtagtctggttctcctaggtggtgtgcgtacagtcaagctcggcgtagctctgtgacttgtccacacccgttgtatcaggtgtttttatgatttgaaaaatccagtttatgcctagtgcgtgctatctgagttgttatttactttgctccttgccctcctaagtgcttatctgattcttacctcgccctctcctgggagtttagatggctagccgcccccgccgtgctgctcgtgcaccagcccgctttggttttgaggaaggtagagttgagccaggagcaaatcatgagtcagctaatgagcaatctcaccacagcaaccgttcgcaccgtactgcttcccgcaatgcagaagttgagcaaccccgccgcagcaaccgctcgcatcacacagcttcccgtaatgcagagatggaacagtctcaccgctctcaccacgctgccggtcacaattctggagaggaacgcatcccttccccgcctcatgtggaaaacaacatgcaacacttgatggcagttcagacacagatcttgcaaggattagccgcggccatagccggctttcagcataatgcgtatggaaatggccaccctcacatgggcaacaatagatccaaactgacagacttcctgaggtctcgaccgccagagttctctcagaccgtcgagcccgttgaggctgacgattggctgaaggatgttgatagaaaactcaacttagtgcagtgtactcctgttgagaagacgctctacgcctctcaccagctaagaggacctgctgcagattggtgggagaattactacaatgcacaccctgaacccactaacattgcttgtgatgagtttgctacggctttccgtgcagctcatgtgcctgaaagcaccattgatatgaagaaagaggaatttaacaggcttaagcaaggcaacaacagtgtcaatgagtacctaagtcagttcaacaagttggctcggtatgcccctgaggaagtggacacagacaagaagaagatcaggaagttcttgaagggaatcgcagttggaatgagactccagttgcttgctcatgacttccccacttttcaacatatgatcaacaaggcacttctacttgaggatgccagaaaagaggctaccgaagaatacaagaaacgcaagtctaaccatcaggggaattcttcccgaggcgcaccacgccctcgctatggtcaacccatgcaatatcaccaattggtcactcaggctaaccgccagccaggctacgcccctcgtccttagatgaaccgtccggcacctcagccacagcagcatgccccaagtggcaacactgcgccaaacagtgttacctctttcaagtcaccgctaggactatcagcagttcagtgtttctggtgcaaccagatgggtcactatgccagacagtgccctcagaatcctaccaacaccaactcagggcatgctaatggtagcactgccagaactcctactctagcggcagctcagtctcgtcctagctctcaggcaagtggacaaggttctcgtgcttccaacaactttggtcgaggccgggtgaaccacattcaagccgagaccgctcaggatgctccagacgttgtgatgggtatgttctctgtcaactccgtacccgcaatagttctgttcgattcaggagctttccattctttcatatcacaagcttttgtgaaaagaaatggttggaaaacccaaaatttacgtgtaccaatgatagtacattcccctggaaggaatataagggcaactcaaatatgcccggaagttaaccttagaattgaggaagttgacttcctagccaaaccgatagtcctagactcgcaaagcttggacatcatcctagggatggattggttggctaagcacaaaggacagatagattgtgccgaaaggtccatcaccttgcaaggacctggaggaaagcaagtccgctttacctctaacacccctaccgcaagtcggtctatcctaacctgtttacaagtcacctccttggagtcggtgcccatagtctgcgattatcccgacgtatttccagaagaattagcgagtatgccaccagaccgagagattgagttcgccatagaactggcaccaggcaccgcaccaattgcaaaaagaccctaccgaatggcagctaatgagttagcagaagtcaaaagacaaatcgaagaattggagagtaaaggttatgtgcgacctagctcatccccttggggagccccagtgctcctggttaagaaaaaagatggctctgagagaatggtaatcgactatagagccctgaatgaagtaactataaagaacaagtacccgttgccacgaattgacgatttgttcgatcaacttaaaggagcaagagttttctctaaaattgacttgagatcaggttaccacaaattaaaaatcagatatgaagatatcccgaagaccgctttctcaacacgttatggtctatatgagttcacagtgatgtccttcggactcaccaatgctccagcgttcttcatgaacttaatgaacaaaatcttcatggaatacctagaccagtttgtcgtggtattcatcgatgacatcctgatatactccaagaatgaggaagaacatgctgaacacctgaggctgataatgggaaagctcaaggatcatcaactattcgctaagttctcgaaatgcgaattctggttggaccgagtagcatttctgggacacgtgatctcctccaacggtgtcgaagtagatcccagcaaggttgaagctgtacttgcttggaacccgcccaagaatgtgtcagagatccgcagcttccttggcttagctggatattatcgaagattcattgagggattctctaagctagccagacatatgactgagctgttaatgaaggaaaagaaatttgaatggtcagcagcctgtgaagacggctttcaagaaatgaagaataggttgaccactgccccagttctcaccttgccagatatccgaaaagattttgagatcttctgtgatgcatcaagacaaggcttaggatgtgtcctaatgcaagaacgaaaggttgtggcctacgcatccaggcagctcaggcctcatgaagtcaactatctcacccatgatctcgagttggcagccgtggttcatgctcttaagatctggaggcactatttaatcgggaacagatgtgaagtatacacctgacggagggtggggctcctcaccgggagaccgcgcaggcccccctttgccggttcggccgggggtgctaagtgagtttcttcgccctcgatctgaggaacgtcagcgagagaggaaatgcgcaagacacgggcgacgtagacaggttcgggccgctgagaagcgtaacaccctactcctgtgttctggtggatctgtgcgtgaaggaatacaaagaggccgagagcgaaagagagttcaggctctagaaaccattcgccagagtcccccctcccctcctctcttctccctctttttttctaggcctgggcctcctttttatctggtcaggggtcaccacatgggcctctagctgcctaagaagggaaacatgctttttacaatgagggctagtctacagccggaagtgacctctgacaagcagagcgcacgtctcctgccccgctcgcccgcttttccggtggacgcccatttcaaccttcatttaatggccagcgacttccttgccatacttgcgctgaagcctggaatggatctgaccgggactgacataccaactccaggagttagcacgccggctccggctagggacgagagccaggaagctctcatcattccgacgggacggggcgaggcgtgtgacaggccgcctgttgccacctaacccgtgatctgaccggtctgtgaccggtcacacaccccgaccagtcgcggaccggataagcgtgcgctgcaccgcattaaatgcggcgtggcgcgctcgtccaatcctgctataaatgcggttaggtgagccccgctgtgctcacctaacccacacgcgtggcgccaaaaccacagggggtcggggcgccccagccctcggggccgaaacaggggcgccccagccctcggggccgaaacgggagcggtccgacccctcggggagacagagggaggggtggccacgtcatcctcgggcccgacccccccgagggggtcaggccacgtgggtgaccgcggctacccaagcctctagtcacgatacccccggccccatgtcaccgacagtagcccctggcgttacgccagggtgatcgcccccctcgagggaagcgctcgggcgtgacgccactccttaggcccggtgacaggtggggccggtccctacaggcgggcagaaactcagcggtcgcaaatcgcgcgcatcggcaagggaaaaccgatcgacagtaatgagcggcctctttaagaccgctacattactcgagcagcgcgcgaatcgggacgagccggttcatttcgcctggagacatgatgatggcgcttttcacggttggcgagcgtagttaacgcgcgcacgatctgccccatctcaaccgccacggccgcacatctgccgcgtgcgccgcaaacgggcgagtggggttagtggaggcgtgggcgcgagaaacgagggggcgaggtagtgggcgcgggaagcgaggagccgggcatagcgttggcaagggtgtaaagacgctgaggaagggattcgtttctttcctctcgccactcttcccttgccttcgccacttgtgctctaactcttcgtttcctgtgccctaccctcgccgcactcgctcgttctcaagctcctcctccgccagcgtcatggcacggggctccgcaccgctcgatggtagcgtgctgccgccttcccgcatcgtgagcgagaggcaggccgggctgccgcaccgattcatgccggaatctgccaccggccgagaggtggtcgcgctgggcgagggacgcccggcgccacactacccggggcggtccgtcttcttcctctctttcgcaatggcggggctggtcccgccattctctatttttttcatggatattctggagttttatgatctccagatggcgcacctcacgcccaacgcgataatgacgttggccatcttcgcacacctgtgcgagatgtttatcggggtgcgcccatctctccggctgttccggtggttcttcaccgtacagccggtgtcgccgccgacggtagtcagtggctgctacttccagccgcgggggcaggtgctgaaccgctacattccctgcgtcctccgcaaaaagtgggacgactggaagagcgattggttctacacccccctcgccgacgaagcgcgcctccgacttccgagccagcccccggcgcagggctccagctggcgggcgacggtagatctgggagacggctacgacgccgttcttgaccgcctggcgggtctgcgatcccaggggctcacgggggccatggtgttcggcgactaccttcgtcgccggatcgcgccgctccagcggcgcgcccggggcgcctgggagtacaccgggcccgaggactacatgaggacccaccaggggcgcaaatgggactgggaccctgtcacaccctgtagttcccctcctaagccaaaaattgaatttataaaggaccctaagaaaaaccggtgcaaagcaagagtaaacccctgaagatcaatgcaaataataatcggatttggcatgtggaatttttcttgagttctacatgtcgaaactcactaacaggatttttagtggaattttcagagccctagaaataattttaaccaattaaaaatcaccaaagtgcaattttaattccaggaaaaaaatcctttttctttttctttttcttttttttctctttttcctcctttctttcggatgggccgctggcccatctcctcctttcctccccctcctccctgctgggccggccgcaggccgaggcccagccggccgcccgcctccctccctcccggggtcgccgacaggtggggcccacctgtcggacccgtctcccacctcccgcctctcccgctcgcgccgccccgccgaaaccgccgccgccgcacccacttcctccgctttccccgcgcccacgccacgtcgccgcgcccatgccacgtcgccgccctctccccgcgtctcccggccgcgccagcgcacgagaggggcgggattcgattttgaatccccccccaccttctctctctcctcccccacgtcgccggcgaaatcggagcgcctcccggccacgtccgcctccccctccgcctataaaatgctccccatgccctcctctctcgttttccgctctcaccgctccatcccgtgccccctaccgagctcgcaccgccgccacttacgccgccgcccgtcgccgcactccggccgtgtgccgccgtcgctagagccgccgccgcactaagccaccgccaccactagcttcgccgccgcaagacctttcccggccgctgctctacgtcgccggaataccaccgaaaccccatttccctcgcgtcgtcggtgagttctctctcccctccgactccggccggcgtggatggtcgccgtgggggttttcctccgccctaattcctctcctctatttccctaggtgtcgccgtcgctcgtccgcacctcggcatcgccggtcttcgccgcctccctcgtttttctccgccggccattgccgcccctccggtgaggtctccctccccttcctttccttctttttttttccccgtgcgccgccgccctcttcgcgcgctcgccgtcgctttcggtcgtcgccgctcgcgccgccgcccgccgcccgcgccgccgctcgccgtcgctggcggtcgcatgcccgcgccgccgccttgccatggccgcccggccggcttgatgccgggcctggccggtacatcggctcgtggagccggagccgtggggcccgcttgccagccgtgcccccccttgagccgctgccgagtgggcccgtgtaccagcgcccttcccctctctctccccgtgccgctgaccggtgggccccgcttgtcggcgccgcgccaccccgtgctggcgtcagccctggaatatattgcgcaataattaattaaggactttttctttattagtaaaaacacagtgaatcttctaaaattcataactaattcatccgagctccgtttaagcccattcaagtctcagtaaatcaagaaaaatgtgtagaatccattaaaaatggttttgttccctgtttcagtagtcttatagcctgtttgcaatgtttgctttgtatgtcgctagattccgattcctccgacgctccggtgtacttcgagatagtcgccgaggttcctccagcagcagagcaaggcaagtcatgcttgtcacttgatcatgttgatcctatattgcaaatatcctaatgttttctttcaaatactgcatttgttttgcaattatactatgggatggttacctattgttacagccatgtttttggataccatgctcctttgttagcttgggttataacatgattagactttggactaggaattgcttagccatgcttagttcaactagcacacaatggggagatctcttttaaaacctagactataggtttataggttaatgttggatcggtaccaccgctctggtgttggttaaataaaatgaataatcatggtgggctgtgggtgcatggttttgctagtcacgcccatggcaattaaggaccggttcgcgggaaaccctggaagaacgtatcgtacttaccacaagtcagcgtgggcaacggctgggcttgtagtgtagcttttctctagctgacgcatccaggcaagggtgggcgtgatggagcggggcgggccctgcgacggcctctatcgcttccggattcacctaggcacgagaggggactgcccgttgcccgctggggacgggggtgaaacctgaggtgtggtgtgcttggctagagggggttatgcgaagggtcctgtcacggcctctttccgatatgtcgtggtggcatgtcggcgcacggaaacgtgtcgtggggctgtgtcttgtgggtatagttgtacacctctgatcagagtaaaactattcgaatagccgtgcccgcggttatgggcggtcaaccagattcaccgtgattagtctcaccttagtttagtctaatgaatttggatagtttaggtggatggttgggcctgttgcaacgaggtgtggcgttggacagtggatgaataatactgcttaattttacaactgttttcgcattcaacccttgtttataaatgccagtatttatgcaaatgaacctgtttagctgttccttgttgaatccctgcatcatacccccattctggtatgacttgctgagtacagtgggtagtactgtcttgctctatttctccccaatcccagagtttgagtttgtgtcaaatggcgggttctccgaggagtaggcttcgtccgtgccgtcgaggatgcctgtggagtggtgttcccgctgcagtcaagtccaggcttagcctcagttatcttttgttttccgctgcatttatgtaagacttttataatgtttgtaagacgtggatctgtatgtcaacattgtcgtttgtgtaccccggccggtcctggacgggggttttaatgcacattctgcttggaatcctattcgggaatttctgggcgtgacaagttggtatcagagccgaccttgaccgtaggacaagccaaatggaaacctaagagccctctgaatccttttcatttgcataagttctttgcaattggattttattccgggaaaatttgggatctgctcttgtggttcaagggaaaaatcttgtcgcccgtttaaatgggatttgccaaaacgagtcagtctagggttttagtaaaaatttttttaagatttattcgtcagtcagttgggatttgatgggtgaaatgtattaggtcctagctcaggaacatgggttgcaaggtatttatgctttatttgtaattacaagtatgtatctaaattccccattattttacctctatgtaagtccgtcttatttattcgctctcatgcaaaatgatttatgcataaaattttgctcttattcgattctcttatttgagtcctttattgctttatttaaatttggatttgagcatgcattgatcctactcctttgtcttctttagatggccggtcacccacccaaccaccatggagagggcatgattgacttcgtggcagagttggcacgcatgacactggtggtaggctaccccaacgcgccggagtacacgacgattccaccgctcagtggcgagcttcctcaccgtgtccgcttggaggtccatggctacgtggggacttgccttgctaacatggtggttgaggcgtcaggaggcacagcagaccacgcatgtcaggaggcagcctacctgatgatggccagactccgggagcgccacaactacatcttccacgacacggcgtaccgcttccaccctcgtcgagcccacggcgacgatgtcagttcgttccgtccgacagctggcgagaacgacaccaccttcggtcacatgtgtgctgtgatgaggggattggataggatgcactcggacctgcacaaggcgaccaaggccttgaatgatgggaagctcatgaggatcgtcgctctgaaggacgagatagcgcgcctgaagagggagaatgctcagttgaagggtcttcccgcgccaggaggagtccggatccgcactacgccccgcaagaggacgactgcacccgtgcgcatccagctcgcgcccaggaacccacctccgcccgcagctcccgcagcacctccagttccgcccgcagttcctgcagctccagctccagctccagctcccgcgtccgctctctccttcgctccagcatcagccgccaggggtccaggcagtggtactggaggttggttgtctgctactcccagtggcagcagctccagtggctcacagtccggcagcggagggacttatctgccaggttccaggagtcgctcagagggacctggtgacgagcaggaggacgccttcgactccaccgaccgcaggagccgttccgagcattaggctcgttttcccattagtttatcgattgtctagtttctgcttgttagtttccgtgtttaggttgcttgtttggggtcagtcgacggtcgatatcatgtgcctatgatatggctgtcccaataaggatttttgcttgctgtttaaagtgttttaattcagatcagaacagttgcagtttaatttctatataataaagcttagttcctgagtatctgtttttctccgtttccccgtctgctctccctccagatggtctacaccaggactggcaaccgcacggcaggcgagggcagcaatggcgaagaacgcgctgatggtgtgcaccccaacagcgattccggcaatggtccgccaccccttcccgagaatccgacactggcccaagttatggcacatcagactcagatgatggcagccatgatgcagcagatgcagcagcagcaccagcagatgcaccagaggatgatgcagcacgccgaacaacagcaccagcagtttggtccccctccccctcaatccaagctgctagagtttctacgcgtcaggccacccaccttctccagcaccaccaaccccatggaggcgaatgactggctccatgccatagagaagaagctgaatctcctgcagtgcaacgatcaggagaaggtcgctttcgccacacaccagcttcagggtcctgcgtcagcttggtgggacaatcacatggccacccgcccgccaggcgctgaagtcacttgggcggagttttgccgtagtttcaggaaggcacaggtgccagacggggttgtagcgcaaaagaagagggaattccgggtgctccatcagggcaacaggacagtgacagagtaccttcatgagttcaatcgcctcgcgcgatatgcaccggaggatgtccgcactgacgccgagaaacaggaaaagtttatggcaggcctggatgacgagctgaccaaccaactgatatctggggactacgctgattttgaaaggctggttgacaaggcaatccgtcaggaggatcagcgcaacaaaatggacaggaagagaaaggcggcgcagttccggtccaaccaaggtagtcagcaccgaccgcgtttcactcccggacagcagggtggacctaccaccatgatcgtccgtcagcaccgcccgttccactctagcaacttccaccagggcgctagcggcagtccgaaccaccagggaggccagcccaaccgtggtgcagctccacgcccaccaatggcaccagcacagccagccccgtccgcgcaagccaagaaggagactggcacaaaaccggggtcctgtttcaactgtggcgagcttggccactttgccgacaaatgcccgaagcccaggcgtgccggaccaaggtttatccaggctcgtgtcaaccacgcgtctgcggaggaggcacaagcagcaccggaggtcgtactggatacgttccctgttaactcaatccctgcaacagtactttttgattctggggcaacgcattcgttcatttcaaagaagtttgtcgggatgcatgggttaataagagaggaacttagcacacccatgcgggttcataccccggggaatagttccacttcggtacaattcagcccttctatcacaatagaaattcaaagatcaccatttctagccaacctcattcttctcgaatccaaagacctagatgtcattcttgggatggattggctaaccaagtttaagggagccatcgattgtgcgagtcgcacagtcaccttgaccaacgagaagggagaaacggtagtgtacaaatcaccagactcaccaaagcaaggggtctctttgaatcagatcgagacggaaatcccagtggacaccgtggagaaaagcttgaggaaattggaagatatacccatcgtctgtgagtatccagaagtgtttcctgaagacctcactaccatgccacccaagagagagattgaattccggattgatttagcaccgggaaccgcagcaatttacaagagaccgtacaggatggcggccaacgaactagcagaggtcaagaagcaggtcgatgagcaactacagaaaggatacatccgaccgagtacttcgccttggggtgctccggtcatttttgtggagaaaaaggataagacgaagaggatgtgcgtcgattaccgcgcactcaatgaggtcacgatcaagaataaatatcctttaccgcggattgatgatttgtttgatcaactgaagggagctaaggtgttctccaagatagacctgcgatcaggctatcaccagttaaggatccgggaagaggatatcccaaagacggccttcaccactcggtacgggttatatgagtgcacggttatgtctttcggactcaccaacgcacccgcattcttcatgaatctaatgaacaaagtgttcatggagtttctggacaagtttgttgtggtattcatcgacgatatacttatctactcaaagtctgaagaagaacatgagcagcatctccgtctggtactcgagaagttgaaggagcaccagttatacgccaagttcagcaagtgtgatttctggttgacggaagtcaaatttctgggtcatgttattacagctcagggtgtggccgtcgacccatccaacgtggagtcggttaccaaatggaccccaccgaagaccgtgtcgcagattcgaagttttcttggacttgcgggatattaccgccgattcatcgaaaacttctccagaatcgcccgacccatgactcagttgcttaagaaggatgagaagtttaaatggacagctgagtgcgataaaagttttgaggagctcaagaagaaattagtatctgcaccagttttgattctgcccgaccagatgaaagacttccaagtctattgcgatgcatcccgccacggacttggatgtgtcctaatgcaagagggcagggtggttgcgtatgcctcacgacagttacgtccacacgaagggaattatccaactcatgacttggaattggcagcggtggttcatgctttgaagatctggaggcactatctgatcggcaaccgctgcgaggtatacacggatcataagagtctgaaatacattttcacccaaccggatctaaatctccgacaacgaagatggttggaactaatcaaagactatgacatgagcattcactatcacctgggcaaagccaatgtagtggcagacgcattaagccggaaaagttactgcactgccctatgcatcgagggcatgtgtgaggaattgcggcaggagtttgagcacctcaacgtgggaattgttgaacacgggttcgtagccgctctggaagcacggcctacgctcgtcgatcaagttagagccgctcaagtaaatgatcctgaaatagcagagctgaaaaagaacatgagagtcggaaaggctcgggatttccttgaggatgagcatggcacaatctggatgggagaaagattgtgtgtacctgacgacaaggaactgaaagatctgatactcaccgaggctcatcaaacccagtactccattcacccaggcagcaccaaaatgtaccaagaccttaaagaaaaattttggtgggtcagcatgagaagggaaatagccgaattcgtcgcactttgcgatgtttgccagcgagtgaaggcagagcatcaaaggccagcaggcttactccaacctcttcaaatcccggaatggaaatgggaggaaattggaatggactttataacaggactgccccggacatcatcgggtcacgattcaatctgggtagtcgtggatcgactcaccaaggtggctcactttataccagtacataccacctatacgggaaagaaattggcataattgtacctcgcaaggatcatgtgtttacatggagtacccaaaaagatagtatctgaccgaggtagccagttcacctcaaaattttggcagaaactgcaggaagaattggggacccgtttaaatttcagtaccgcctaccatccgcagacagatggtcagaccgagcgagtcaatcaaattttggaagacatgttgagagcttgcgctcttgactttagtggagcttgggacagatgtttgccatatgcggaattttcgtacaacaacagctaccaagccagtctacaaatggcaccatttgaagctttatacggccggaagtgccgcacacccctcttctgggatcagacaggcgagcgtcaactgttcggaacagaggtattagcggaagcagaagagaaagtcagaatcatcagggaaaggttgaggattgcccagtctcgacagaagagctacgcagataaccgtcgaagggagctcacttttgaggcaggagattacgtgtatcttcgcgtcactccgctccggggagtacaccgctttcagacaaaaggcaagttggcaccacgcttcgtgggaccatacaagatcctggaacgaaggggggaagttgcttatcagttagaacttccatccaacatgatcggcatccatgacgtgttccatgtgtcccaattaaagaagtgcttaagggtacctgaagaacaggctgattcggaacacattgatatccaggaggatttgacatatgtggagaagccggttcgtatacttgacaccagtgaaagaagaaccagaaacaaggtcaccagattttgccgagtttagtggagtcaccattcagaagaggaagcaacctgggaaagggaagatgagttgaaagctacccacccgcacctcttcgccagctcctccgaatctcggggtcgagattccgtttaaggggggtaggtttgtcacaccctgtagttcccctcctaagccaaaaattgaatttataaaggaccctaagaaaaaccggtgcaaagcaagagtaaacccctgaagatcaatgcaaataataatcggatttggcatgtggaatttttcttgagttctacatgtcgaaactcactaacaggatttttagtggaattttcagagccctagaaataattttaaccaattaaaaatcaccaaagtgcaattttaattccaggaaaaaaatcctttttctttttctttttcttttttttctctttttcctcctttctttcggatgggccgctggcccatctcctcctttcctccccctcctccctgctgggccggccgcaggccgaggcccagccggccgcccgcctccctccctcccggggtcgccgacaggtggggcccacctgtcggacccgtctcccacctcccgcctctcccgctcgcgccgccccgccgaaaccgccgccgccgcacccacttcctccgctttccccgcgcccacgccacgtcgccgcgcccatgccacgtcgccgccctctccccgcgtctcccggccgcgccagcgcacgagaggggcgggattcgattttgaatccccccccaccttctctctctcctcccccacgtcgccggcgaaatcggagcgcctcccggccacgtccgcctccccctccgcctataaaatgctccccatgccctcctctctcgttttccgctctcaccgctccatcccgtgccccctaccgagctcgcaccgccgccacttacgccgccgcccgtcgccgcactccggccgtgtgccgccgtcgctagagccgccgccgcactaagccaccgccaccactagcttcgccgccgcaagacctttcccggccgctgctctacgtcgccggaataccaccgaaaccccatttccctcgcgtcgtcggtgagttctctctcccctccgactccggccggcgtggatggtcgccgtgggggttttcctccgccctaattcctctcctctatttccctaggtgtcgccgtcgctcgtccgtacctcggcatcgccggtcttcgccgcctccctcgtttttctccgccggccattgccgcccctccggtgaggtctccctccccttcctttccttctttttttttccccgtgcgccgccgccctcttcgcgcgctcgccgtcgctttcggtcgtcgccgctcgcgccgccgcccgccgcccgcgccgccgctcgccgtcgctggcggtcgcatgcccgcgccgccgccttgccatggccgcccggccggcttgatgccgggcctggccggtacatcggctcgtggagccggagccgtggggcccgcttgccagccgtgcccccccttgagccgctgccgagtgggcccgtgtaccagcgcccttcccctctctctccccgtgccgctgaccggtgggccccgcttgtcggcgccgcgccaccccgtgctggcgtcagccctggaatatattgcgcaataattaattaaggactttttctttattagtaaaaacacagtgaatcttctaaaattcataactaattcatccgagctccgtttaagcccattcaagtctcagtaaatcaagaaaaatgtgtagaatccattaaaaatggttttgttccctgtttcagtagtcttatagcctgtttgcaatgtttgctttgtatgtcgctagattccgattcctccgacgctccggtgtacttcgagatagtcgccgaggttcctccagcagcagagcaaggcaagtcatgcttgtcacttgatcatgttgatcctatattgcaaatatcctaatgttttctttcaaatactgcatttgttttgcaattatactatgggatggttacctattgttacagccatgtttttggataccatgctcctttgttagcttgggttataacatgattagactttggactaggaattgcttagccatgcttagttcaactagcacacaatggggagatctcttttaaaacctagactataggtttataggttaatgttggatcggtaccaccgctctggtgttggttaaataaaatgaataatcatggtgggctgtgggtgcatggttttgctagtcgcgcccatggcaattaaggaccggttcgcgggaaaccctggaagaacgtatcgtacttaccacaagccagcgtgggcaacggctgggcttgtagtgtagcttttctctagctgacgcatccaggcaagggtgggcgtgatggagcggggcgggccctgcgacggcctctatcgcttccggattcacctaggcacgagaggggactgcccgttgcccgctggggacgggggtgaaacctgaggtgtggtgtgcttggctagagggggttatgcgaagggtcctgtcacggcctctttccgatatgtcgtggtggcatgtcggcgcacggaaacgtgtcgtggggctgtgtcttgtgggtatagttgtacacctctgatcagagtaaaactattcgaatagccgtgcccgcggttatgggcggtcaaccagattcaccgtgattagtctcaccttagtttagtctaatgaatttggatagtttaggtggatggttgggcctgttgcaacgaggtgtggcgttggacagtggatgaataatactgcttaattttacaactgttttcgcattcaacccttgtttataaatgccagtatttatgcaaatgaacctgtttagctgttccttgttgaatccctgcatcatacccccattctggtatgacttgctgagtacagtgggtagtactgtcttgctctatttctccccaatcccagagtttgagtttgtgtcaaatggcgggttctccgaggagtaggcttcgtccgtgccgtcgaggatgcctgtggagtggtgttcccgctgcagtcaagtccaggcttagcctcagttatcttttgttttccgctgcatttatgtaagacttttataatgtttgtaagacgtggatctgtatgtcaacattgtcgtttgtgtaccccggccggtcctggacgggggttttaatgcacattctgcttggaatcctattcgggaatttctgggcgtgacaagttggtatcagagccgaccttgaccgtaggacaagccaaatggaaacctaagagccctctgaatccttttcatttgcataagttctttgcaattggattttattccgggaaaatttgggatctgctcttgtggttcaagggaaaaatcttgtcgcccgtttaaatgggatttgccaaaacgagtcagtctagggttttagtaaaaatttttttaagatttattcgtcagtcagttgggatttgatgggtgaaatgtattaggtcctagctcaggaacatgggttgcaaggtatttatgctttatttgtaattacaagtatgtatctaaattccccattattttacctctatgtaagtccgtcttatttattcgctctcatgcaaaatgatttatgcataaaattttgctcttattcgattctcttatttgagtcctttattgctttatttaaatttggatttgagcatgcattgatcctactcctttgtcttctttagatggccggtcacccacccaaccaccatggagagggcatgattgacttcgtggcagagttggcacgcatgacactggtggtaggctaccccaacgcgccggagtacacgacgattccaccgctcagtggcgagcttcctcaccgtgtccgcttggaggtccatggctacgtggggacttgccttgctaacatggtggttgaggcgtcaggaggcacagcagaccacgcatgtcaggaggcagcctacctgatgatggccagactccgggagcgccacaactacatcttccacgacacggcgtaccgcttccaccctcgtcgagcccacggcgacgatgtcagttcgttccgtccgacagctggcgagaacgacaccaccttcggtcacatgtgtgctgtgatgaggggattggataggatgcactcggacctgcacaaggcgaccaaggccttgaatgatgggaagctcatgaggatcgtcgctctgaaggacgagatagcgcgcctgaagagggagaatgctcagttgaagggtcttcccgcgccaggaggagtccggatccgcactacgccccgcaagaggacgactgcacccgtgcgcatccagctcgcgcccaggaacccacctccgcccgcagctcccgcagcacctccagttccgcccgcagttcctgcagctccagctccagctccagctcccgcgtccgctctctccttcgctccagcatcagccgccaggggtccaggcagtggtactggaggttggttgtctgctactcccagtggcagcagctccagtggctcacagtccggcagcggagggacttatctgccaggttccaggagtcgctcagagggacctggtgacgagcaggaggacgccttcgactccaccgaccgcaggagccgttccgagcattaggctcgttttcccattagtttatcgattgtctagtttctgcttgttagtttccgtgtttaggttgcttgtttggggtcagtcgacggtcgatatcatgtgcctatgatatggctgtcccaataaggatttttgcttgctgtttaaagtgttttaattcagatcagaacagttgcagtttaatttctatataataaagcttagttcctgagtatctgtttttctccgtttcccgtctgctctccctccagatggtctacaccaggactggcaaccgcacggcaggcgagggcagcaacggcgaagaacgcgctgatggtgtgcaccccaacagcgattccggcaatggtccgccaccccttcccgagaatccgacactggccaagttatggcacatcagactcag

SEQ ID NO: 5293 - DNA, 65913 bp, Oryza sativa
atttcggggttataatagtccgggtcgaccagtattgttctacggcggtgctgctcaatacgcaagcatccgaggcattgggtcatgtagatgaagtgatgtggacacgcatgctataaaaaccgtatttgggtgtggtttgtcacccctgaccatagtcatggggttaacacacaaatattgttggttcagcataggtggaattcgaaagcagggatatgggtgtttgtacgaaacccagttaggacgacatttataatggggggtttaatcgccctgcacatggaatgttttctacttgtagcttggaatggtcaaccccccacaggtggtagtgccaaccgcggctagcttcagtgggtctaggttagatggttttcattttttttggggaggaaacgggagcgttttttttccccgacccctcggggagatagagggaggggcagcctcatcactctcgggcccgaccccccccgagggggtcaggccacgtgggtgaccgcggctgccccaaacctctagtcaagatatccccggtcccatgtcaccgacagagtcgtataagaatctatttaaaaaaagctcgcatgctaacttgagatgaagtacagactcctaattgaaactcatgattttataaaaaaaatatccaagcgaatttccacggtgaattttaccctacctaaaccctataacaataataaaattaatatagcatttacatgttacaatgtacgggcatttttctagtgatttaataaatttgtgctcacatggtgagaaacccgaccttttaaattcttaccaattctctctcaaaaagtccggtttcccaaacagtagtaaaccatctctgctgttgttttcttgatttaatttactccggtacccaagatagcacttaccccattttaaaatatagtaaattagtatcgatacggacataggagtattatactatcacgaatatggacggacaaggttaaggttatgtcaaattagtacaggttgctactcccttcaattagttccagaatttcactcatctcacacatactaaaacaaaaatagaaaaaagacaaatacatctagtgcatcaaatcctaaaaaaaatattctttattttacctatttcgaatgcaattattttctcattcacaaacttgatacaactattacttaaaaataaacttattataggataaatgagaagccagaaaacttgtcagaattgaatatttttttacatataaaggtatattttacttctttgtccgtcttaaaatataataacctttaaacggtaaaatacgttctaatattataaattttgatagatgttatattttgggatgaaaagagtatgagtgggcaagtgctccttccatcttattttaaacgcagtcacgagtttgtgtctaactttaatcgtccattttattttaaaaaataaaagttaaaaaagtaaaataatgtataaattaatataatattttatcatttaataagaaaaatatattaatcataattttttttaaataagacgataataaaaaataaacacagaaacacgttacctcttttaaaatgggagggagggagtatatataagtcaaggagtaattgctgttggtgacgttaacctacgcggtagtacgtgcgtgtgagcagctggagcattcaagtagttttggcttgtggcagcgcctctcgagcccatgcaacgcggagacagcaagctgccgcgcgacacggcacgccgagcgagaactcgagtctattcaatgcgctagctgcagcgtccgtcggttgcattggctacgagtaaaaatttacctctttccttgacttcgccaatagagagaaaggaaaaaaaaaaggcgagagatggtccgggagcggcgagctatcggcgcgcgctgtagcggcacagggcgagcagtagtcgtcgtatgcgcggtggtagtgatggccctgaatctgagcatgcttgttggtcgcgtcacgcacgctcgctcgctgcctacatacatgggctctcatcatgccgcacgcccccgatcaattggctacaggctcctactatacacagcgtcctcgtgacggctcgtcacacacgtacgctacgccaagcagcgcatgcacgtgccatgtttgacatgggcgcccgcatgcattttggtaccatatctagcggacggcgttgtgtccgcgctgctacagtcgtcggtgcaggagctgctttgcaatatgtgtagttttctagcgaatccgatcaatacatgcatggatgcgtacagatttagtggttcatctttttttttcttttcctctgctcgactcgaccatggctttactacatgtgataggctttttagttcgtgcatgtagcagcggtagcacactagcatgacatgtctggataaccaccggtcgggagtggcccaccgggttaggccgccggccggcatggggcgtacatgcatgcatggcttttctcgggaattataatcgtgtgatggtccgctgatcggatggatcgggccgtgcgcgcgtgagcctattatggttggattgggacgatgcgtactactactacgtacactacgtacgggtagggttcggcgatgatggtattgatgtatactggacatttcatgatacacgtaccaccaaatgctaaggatctttggacgagatggctagtgtttggtgcaaagatctagtgactgatccggccggtatttaggaccgtggatacttcaaagccgccaagtaacaggaggggcgcctatccgtgacaggagctgtctccacatttcgattgattattgcatggcgaaggcgtgatcagcagggattgacaggatgcgagtagcgcgtgctgtgccaggaaaggttacacaagttccccgcacaaaaaaaaaaaaaagaaagaaaaaaagagagaagggttacacaagttgtccgcgccgggtcctacacacatatggaaaaatgaaacagtatgtattgtttcacaaatgttcctggcttaagttagatatagtatataggaacaaattaatgtcgtgccccttaaaatacatgataaaaaaacacagagaatatgaaataaaccacataaatgaaagtaacatgtttttttaatccagtaatagttaaaagcacaggtaataggaatatactcgctccgtcccattttaagtgcaatcataaattttcacgtccaactttgatcatccgttttatttgaattttttttataattagtatttttattattatgagatgataatacatgaatagtactttatatgtaactcatgtttttaatttgttcagaaatttttcaaataaaacgaacaataaaaattgtgcacggaaaatcatggttgtacttcaaatgagacagagggggtatgttcttcgattgcaccataggacggaattgaccataggaatacaatcctataaaaattcacatccttttcataggaaaaatccgtgtccttttcaaatgaatcaaaggagcatatgagaaaaaaatattaagggaattgaattatcaaaaattatttgtcaatcctccattttaaagggaccctcattgtagagatgtgcatgtgttcaatatacacagggagcacatatatatagcctttcatagtctacttgcagatttatcgctcgtagccaaaatttaaattttggaaaataaattttagagttgatttcttttacccgtactctatattttaatttttcttttaaactgtaagtaaacatatataaataaattgtttctcctactttgtttgtttttctatggcatatcaactacttcgtacagctcaagcgacaagaggcataaagcaaattaaccataagtgtttcccacaatatacccctaatagacgacacgcatgataaaatttatgaaaaaatttatgatgatctctacggtaatataatcaatatatactaccaccaacaatcttaaactatctttcattgatagtataagtcataaatcaatgggttatattatttaactaataaatatcagtagatatcaccgtaaaaatacttttcagattttttttacgaattacacgtgtgtaaatacatgcgtgaattttaatgggtacaattacacaataaaaatatacaaattactgaatctgtctcagaaaaaaaaaacaagcacatcagagctactccctttatctcaaaataaactaacatatgaatggatttgacacaatctagtataacaatttagacaacaatcgtcttctaagttggtttattctgattcggatggagtacaacctttttgtcatgggaaaggccatgtttacccctccagctgaagttaattaaatatcatcccaaacattaaagagtaaaatacagttactcctatttgctagccattacaaattcatatgaatataatatcctgatatttattaaatgctggcccgttgacatgacagcgctttcacgaacagcggtttctcattggcgctgagaaacctttggctgatctaacgtgaactttcggtgaaaactattggcataagtaaattcacgctgtgtttagatgcaaagtttggatccaaacttcagtccttttccatcacatcaacctgtcatacacacacaactttttagtcacatcatctcaaatttcaaccaaaatctaaactttacgctgaactctcgtaccaaagttaatctacagggtgatcccaacagttttgggctaggtgggcctgagtccctgttccgttggctaaaccctttataaaatgttgagttaatagaggaaaaaagcactagtttgatagaagaaaaacgatgaataattgaaaggtaattacttttacttcttttttaaataggtagttgtataaaaatataataatgtttgtttttttcttatatttagtcttgtcatgttacgcactatattattctacgttcaccgtcactgttaatatatccccatgtagaaattaaggatgaaaaatatatactttttactatctttttaaaggaattataaccctggcctctaaactacaaatgcacatcattatttgaacttggagtaaacctctagaggaaaatttgcaaaaaataaatagaccaagactcgtattggttgagctatatatcctagaaataggaatggagcaacaataaataatttgtcagaaaaaccttttgtggtttaaaaaccaatgttgaaacaaatcaggatacccccccccctacaaaatttagtactccctccgtcctataatatatgtattttaataatttgcttacactgtttaagcactcgtcttattaaaaaaatctgtgcaaatataaaaaacaaaaatttgtgcttaaagtactttggataataaagtaagtcaaaaaaataataattctaaattttttttgaataagacaaatggttaaacagtgcaagtaaaatatcaaaatcccttatcaagagacggatggagtaggcaacaagcaaacaacaagacactaaaatatctatataacctaaaagcatagtaattaagtgcacaaccatcaccggttagtttgaaaatatagagaaaaccaagcgattatatatatactttataaaaccagtcgactttataaaaccggtcggttctgatcaatacttcatccccggtagtatgatgccgtgcagtctatccccagttgtaggagcgttaagtaccagcatgtcaacggtaaaaggaacaacgatacaaagagctcaagattttgagaaatagttgtttggtagctatgtttcctaagttctggtttttatttcatctcctagattctataactacaaattttaaatctggttaaaaatctactaaactgatggtagaatctaaggacccctttgaatcacgcgaatggaaaaacaaagcaatagaaaaaatataagattctgataggattgtaaatccaaaacgagaacgcaagaaaaacacatcaatgatcgtttgattggatcgtataaaaacgcaggattcatataagaaagatagactccaaggatattttccaagatgttagttcttattaaatttcctctaaaatctctataggatcgtttatttcatagaaatttcaaataatatgatatgatttaatctattatttcaaagaccttcataggaaatttttaaatagaattgaaatcctccaaagtttccatgtttttcttccaaaagttgttgctgatagaatctctctcgaacaggacatctcgcgaagtgtatactggcccactccacccgtttcggccctagttacatcaacgataggtacgtgctaataagatcagtacggaaaatagttgcggaggcaggtaatcttacatactgccctctattagttgaaaacggagaacatgtactaatggcacccaatcatcaaattcgctattagctgctcttatcctcttttgcctacctacaagtactccacaacaggaacaatctccccgctgttaccagctgtgttgcttttgttactactgctagttttttagagtagctagggagagtgcaggcagaggcagggcaggggtggtgaatcggtagaggtcggcagcgtggtaggccacggagcagctgctcatagtcacatctgcatttccaatccaaaagcaggaagcgtgaacgaccgtgcaaaaatgaatggagtcaggaggcttggcgtcccgtagatgcagaacgcctttgatggatggttgcagcgaaggtgcgtagtttgcactttgcaggtggttgatgggaggccatcagctgatgtgaagtccattagtatgacacggctggggcttcatgtatgccatgcatgtcaagcaacagagggctggggctcatgtatgccatgcatgtcaagcaagcaacagaggccgagccaaacagccaatggtagccaaacagccattttattgacaacaagggtactggagcgatcaataaaattggaacagaaggagcatggcactcaggctgatggagtcatgaatggatcagaaagcaaccaaccgaagaaaatttgtttggtgatagagtggaacggatgggctgtttcagagttcactgtaactccggaccagaatacaagaacggctcccatcaattatttcttcaccagacagaagaacactgcaaatatggttgttagttcccgctactaggagcaaagtcaataatatagcccgctgtcggctcttaaaaaatagccacatcatttatagcatagctcatgcttacaatagaactactataacacaattattttattatctttgtgggacccgccatcttgccttatctcattctctttcttcctcctaccccttctgtttctgtgttcgtcttgcctgtggcctgagcgtgcggtagttggagatgggcacttgggcttgggcagatggccatgcgacggatacggaactacgggagacgccggtggccgtgtagaacgagggcatcatgcgacggacgcgggagacgacgacggctcaacgaccgcggcggcgcggccacggtcgtggctggtgagggccacgaccaaggctgaagcaagtgatggtgacaacgtgatggcagtggccggatgatggtcacagctgcggcgaacgcagcgacgacgactgctgcggccgcgatggacgagagccacggttgaggatgcaagcgatggcaacggcgacggccggggtagacgagggccacagttgcggcggacgcggcgacgacgacggctgcggccgcggtggacgagagccacggcagaggatgcaagcgatggcggcggcacgacggcgacggaggcggccacagggggatgaggacgcctgcggacgcaggtgagggtggcggcgtcggcggacgcaggcggacgacagcggcggcgccgacggacgcaggtgagggcgacggcgccgagagatgcatttgacggtggcggcgccggcagatgtaggcggatgacagcggcgacgccgagagacgcaggcggacgacagtggcggcgtcggcggacgcaggtgaggcggcgacgtcgagagacgcaggtgagggcggcggcgccagcggacgacatcgacggacgcaggcaacagctgtggcaacgagggcggcatatcccgacggatgcggtcccacgaccttgggccgtgcgtagagccgggcgactaattagtcacccgttcgttctctctcttcccccctctctcctccacgtcaccgaaaaatccgacgtggacatcctatcgtcgtttattgtaccgctataagggcatccaaaatgtactacaaaatagtccatagggaataatctattccattcagccatctagtaatattgtgcaactagtccattaaaggaaatagcaaaagatatccatatgcatatggactacctatatgacataaataatattatccatctttacctctctctcttctcctaatgttacattgtatccatatacattgtgattgctatagttaaagtttatttatatgaatcctatctatatagaccatttttgccatatacattggtgatgcactaacaccggcaatgctgatatgttgcggcttgtagctagcctaggcttctagactacccatctaacagcacatctagactgtagtataaatgagtacaatgaatacagacgaaactagtgctgttccattcggacggaactggaaagcaaaattgtgctggaaagaatattttgttactaggaaagaatcagtgttacatagtacaatgctcttcaattcccccaaagtatacaagcggatgccatggtaagttaattcataaatacaaaatggaaatgttttgattcaggcaggttatagtgtacggtagaaatgttccttgtgataaggagtaccagtcatgggcttcggtatgagaagacagattatgtgaaaccagtattagcctatttggttctgcagttctgcaaaaacaaacgcttcgaaagatcttttcctttagaaaagtcttttttaactagaacagcaagaaccttttgtggcggctggagcttcagcaacgttgatcgtagttccttgcatggaacgcccatttgtagacgcggattcctgagctgcaagtgctttcttgcttacaatctggtgaatttcactcaatacagtatggaatgctttctccacattaatcgcttccagagcagacgtctcaaggaaggagagaccttctttctcagagaacgcatggccatcttcctcggggactgatcgtagatggtttaagtcagacttgtttccgaccatcatgacaacaatgttggcgtctgcatggtcccggagctcccgcagccacctctgaacattgtcgaaggtttgcctctttgttatgtcgaatacaagaagtgctccaactgcacccctgtaataagcactcgtgattgcacggtatctctcttgacctgccgtgtcccatatctgagccttgatagtcttcccttctatctgtctcaagacaatagtagacttttactgagatgaactgtagacacgtatggcttcagcataatcataaacagagaaaaatggatagcattccagatctatgattggcaataacaattatggtgactttaacatgatgaaaatgtcttcatgacaatatacaaacaaatcagtactaagaacaatatatttttttctttgattggacatgggaagatctatggttgaagggtatatatcaattgattaatcaacaaatatagttataccacactaacattggtggcaactacaaactgcactgcaatcccaattactgaatgctgattgaagaattgtgtcacaggcttacaagattctttaaaaatttgggttaaagtttaacccatgttattcttttccatttactgatgtatatgtattaaaagctgaaatgctgcaaaaagaaagtgatggcgtgctagaaacaaaaaaaaatcacttaaaatgtttgatcaaacaaaaagtaatagatataaccttctttgtctaattattgatactctcagaagaggatcaggaaggacaaaacagagcataatgacatggttgtgctcaaggaatgtaaggactgagaaaaaaaaaacaaaaaagacatttccagccttataataactgcacataaatggtatggaagtgatgaagtcatctgaatgcaattaattcagagacaatacaatgatcagtgctatgccaaccaaacggagaagatggtcatactagtcaatctatgttgcccacaacagctattatgcattaggattatgaatccggcagggattgacataacctctttgacgaaattgacgttggaaggccagcatattggtgcggtagcatttttcctccaatgtagtataaaagtatgatgaatctactcgtatttttggcatttcttaacataatgtacttttggcatataatctactctcgtatttgcattgctaggaaggaccaagagggaacaaaatgcctgcatgaataggattgctcgaaagaattgacaatctagtgttaacctagaaatgacacgtatatccgttctctaatctctatcatctccaacacaaggaactcgcgaaaacataaaagaaatatgcgcggcattaccaccggtaccatcaccgcgatatcatgcaaacaaacaaagtgccgtattgccattgtcagcccaatcacgcgaccataaaaatcctgtgggtgtccgagtctgcagtcatggatccgggatctcaattcctaacgcacaagaacccgacgcgacatcacgacgcgcgccaatcgcaaaattgtacaagcaagcaaggggatcagggggggggggggggcgggtgggcgtcgcgtacgcgggtacctgcagggtgcgggtggcgaactcgacgccgatggtggacttggactcgaggaagaactcgttgcgggtgaagcgggagaggatgttggacttgccgacgccggaatcgccgatgaggacgatcttgaacaggtagtcgtactcgttgtccacccggtgcgccatgatctccccctcccgcctcccctcacgtcccgaatctggaacgaacgaaaatctcccctccgatcctcgcctcctgaccctctcggttcgtgcgcctgggggaatggaggtttgaaacggtgggggcagagggcaggcagatccgagggggaggagagagagagagggggggggggacgaggctcgcgctcgctctgcgctggcgcggcttgttgttgttggtggtcgcgtctcggccagccaatcgacggctggcgcggcgttttgtccctggctggggcgggcttgccagatctggggaatgtggccatgtggtgtgcgtggtcgccgtggtcggtggccgcgtgtatcacctgcctcgtcggtttggttcgtgggcttgatgagttggttatgtgggcttatctatgggtcaccacctcggcctcgacggcctgctcgtgcggaaagtatggggtcggggcggcttcacggctcggcccaatgcaagcatttcacaccatgcagatatatacagtttcgtttttttcgatagatgaatactttctggaacacaatattttctttcccacatatgcaagcattcacacatactgacatgcaaacactattacactgtcaccactaacgttacatacacgtggccacgtgggtgcaacctagcagtagcaacacgtctaaacgtgagaggttagcctcatgcatgtagcaaatagcataggtaccctcttttttcactaacacgctaaaagaaatacacgtcaatataatagaagaagacggagtttagttacacaatgcaaaacgtctagaagggtgttgcaggggggacaggggaagaaaaaatcgaaaaaggaaaaaagtgacaaggggaaaggttacttaaaaacaaaaaactcctatagcgagggatggtagaggagtagccccactatattcctagaaagcccccaaaagcagtaccactagcagatgatcacagacggccttcctaaaagacagactccaacactactgaaaccaacgagagagagagagagagagagagagagagagagagagagagaaatcgaacaccccagagtttcactccttccacagctgccaagatatcgggagtacaagggagctgaaacccttatgaggtgctctgacaagcaggccctagtagtcggccaccagacctagagtgagcaaccacgggaggggacaaggtcaggctagccaggaggagacagaacatgatgccagacctggtgagcgaaaacacaatcaagtaggatgtgattcaccgtctccatttcttgggcacggaggggacagactgagtggctgtcaataccacgctttagaagaaggttggtcatccagcggcacttttggaacgcaagctacaggaaaagcttacacttagcagggcctttagcctgacaaagtagattggcgcaagcaaaggagtgttggccgaggaaaaatgtctggtaagccaagtaacaccaatcgcttgtccaacgctaagagctggacacaaaacaccgtgtcccagatcacgaggaattgggaaatgatagggaccgtgagaacgccacggatgtcccccacccataagttgttagagagagcagaggtgattgtgcgcgatgcccggagatgtggtggcacggcaaggaggaggccaggcaccaaggaggccaccgagcgaccctcaatccattggtttctctaaaagagagacgtgtcgttccctggcacgaagaagatgaacgacgcagacatatctctcgagggggccttcaggtcagcccaatagaggtggcctgagcgctgaagccagagctagcgaaggtgaagaatgaagccacaagtccacaatacccaaaccaccgatagctctggggcgacaaacactcgtccaagacataatgcatcgtcctccctgaactgcatccatacccgtccactggaaagcgcgacatttcttatctatggcattgacaacccagcctggcgaactaactgccatagacacatggaccggaatagaagatagcatggactgaatcagcacagaacgatcccgacccatctagggagaaagtcggtgagaaatggcatcacatatttaaaaattggagacagagcagagtaggggaaggaactctggaccagggaaatatgtgatgccatttgacgttttatagacgttcgattattcatcatattaaaagaattgtgaaaaatatgtaaaaacacgggttatgcttcagcatgtacctttactgataaaataaatcacaataaaataaatagtagacatatagtttttttaataaggtgatatgtccaatactcaatagcgtttgtattactacctccatttcatattacagttagttttgattttttttctaagtcataattctttacgttgaccatatttatagaaaaatataaaaatattatggacataaaacaaagaaactatcaaaatatattcattgttagatttagtaaaattaatttggtgctataaatattgttgcatttctactttcaaaaagtttgacttaaaaaaagtcacatcgacttataatatgaactcggaggaagtatgtatcaaaatgggcatgaatattgatttagcttcgaaccaacccaatgactattacttcctctgtctcaaaatgttgctatctaagataggatttgacctattctaggacaatgaatctggacataacctctgtctagatttgttgttttaggatatgtcaaattccatccaagatagaacatttttggatggaggaagtactattcaaactgtcaatggattgataattttttatcaatccaaaacagtcattaatccccttaaaacttcacatccttatcccatctacactcctggtcatgtttaaagataacacttatcagcctctccttctaaattatcttttcgtccggataattcagcccatccagatagaccgtcgctctcagacagactcaatctaagcctagctagaaaaactaggcagagccctcagcctgctattgattaccacttaccagcccgatttgggccaacaacgccccgaatcggttcgaacaggtggcacctttccacgacaccttgctgctgcttatccagttatcccaaacccagattagacgggccgaaaaagaggtttctaccccattcatccaacacgccgcacatcgaacttcttatctagctttccgagtacttccaagttccaagtccaaccccttctatcatgctccatgccgcgcgcatgcatcatgcacgctggacgcaaactacgtgtcgaccatggatgcgacgcgacgcgacgcgaggcttgcgtatgtgctcctcctccctctccgcggtgaaagtgaaaccgatcgatccctgcaaataattcaccgcgcgcgcactcctcctcgggcgccgatgggtggatacgtccacgacgcgttggttactttcgcggagtgcaaatctccggcttggctttccccccgtgcgagccccgcggacagggacggggtttcggccccgcgcccttggcggcatcgtcatccgcatcgccttttccgtctcgtcgccaccgagccgtccccgtccacggcaaacaggatagaaagcgggagcgagcgaggcagcagcgcccgcgcgcatcgggcgtgcgtggacctaccagcccgccgtcgcgcgtcccgccggccactggactgcggccgcgatcgagagcgctagccaacgccttccggatcacgcgctgacacttgtagaccctaagacccggacggccggatcgatctccgcgaattattgagcggaccggctatatacgtcctagttaccagtaaaggcatcgatctttcgggtgggtctcgtcgtatcgtcgcgtgcgggaggaggagagaaaaatcgggagagcgaatcgggggccgtgtggatgtgcgcgcgggggctgccggtttcacgtcgattctcggcgtcggcggccccgccgccgtgccctggccttccggtgcgtggctaatttcggcccggccggagcagatcggtcgatatccgcggccgaatcctgaggaggctatcgagataaggatgaaccgcgcgagccaggactgcaggagcacatcaatgttctggctggtgttctcgctcgcgccaaaaaaggcgggcatctttttcgacgaacccaaatccacttcagataatatctccactactcgctcgccgctctgatatggcacgggcatatttagccgtgacatgatggcgtgcatggtgacctgttacggtgtttttctctgggcccctgttacagtgaaccttggcttgatcgcttcatcatcagctcgacccctgtggaccgatggagttgacgacgactttgcatctctcgacgtacgtacaaccagccaatggcggcacgacaggatcggcatggaggatgggcaaaaaaacgcatgtcgcgtcgcgtgagccgccacgccagtgacggccgagaagcaagaacagttcagccaacttccttggaacgggctgactaacacgcacgcagaggttcctttcccatcataacctgaatcagtctcggtcattctggaccagctcgatcgctcggggccaatcaagttcggccgtgtgcattgccgcattcgggcagtttgtgccgtcgcaaactgcaactctgaaaagtacacgcccgatttaagcaagtgatagtgatccactgatcctgggttaaatccagtcgaaaaccgcaactaactctggaaagcgacgccgcccgatctaataccgggatcctttggttaaatccaatactccgtatacgtcgcaaacacacagccgttctgacaactgttgactcgtgcactgcagaaagctgatggaatcgtggagattaagaaacaaagaagctggaggtgcgtgcagggggagtagtggatattccgggtggcaaatggcctggggtaggaggcgaccagcgagaggaaaagaagaggcgacgataaggccatggctcaacatcgtccttgggacagggaatggaatcatcctcgtaggaggtgaggtcaaagtgtgagaggttggaggtatatgctacggccccatcgattcctcccgagtgcaaagtcaaataggatgcagtgcattatgctatccagaatctatctatctatctgctggtcagttcctgcacagagccggggacctccctgcgagtacacttgttgatcctctgtaaaataaaaaacgagaacgaattcaggggatcgaaatgaacaccccctatcagattggttctcgcacaaggtacaggccgctaaaacaaggctttgcacgtggtaaattttcaagtgccaatcactttcggtgaattcgatcattatagcttaaagcctgaaacctgttttttggggacggcgaactaccgtgtgtgttctagtaatcgccctgaatgcgaggttatccgcatatgatatctcctgttgattcgagagaggagaatgaaagattacatctttgactggctcaacagctgaagcacgaaacgaccttgttgtgtttgttgttcccttggattgatttgctaagatcttcacagttggcttatcatttcactaccacttgcacacgtgttgcctttgacaagacagattgttctaaggtcccaacgtggatgctatgggccccaacatgcaccatcttatccaaagcataccatatcaatttcgcatatactcctacagtcctacgttgatcagttagtcgtacaagctagcctgcatcagactgatatataagtcaccaagggttatacttcctccatctaaaattctcacccgtattacgttttctaatttttctatataaattgtatgcattcgtaatctacatgtatgcaagccttaaatgaacagcgtgatcgttcgtttagcgcgcggcgctggattaaattgatcttgtgtcccgagcagccatcgtcccactcttttttttttatttagaaacaccaaggggtttttcggctagcttcacaaggtggtgggctatacgacctggattcgaagcctcatcatttttaattatttaatattaggttcttccttaatattcgtgtctttttttagcagagacgatgaactcatgcattacgcagccaaccaaaccaacgtgcatatgaatcgatgcggatgtttaattgaatgaacgagtatttcgattcttgttggtttcagtgataaaatatgttgtagaaaacttttggacgaaggaagtaatactaacgtaacatagcacaaagggtatataaccaacacaataggtatttaatactctcatcgattcagatataaataataagagacacaagtctaattgtcaaatccatttcatataacggttttcaagatatattgatactcctataaatttatacaaatgaattgatacacttggatagtcagtcttagcatgcaccttactattattgtctctaagctccatgtgttgttgatggctaccttttgtctgggttatggataccacatacctaatagtcatcgactaagttcagcggggtccaccatatactaagtcttatacggaatcatattttttatatagaaagagttccgaataaggaaggacaagaagtgttttatatggaaactataaagactgctcggattatatttatattggtcgttctacttggacaatgagacttctatgggtataaatacaagccccctaggaggagaggagacacaacacacaagtcaagacaagctaaacatcgatattggagatagcctagatggactcaatccggtgcctgcggaggctgacaagagagatctagtgctatctctgatctcgccaagtacgtattcgacgaggaggactactctgtcgtcgactacatgttgatgatctattctgccaagtcgatgacagctagataggttatcccaattattatacttgtgtgatccatataaataaagaataacaccggccttcggccaacaggagtagggtcgttaccttcctgtgaaggggcctaaacctgtataaaaatccttctctctatcttttttaccttgatctcgcatacaccctggtaccaacgatctccataccatgtaaataccatagtcatgacctcaaacgtcgacacctatcaagggttagggatttcgtaccggtgaacaattacggacaatataagtggcaacaataaccaccatacgcacaattcttaattggcactagcattaattagggatgtagcgtccaatttctatccctaagtagaataaagtcaccatgtggtatctaacatgtaggatcgaacacaagtaaccaagcctaccaggggggtgaatggtagggaaaactaaaaacccaaaaaattttagcggaaataaaagttaccctcaaattgatggaaatctcgacgtagtcctgtcgccgccggtcggaccgctcgcacgccgccggttagatcgcctccctgtcgcctgaactcgaagaaacacaaattgaagaactctcaaagtagatgacaactttattgcttctctctatatttacaaagtgcaacaacaacactccttacaaaaatctcgactaaactcgaaaccctaactaaactatcaacttaattgctctcaaagcgatatcgggaggcctcaccctccctctctatttataccacaaaaaccccctactcaaagtaggtgtagaactcctattcataataggactcaatcccataatttcctttttctccaaaactacagccgcacagaagtcggactcctcctgccgtcgctgctgctgcttgctgcctgagccgactcggcttgcctctgcatggatcaagcctgccatcactgaagctgcttgaccacgcaacaaagccaaagtcagtcaccaccatgcatacatacatgcatcacacatgcatgcacgtactgcatgtataccacacatatatgcacgctgcacaccagcacgcatacatatatgcacgctacagtacaccacagtactgtagcaccatacataagcctcttccaatttcttccaattccctttgcgaacaccgatgcttgcacgcacacctcgtgaagcccgttgcgaagatctctcccacacggtatccatccaccgtatgccatctcgtatccaacttcgtcacccggtatccttgacagtctggacctcaactccttcctgagtctagtcctgatctccaccgttgaccgaagttgacctccaagaattctaactctagtcaccttctcacatggtatcccgaccgcactagacctctgtttttctctgaacatagtcccggtcctcgccattgaccaaggctgacctcaagtcacctacacacaatcagacaaaacaaccgtttctgggcacagatatcacaacctgacccacattagtcacacgcactcacatcaacatccacacatcttttcaaaccaattcattgattaaattatttgcatagccaattgttcatcacaaatattaatcatgacaatgatttcacataacatacctcatccgttcctcaatacaatgactcatatgtatcgtcatccatcgcttcccggtcccacactctatcaacctccggtctttcttttaaaaccctcacacaagtacaccgaagctagtatgtcgtccccatgaagctagtttggttgcgcataagttttctatgccaccgcctatcgttgccattacatccaaaaagaagtcgtcatcctactattctaacaatgtgccaaccgcttctacccatggtcagcaatctcttagcaacccgacaacatggactattctacttgcataactatgtttagtcatgtgggacaagttaacgagtgtttgtgcaactccttgttggagacacaccattgttttactatgtcttatacaacaacccgtataacttttttagatgttctgattaaaaatcctagttttttacattattagaaatgaattaaatgcagatacacaaaatcaaataaattccatgctttcaataaatgcatttgttctatatatatatacaccatatatacatttatggaagcagatttattgaataagatattcagctggaagttattaaataaagatatctttaggctgcacattttttcatatatgccctttaagcaatatgaaattaccatttatagtcttcatcatgtgcctttaaatactgccaagttggagacacttatcagtcaagtgttcttgagaatcctcatctccaccctcaccatagaaacaggactagagtcctttcacgtgtcctagatttgggcacctttcttttgatcaccgaaatggaacgcaagaatccgctccctcagcaagagtctgagcctcacgtcgaaggcaacaagtcccctgctcccaccagcatcgtcgacgacgccactaacactaccgaggacgactccgcgttgagggacctcctctacccgcaatctctcgaggtaccattcaatatcttttgtaagcatgccgttattcttttaattacgttatttgtgttcgatgcgttcttatttatttattaacttaaaaatattcacctataaatttatttttatcgattacatagaaaaccttatgtctaacatgagttttcacttgattccatggcttcaaattttatattacttttatataaatgaataaaaattataactatgcaccaagacaagaatatgtctagatgcaattgtattctagaatgtactggatgtacaaggggcaagtgggtccgtgtttcagtagtaacccacttgtccccgtttgaccgcttcgtctcgtactagtactaccgtctacagcgtcccgctgatgctccatcaaaccggtggacgtagacgatcggaggatctcgccgtgcatcgcgtgctttttcggccatgcacctctcgtcgtcttcctgatttcgccgccacttgtagcatctgcccgtggggtccatcggtcgatcgatccccgtagccagcacatgttgtcgtctagctcaagatttgttggctcgccttcccttcttttcggttcactcttgctagcgatcgagacgacttgagaacaaccaacggagatagctagccgtctcgtcaaagctgtgtcatcagccgaccagcgaaggcaaactcgcagaagccatcgtgtcataggtgtggtgtgtggagaagcggtggaccgaccgacgacggcggcaacccgcacggcgaggcgaggcgaggccgacggcggcggcgcgcgtccacgaaaagcgggggggtatctacctgtttttcgtataagcccctcaagatctaggaaatcgcggggcgtggtcctcggcccggggcctttaaatgcgggggcacccatgtaggccggagcagagcgccacgaggcgagttgttgggtgttccctagactagccgtctcttcctcctctccctctcctcctcctcccgccgccgcctgcaaccgcttcacgtggcctgatcctcctccggagctctccctttcgaccccaacaaatggagcccaagaggtcccctgcgctgccgcagcccaacgtggagaccaagaagtcccctccccgcgctgccgccggaggaggcggcggcggcacagctgccgtcggtggcgagtcgccgttgagcagcctgttccaccagccgtcgcatggggtactgattcctgacgccttttgcatgtttgatgttatgcctgtgttcaggcccgacgtgaatctttcctccgaacaagacgaaattcgagggtgttctttcgttgtttgtttgttttttttgttttatttttttttgttacggtgacgcggatgacacgggatgagtccccctccgtctgcgaggcgttgatacatgctgaatttgcctttcattccatcgctgttgcacacgcataaatttagtatgcttttaatgtagatatgcccccccccctcctctttctatttgcgaaaattagtaattttcaatgtacaggcgcctgtctttccaagtggatacgcgatagtttgtagaatacttttggaaatcaaccttagagattgtttatatagtttgatggtgatggtatttatccaatcccaaagtattgttttgccggcgctttgtttacacttagtgaattcctttacatttttccattttcaggcaaaaggcaaagaagacatatactccattttctacaaagggcagaacgggactgcacaagctgggactgcaggtagttgtggtcttgtggattgacccaatctcttccttgctcttatgtaggaaggacattcttattccttggtgccattaaagacactgttgcgaaaatggaacataataataagcacaactatatataaacgaattcaaataaacccaaagaataccagttccatataaagcttgaaaattagtagcctccttttcatctgtatttactatttgcctcctttcttctgtaattaccatttgcatctgttggatatctctagagttaaccaacgagaaattactttccatctgttactcttgtctgcaccatcatgttttttttttcttttgtggagtgtcgttgactgttattcatctttgtgatcatcttactcggttcagactttagagcactgagatgtttcacgatagcaaactaactgcatataaacattgatttgtatgccagatggtaaatcccagtggactcctcctaaaagtcgcaccgtgtacaccaaggataacaaacagtcaaatcagtatgattcggttgatacgtcctgttttggttcttctgtgaactatggtggtcgagactattatggaatctctggacacaagcaatccacagaatccaatgatgtaagaaattgccaaacccaaaactgcaaattatgtttgcaattactttttttaaaaaaagtatcatgaactggtctatacaactataccacaacaaagctttgaatatacttttgctttattgctttcagtataaggcggacaaaaaggacccttccacagattctcatggtgactggtggcaaggtatatttacttatttagatatgcatttatctctgaattcaagctccatattgttgaaatgttgattatttatttctatcaggttcgttttactactaagcgaacttggtggcctctcccttggtggaaaaggtaaaaggcacatcttaactgtttttatggtttgctgctattgtctgtttgtgcacatgattatatgctattcaacttacatttgcggcgcaatggaatatcttcttttccatctgacagttcatagatattggtgttagctcactcgacctattttatcaattatttgatactcatgttcttttttatacggaagagaacatattctcttttgttttgttttccaaaattcagaacagttatactagaattcaaactactaagcctttggaaattattggtgatgatgtgcccaaccaacgtttcaatacaaaaaagagccaaaaaaaactatttatatgaggaactgttactttcagctgcacatcccaaatgcttctaagctctgcatattccctccccctcaaacacaaacacatgcaaagtttatctattcatgtgtcaatatcaaagttccgtgcctccatttaactttttttttcctgcacgataagctgtatggttgtaaaatttgacgaggttcagtgggcgggaaaagggtttaactgtcctggagtgaaaattttagttagctcctggctttatatgtctccatcactgtattagttacaccactatccctataatttattgacctagtgtatgctacaaattcacttcgaggaagcagaacaaaattgcaatgaatcttgtgctgatgttccattaagctgtattacttgcataccgtgctgtgtcaattttgttctggtgaaacatgaatcctccataagaggattaggcccaggtcccatctggtaatgtagtttcataaaattcaggttattcataatataaggtagagattgattttctaaaggctgtttttaagaaaaacaacttaaccctaagttcaactacaaaaccaaagaggtttaacgatgaccgtctgtacgagaaacaatccgttaatcctaactccagctacattattttcactgtatatttgtgttattttatcgaatctaaccattatattgggctttttgtgccagggaatggaatgggaggggttggagctggttttgcttcactgttgctatgctggccgtatcagttacctaaatcatactagtgtgacatcgtccatcagtggtggcagtatttggatcatcacacctgggcagatgtagtgtgtctttaccttttcatttcgtagcttgtgctttagatgtgaaatgaatcgaacttacaagcacagtaagttttaggtcgcaggttgcataaatggtccctatccattctgccaaatctggtcagtaaccagattggatcagtttggtctggctctcttagatcgaagtatatgttccttgtactctcggatcttcgctccggagccaagaaggctggagaagtggagatcacttgcattgtaaacatgtactcgtttaatttcaaagaacttagcaaactgttcttataaatagtagtacttttattccaacagaatcatcaactgcattattcagaaagatccaggagaagtcacatccttgaatttcacagaacttatcaaactgttctcttatagatagcaccactattcgatagtcataaaggtactttatttcaacagagtcattacaactgcgttatttagaaagatttatgaaaagtttcacgtgacaaaggtaacatcagtttatatatatatatatcggatagtcaaagtgttcgagtgcccttccagttccatccctttgctcctcatggcagggtgtatgctgcacagttgaaaaagaaaaacagatgacttgatgcgattcatattttcgaaacagactgaaggaaaaaaaaaaagcagcaggagcagaaacttacggccacatttgtaaccgatggggcggttggcgatggcgcagcgcttggggatggtcatggccacggcgggcttgacgccggcgctccgcgcggtgttcgacagcatgacggcgcacaggcacttggggttccgcccgatgctgcgcacctgcgcgcagcagttgggcggcaccgcggcgcgcgggttctgcgtggccgccgcgcacggcgccagcttaagcgccacctggtccacggggacgcggccgcactcccccgcgccgcgcacggtctccaccccggcggccaccaccaccgcaaccaccaggagaaaccacacgcacctcaccttgctctccatcccgtgcccgccgctttccttttcttcttcgtcttctcggcgtcgtctgcaactctgagccgtgctgcgatcgatgatcctccaggcgtctcacggggcgagtatttatgcagcgcgccggagcacggagcgtggctcgaagccatcattggggggccgcttgagaattcccgcgggtcgcacggtgtgaaagcctcggaagtggaggtcgcactggcgagctctttctgttgctcgcactgagctctgttctgtccaatttggaagtgtcacctactgcactccactatgctgaggggcatgcttagcgtccataaaattctctccgaagagcctgaagatctgccacgtaaatggcccgtgacggaaagatttcgctcgccgatcggttcacaatcatcaccggtgtgtcggcggcctgcttttagatcagtgacacggccggagttcttgaaaacgcgagaaggaatccacactgcctttcccggaccgtcacagacctctccagtacaaagctgcagtaagaacttgcagccgtaaaatctgctggtgccagtctgccagaggcaagaaccgcagtgagttaagttcctcggagttcattggcttgattcctttgatgcactatacggacagtggagctttaattaaccgtgtaatcatgattttatacacttgttatacttgatcacgagcaaataggagcacacaccacacagagcttaacaccaggaatttcaggcgatacagtaagaacatgaatgcactcaaatggcacaagtatacacaaagactagtagtccttaacaaattttatgagtaaaacctagattaccctacattacagctctgtggtcgtcgagacatcgatcatcttaccaccgctgattatcacccccattacttcaggattaactagatcaattgccaaggctttctttgcgccaaaccccctgttgctgtaagaccgtctccctgcacccagtgggctcctctctttctttgatgggcttgcaagctgcgccggcgagaagctgggcgtcgcatatgcggtcacaaacggtgtgcctgaggcaggcacttggtacggtggaacagcagccttgttgcaagcaatcctgcaatctgcatcaccctgtggaaaatgctctgcatgcctgttcagttcatcgatgttcagtaggtcgtcgatgcgagcgacaatgttggacgccagactctccagcacccttgaataactctccagtattgatttacccacatcctagaaatggttcaagacataataatgacaggtgcatcagtaactagcatggcaatgtggataaaacaaacataggaagattcagagagatactgcacaaaccctgttatactgaattttgctcatgtccaagcttgtctgcgtcagtccaggaaacctttgcttcaaacatatcagtaggccctctgctcgttcggcaagcagctccctcttctccgtgtctattatcatgtctttcaccatgccccaggatgatctgccactggtggcacggcctaagacacttgctggttttgcagcaatcctccggcgccacacatacactgatgcctcgacacggttggcgatttccagtgcttggtactccgttgacaggtccaggcagtcgagaaggcactcaggagagaaatgatcagacgttatgtagcggtatatgatgtcacccaaagttgcccttccattctacatccaagatgaaggtaacaagctgagatcaactaaattacacatgaaatggcagatgaggttaggtcagggtagagaggcatggtacctttggtagggattctagatacgattcagggacctccatttcagctagagcattgctgttgatggccaaggcagccttcaagatttgattagcacagtcacgtttgtgctgcagttgcttcctcgctttgtcacgcaggcctccgggaggaacacgaggcaccggcaaccaccatttctcatcacggcggtggaaagctgctctgaaggaagctgagccatcacaatccggtgcgcatatcccttgttcaacgtaccagaactcagggtctctgaagctgtccaggatttcctgagaaatattgctctgagaaattactaaatgtccgtgttaaggttggattgtattgaattcaccgacgtgaaaaactcacaatgagcatatggtctagcttccgaagtgctggcagattgatgtataaatcagatcgtggtctgcttgtcatgacctgaaatgttgcaacaggaaaaaaattgtagcagtacattttttagtgaggaaaggcaaacttaatagaaaaactgtacagcatttgtcagttcgaaaattacacgaaatcaagaacacggaacacgtatttcactcatgtatatgcagcactaattacacgcactactgctcattgccaatggattcagtactaataggtggttagtaatcaatattctgcaatatttggcagccgcataacatgtactagagatttggtttggtttcactatttcagtacccacgaccaagggctgcttatcatcttcctacgttgtcctccgtttcatattataagtcgccttgatttttttaaaagtcaaaaattgtttaaaaaatattaacatttatagcatcaaattagttttattaaatttaacattaaatatattttaatagttttttattttatgttgaaaatattgatatgtttttctataaacttggttaaagataaagaagttcgacgtttattttaaaaaaatcaaagcgacttgtaatataaaacggaggtggtattcaaattttcaaattgcgttgtttaattagatgtatgtaaaacatgttatgcgtgcatgggtttttctattgatcccatttaaccaaggatgatactccctccgtttcaaaatgtttgacaccgttgactttttagtacgtgtttaaccattcgtcttattcaaaaaatttaagtaattatttattcttttcatatcatttgattcattgctaaatatactttcatgtacacatatagttttacatatttcacaaaattttttgaataagacgaacggtcaaacatatgctaaaaagtcaacggtgtcaaatattttgaaacggagggagtatattgatatgggcatctgttgtcatgttagcatgtccttccatgacattacattcgtttggttacagtttaggactaagttcagatacggaaaacatgtttagttaacaggtttctcctttctgtggctacagttctcgcactaaatataacaaaagctgcgtatgtacacggggtacgtgcactgtttcagtatctacggcctacggctgtttatcgtcctgctctgctgtatattcaaattttctggttgcgtcgtttaattagctctgtatgtaaaacatagcatgcgtgcacggcctttttattgggtacagatgcgaaaatatacaacagttacagtgatacagtaacatttttgtctttcttctccatgaagctgaattcagataggtaaaaacagtttgctaacaacggttcgatcccattttctagtggtccttgtgcaactaaagtcaccattatgaacctttcccgtgcagtgccatggtatcaagttctatggaaagccagcagttgcacttgtacttatatagagcaaccgctttaatagcctccaatttcagaattgaaccaacaaatcctatcgccagacagcgcagaggtgttgaataatcaaattgaaataatgggagttaaccggacaagcaagacacttgatgaaccgttttgaatttgcagctcctgaattgagccagcctacacgggttgatctgtctgtgaccgtacgctttgagtagaaaaaatggcgcggtagccgctcagggcctggagtttactaaaagaaaattttttcggtgtttggatgtttgacaggacgttggaaggggttttcggacatgaatgaaaaaactaatttcataactcgtctggaaaccgcgagacgatttttttttgagcctaattaatccgctattagcatatgtgggttactgtatcatttatggctaatcatagactaattaagctcaaaagatttgtcttaccatttctttctaattgtgcaattagtttttttaaaattttatatttaatgctccatgcattgatatttttggaattttttttaaaaaaaactaaaccaggcctaagtgataattgcagccagatcgagctgctatgctagtgcgtacctcgagcctggttccgtcggggaacgattgccaggtggggaccagttcgacgatgtggtcgctgacgcagagcagccagcccatctcgcgccgccacatggccttcttctccggcgggagtggctccagcctccacagctgcccgaagatggtggctgcaagagacgcagtagaggtgcgttagtgctagtacactgtacacctaagtagagctccacattgatcaaacggaatcatgaggtggggagaattctcaccgcagaggttggtaatggcgttggcaatggcgagcgccgtgcacacgcccttgccgctcccggacatgtcctccccgagcagcagcttcgcgaacctctccttcatcatctccatctctgctcatcaccatgcacaagtatcatcagtacgctgcacaacctgaccaaggagaagaagagcgcgcgcattgctcggtagtgccggtacctgagctgggagctctgcgcttctgcgcgtgcggcttgctgctgtccaccacctccgcgccggggacgcggccgcacgccgccgtcttcctgggcggcgccgccagcgtcacgggccactcgtcggccgaggccgcgtcggagctggagctgctcccgtcggcggagtccgtgaacgccgcctcgctccgcgcctccctctcctcctccccgctccccatccgatcggtcccaaccacgcgcgcgtgacggggtctatctaactagttacacctctccgtacgtgcgcgcttgctttcgcgggcgcgggtgtagtacgcgcttcgctgctccgttcctcggccggcgcggccgagttcagctccgcgtgcgcgacgagacgcgcgcgggcggggcgtggcgtggtgatttgcgcggcgttttggcgtttcggtctcggtcgtggcgcggtgcggtgggcgaacggaaggctaggcgcttaaaaaagttgggcttggctggtcgatggggaagagtgaccgttgggttttgagttgtctgggaggccttggcgagtttactttttagaggcggagagagagaaggagagaggttttccctttgtttttcttttgatcggggagggtgggatggaaatggaatcatggaatggaacgggcggggcggcagcggcgcgcagtaacggttagcgagtgaggtggaaggcgtgcagataataaagaggctggatcggcgtgatggaaacgctccctccttgctgctcctgcggtgctgccgttctcgttctctcgccttccccttgttggcgactttccgttgcacgctttgtgtcgctataagcacagaaagaaagtaaggaaaaggtaatggatcaggaaaaggagtattgatcaatagcacgaccgatccgtccctaacaatcataattaaggtccagtttgcatagcttagattgtgagaagtgaaaatctagagaagctgacaagccattttctagattctacatctacagttttttaaaatcttggtgaaaatctggactgcttaggagagcttctgttatcttttcaaaatgtgtttatagctggcttagagcagatacaatagcaaactataagccagcttaaacacatatcgaggagataaaagaagagagagaaaagcaacgggctacagatttgtagctaggtgtatcatggactccaagacacaatgtatatatgacaggtgagaccatgtattaatagtctagtatatatttataggtaattattgtactcaatccgtcccaaaatataagaatctaagactggatgtactagtaaatgtctcatccggttataggttcttatattttgggacagatggagtatgaattagttattagggcaacaacaatatatatggctaaagtagtacatatagatgggacccacatatatggattttaactattgtaaccttcacaatgtatatagatagtaaatagcattaagaggagaaaaaaagtagagacacataatatattttatcctctatgggcagcccatatgtttgtgggtagcttttgttatttctttgttatgaactagttccataatgttactaggtggttgaatggaatactatattgcttatgtaccagtttaggactacattgtggatgcccttaagttgactataaataatttagagttagtagttggttatattgttaaacttgctcttatttgctcttactgtaggacactgtcaagttaaggtcatggagagcaagccgttaaatatggaaagaaaacacggtggcagccagtactgtttgaatgtcagccttgtttactccatgtgagagaaccccaacgttagactgtctccaacagccttcacccaaattcattcgtttgggtcacgcgggatgtccgggtcacgcacccaattctttcgttctccaacaatggacccaaacgagcgttgagcgccgcccgcttccctccccgccgagcaccgcgcctccctccctccccgccgcggacctgcctcgctacgccggtcgctccccgttgcgggcccgactcaccgtcatcgtccgagggctcgcctcgccgcgccggcgtctaaacccgactcgtctcgtcgtccgcttccgcgtccccgactcacgcgggagctcagccacaagtccggcagcgagaccgtgcagtggcgggctgatgcagcacccgcacgagaaggatgaccgcgagcacgcggtggcggcgagcggcgagcctggatgaggcggttgcggggcgggcggcaccgatttgggtcgaggagagagacggacgcatttttgcgttctcactcgactccgacgcaaattgcgtctccggtttgggtactctgttggcctccgattttttcatcggatgacccatatgtgggtttaggtaccgtgatgggcaaactgttggagacattcttagggacccaatgtcaaagggtgcatcaattttctactcctatcttcactcactgggcatccccacaaacacataaagaacgttccaagtccgacacaacacggtcccatacggagtactgtattctgctccgataagccaaaaaagcctgtgttgatactgtgcagcagacgctctgagggccaaactccgaaggaagctacgcttgtcgcggcgtgcctgtccgtccacgcttccccactgggctgcacacaactaacccagcatgccacgccacggctcgagacgagcgtccatgcacacggcaatggcaattttctccgtggcgcggcgtgcgtcgcgctcggctcgcttcggcacgggcagccaggcaggtctcttccagagtgcaatattttggcttggcgtcatgtgacatcgcgcggcacctgatcagacctcattgcagggtaagctgagacactcttcaactggtaagtgttgtcgtgtggaccagttaagaggggaagtcaaatgcatagttcagttggaaggtcgatgtgcacctttagatacagcatttggtgttttggtccttgtcagtgtttggctatttatgtgcctagtttagttagcgtgtaccggccgtgtcaccgttgccggtggccgacctccatttgatagcagctggtagatggtcaccagtcaccaccatgctggtagctggctataagccagctataaatatattttaaagagataaatgaagagagagaagagcagcgggctacagatctgtagccagctgtagtacggagtccaagatgtaacgtgtgtatgataggtatgatcagatattaatagtatagtaactaactattatatgaattggctattaatgatttggagttagtagttggctagactattaaacttgctcttacttcaagctggagctctacacacaagcaagttgatggcgtaataaaaaccaaaggacgactgaagacaatatctgtgttgctttagaaaactctgaattttccaacaaaaggatccatgtgggcgtgctagagagtgatgagagcacacgttggtccatgaggctatatggtggtgtattgaggaaaagcatgtcctcattaaaaacgcaacccaaacataccttatcggcctcacacgccgaatgtgacacgggcacagggcgtgcgtatggactgattctcttcacccgggcgcccgtcgtgcaagcgtgtaacaatggcgaatcgtgatacaacatcttcctgtgtgacattcgtaaatgcagttgcacaactcaagcttgtgcgtgtagaccattactttccactgggcgttgggcaagcacacggttacacggggacacatagatagaaggggaagacaaacagttcggtcctattggatcgggctattatttgcaggtcgtcgggggtaaggaataagtctcttctacctccctcaactcacgtctctggttgaatagtatccctcaatcgtaaaaccgggtgtaacccatcctaaactctaaaaaccgatgcaaatcaattcccctagttttggaggtggttttgtcccacgtggcattttctgactccattgactagttgagtcatcttgtggaacccacatgtcagtgacaagaataaaaataaaaaacggtggggcccattatcagtggccactgtagtcgcacacattccccatgcggctacacatcgccttcgcacgtcccccactccaatccgccgctgccgaccgatacgcccccccacccaccccacctgccctaggcgccgccgaagtcgacgctctcctccagcgtgggcgtgcgcctcgaggacaccgtgctcctactcccacgtcatcattgtttccaccctggtgcccaagattgttaggctccacctccccggcatccacctcgatgacgacgcaaaggccactgcttccttgcctctagacaccaccatcaagcctcccccctcttggggtcacccgccagccaccgccgccgccaccacgcaatgggggcaaagggggaggaggagggaggacgcgagatgaggagtggcgaagaagccttgtcggcgcactcaagccgggtcgtcacaggagatcgatgagggtgttggccgccgccatgccgaggagctactccccccacgcagacggccgatgatctcatcccacgcgcggctatcgtccgtctggcgagctcctcccccatgcaccattgccgccaccctgcctctattgatggaagtgaaaggagaggaagagatgagagagagggggggaggtgaggggaaaaatgggatgaggtggagaccactgacaagtgggttccatctgatgacttagtaagtcaactgccatgttggacgaaaccgcctttgaaaccacccaagagtcaatttgcaatggttttgggagttaggggacaggttatacccggttttatgatggtgggatgctattcaaccagggacatgagttgcgggaggtataatagacttattgctcagggtaaaggttgttgttggtccagtccagcccagatattttattgtacaatacatatagagtaatcaggttggcctacttgctttaagccttttgggctgcgactttgcggcaatagcccatcttaaacggaaccgggccatgcatgctccagtctagctgttagaggaaaaaaagttcactctagaaccctcgatttatcacctagtttgtaattcgtccctaaaccgcattaacaaataaaacgcatccctcaacttgtaaaaccggtgtaaaccaccttccctcatccccccagcattccaccgcacctccaattccccatctctctagtgcggtgactgatggggagagggccggtgatcggcaggagaggagctagtcaacggctggcgggaagggcagcgcgcttccgcggtggactacctgccaccctcggcctttcaccgcacctctgattgcccatctctccagcgcggcggcggccaacggggagaaggccgatggccaatgggaggggagctaggcggtagcgggcttccgtgatggaccacctcacccctacccccggcctccgctgcaccttcggttccccttctctacagtgcaacggttgttgagtagaaggtcaatattcgacaacagtggagttaggcagcggcggtcgagtgagcttggccctcataactccttgagcggccgacaagagaggagttgggtggcagcgggtgacgacggcggtggccgtgtctgatggctcctccatgactccatccacgagtgcagcctctgcctttctccaagtcagcgctgtccttctccccgccgcgcgccactcgcttcctcccgtcggttgccaccctctccaaattagtggtcgtccttctccccgccaccctctgatcgggcatagccctccccgtcgggcacccctctccatgttggatgtggctcatctctccgccgctcactaccctcttgttgaccaccgctcattgccctcccatcagttgccacttgaatgcttgagaatttgagagatggggaagagagaaagaagagttggcagctaacatgtgttcccacatcagtcaaaactggacgctatattgcccatggatctcgggtacacctgttttgtaagttgagtggcgtgttatatctggtattgcgattcaggattgaattttagactcgattgcaaattgaaggacctcaagtaaacttattcctttgtcaaattaacaatgtgtaatctaatctgaacttcagttccgtgggccagacctttttcttcgacgctagacctgactacataaaagcgtagcttaaaactaatcccaccaaaaaaagccgcatttccatgccgaaaagcttcgattcgccgctatgatgatgtactcctccggccaccaccaatcaaaccagtccactgattcagtgattctctcaacaccggtggaaacgtggaagtgtgctcgatgctcgatgccctccttttccgccatctttttatcccaagagcatattttccgtgtcgcccttgccttaagagcagcatccactcttgcgctgccttctcttgttccaccctcttctctcattggccgagcagagctttgtaactgaagctgcagttgggtggtaggagatgaaggattgggcgccggcgatcatcgcgtcggcgctgttcgcgctgctgtgcccgggaggcatcctgcagatgccgggcaggaaccggccggtggacttcatgaacatgaagaccagcttggcgtccatcgtggtccatgccgtcatctacggcctgctgctcatgctgttccttgtcatcttggaggctcatctctacatctgatccgagtgtgttactgtgatttcgttttcttgatgacactgctgtagtgctgtgttttttctgttctctagtttctttagataacttctggacctgagaggcgctgaggacgcctcgagcccttgatccttcacagccacaaggcttatggaatactaataaagaagcaatgatgctttatgcttaaacagttcaagcaggagtcgtatggctctagttgactcgttgtttcaattggctaaagctcggctcatcggatgttcttgaaatcgaagagaagaattatgttccgacagtgatttttttatcagtttacatgcaagaatatagtgtctgattcaagcggggaagaccgaagatagaacagcatagtgactttgtcactgtgaactcttgtgccactttgttcttgcttgattcatacccatcccgtggcttttaatagcaactagtataatttttgcagttttgaacaaggataactcagatttcacagtgtgcctagtgcagatgtataaaatgtacagcgtacctgccagtgttgccgtgttgggctaattaatgtctttcttttaaagatagcagtaacatgttcagaactaacaacatgtattacgattccaggcttccagcttccaggtacaacagcaaacaaagacatccaggattattcaactatacggacatactccaatacagctgccaatgaaacagcactgcagtactattaggtgacaagttagggtacaacacgcaatatacattggattgtttctgtccaggatgcaggtttgcattgctgtaagagtagcgactactttgccttgacgacggtcacagggcaagacgcattcgacagcacgtagttagtcacacttcccagcagaatcctgcaaaaacaatttaaaaatcaagcaaagtactggatcagaaattcagctttctgaaaatgatgctacaaggggatattgtatcgctgcccctgatgaatctctggttgctcaaacagaaaccagaccgaaagtttctagaaacatgtcaatgctataccgtcgtatcattcacacacctctggatctggccgaggccacggctgcccatgacgagcgattcgagattgagctcccccacagcctcgcacaccttctccctcggctcgccccagtacatcttcagcaccacggacagctgatacaaacaacatcaggcctctcgacctgaaaggcaagacaaagcatgctgccatgcatgcagcaccagcatatatagagccagcctacctccttctcccgggacacggcgttgagcatgtcgaacacctcttcgtccgaaggtatatcatagcgctgcctcaccgccgtctccatgagctcctcgagcgggatcagcgctgcgtgcgatcagtacagagacgacgcgacatgacatgacaattttcgatgggagatcaaggcattcaaaatttagaatgcaagaggtaaactcggtgcgtttctctcttagtattactattacgtacgtgatccggtgtgagaccagaggacgttcttggcctcgtcgcggccgtggtgccggatgtggaggaggacgagggtgtcgcccttgcggaggaggttgtcggccgcccactgcagcgccttcttgctgctcggcgagaagtccatggccacgccgatcctgcgctcgccgcccgcctccgtcatctcgatcccggagcaaacgacgacgacgacctctcagtttcctttggtccgcgatggtctatgcggcacgtgtgggtgtggctttgtgcgcgtccccccgggtttgcgctggaatttgttgtgttttcgatcggtgggcggtggtaggccgtgggacgctggatgtggtgcgacacgagagagattcggcggtgcgcgaggccgcgccgcgcgcgcgctgggtgtgcgtcgcgtacggcgtacgtacgtttcgccgtgccatgcgtcgtgccacatggccaaccatgcaggcgaaggcgccgggggatcagacgcgtggcgcgttggccgggcacgcagttcggacggttcagttggggacttcaaaggaaagaaagtctgattgtttctgaattctgatctcacccggattcaacccttaccgccgctatatatatataaagttataaacatagattttctttctcgtgtatacgtttcctataccgccgcatctgcttcatcgccatctccatctggtacgacgataatcgactttttctttggttattaaatgtttcgaatcatttatcagttcccgttaagatcaaaagttcttggtaattagtagcaagaacgtggtactagatacaccgactctcatatttcacttcctttttccctcaccatatatgtttcctaagattggaatattatgaacgcgagattgtcaaaacacattaatagaaaaatcatagaagtagaatatcatacttattagattcttatagaattttgaaatataagaaggcttccaaattgtcgtttaattgataaacagcatgcagattttaggaactaacaatacatgaagaagaaagcatgaaatacatgaagaagaaagcatgatatgagattctatgattattttcctctattttttctagaatagtccattccatagattttaaaggaattgatagaaatcaaaccctttttttcaaatgtctcattaggattattttacataggatattttttaaaaaaaaattatgtcttttatttgtttcaaatgagatcttagagtgctgaaatgttctcgctagcaccactttatccatgaaccggaaaattttcgacattacaaaaacctagttcttttctatttcagaaaaatacctgtttcaatatctaagtgaattgtaggctgtatttagatggtggaaaagttaggaagttgggagaaagttagtagtttatatgtgtagaaaagtttttaatgtgatatgatatgatggaaagttgggaatttagggaactaaacacggccgtaaactgatggtcatgagtcataactgtattcccccgtgagtgtttgttttatgctaccaaaatactactgatggagttatcaaagcaagattaggatttttattatgtagggagaataatagataaacaagttgatgatgcgtctaatttaagatcaattcatttatgtaccaggcaaaaaaaaaatgttgggtgttcttttcctcataaaccgctgtgtgaattactctgatgcattcaatatgcctatcttacgtatacatcttttatacttatacctggctggaaggattattaatatgtcatttaaggccctatttagtttctaaaaatatcacatcgaatatttagacacatgcaaggagtattaaatatagataaattaaaaaactaattgcacagttaggggagaaatcgcgagacgaatcttttgagcataattagttcatgattagccataagtgctataataaccaacatgtactaatgatggattaattaggcttaaaagattcgtctcgtagtttccaagcgagttatggaattagtttttccatttgtatccaaaaacatcttccgacatccggtcaaacgttcgatgtgacatccaaaaattttcttttcgcgaactaaacagaccctaagactatccatatagtttgtatatctttttgcgagtttgttgtgaaatgatgtaatccagatcaactggtgtctcagtgtgaagaacccatagatcctaatgggtgcgaagacagacaaaggcaaggtttcagaataaccatccaaggttctaatcaagagaaaaccaaaaacatccaaggttaattgatactacaagattcctctctctctctctctctctatttgtttcccaacatgacaacaagtttctgatttgatctgtgtctttcgttaggttcgacgatcacaaggcagagggtttgggtatgggcacccattgccatcggtcgttggtctccctgtagccgaggcaaagaggaggataaaacaatgcaggccagatgtctacattgaggtcctttcggtaaatgcgatgctaactatggcttaccactcgaatcgcgttaggctcttagtggacagattcaacaaggtggtagaagatcctcacattggataggctaggctcatatgcagagaacatgcttttatgatagcttagtcctagcggtgtcctgcgtctggcacaatatttgttaatcgactttaggttatgcaaaactgaagttgctttgtttttggaaattattcaaccaattctgatataatttgtgttttggaggagaaacttggatgtgatattggagaggtggcctttcacatactcaactactttgggtcatatcgacctatgtgggcttctctgcttttcggccccaaaaatatcaggcttctgtaccgggcagatcgagttatggctctggttagttttcaaatttttttccctaaaaatatcacatcgaatctttaatacatgcatgaaacattaaatataaataaaataaaaaaccaattgcacagttcgcatgtaaatcgcgagacgaatctttgagcctaattagtccatgattagccataagtgctacagtaacccacatgtgctaatgacagattaattaggctcaaaagattccacatgtgctaatgacagattaattaggctcaaaagattcgtctcacggtttccaggtgagttatgaaattagttttttcattcgtgtccaaaaacccctttccgacatccgatcaaacatccgatgtgatatttaaaaattttcatttcaccaactaaacagggcctatgttgacatattctaggatgatgaatctggacatatgtatgtccagattcgtagctccccatcggatggcctaatcagctaaagaaaaaggtaaattttaaattttcaaacttaatttttagattgattttgagatattttcaacgtattttctttttcagcattggttttaagtcaccaagaacacatatataaaagttttatctataaattaatttttattccctaataagccgttttggcttatcagggaaaaaggcaaacgatggggcctgtaatactaagatgtgtcacatctggtactatgttagtttttttataggacggagggagtaagtagttggagtagtctcgacccgttgatgggttggtcacaggctcacagcagtctcctctgtgcagatcatagctcattttttttagcttcagttctctaatcattagaccatcccgtaccttgaaaaatgctcctcccgtatcagggggtgtttgggagggtcacccttaatagtcaaaaaaaaaaaaaggcgaagcatagctaactagggtatttatttattcaggcaataggaatcagacgaggtcacaggtacaggcgcctcgccaagtgtaacaagagacacgccccgttcttgtctcgtaccgactctgcttcggacggccgttcaccagttctgctcctgcatccttttgccatcatcaggtaaacacgcccagctctttgggttaggggagctattccaaaactgaccaactcgagcgatagcttgcaacagccagtggcggacttaggatttgaacccagggtagacctagccaaaaaaaatccgaatacaatacaatacaatatgattcgatataaaatgtggtaaacgatacggtatgcaactctaaatgattcaatacaagtagaaagtaacaaataagtttgaatcttacctaaataacaatgtaaataggatattacaatacttaatactagtcaagactaagctttacgcttcttcatggtcacgaaagagtgaattatgtcttcctcacttacatcagagaagatatcacgctcaatctcctaacaaccatcaaaccatgcaaaattgtcatatgaaattgaaggggtagtacactagtagtatggtttgctcggtctttcgcctctatttcagaaataggaaaatagctgattctacttcatgtataactaatcgttccaagaatttctctaaacatgtttgttgatattgttcaatgcctaaatgatagttgtcattatgtacatctatggctaatacggccaaaaagtaatgacaaaatcagctagtaggtttagaattactcaccggagtccagagaggcggagagccggagcggagaggcagtggcgcctgggcggctgccggctgggtgctggaaccgccggccggagagggtgcgctagccggccaggcctggggcacgctggtgactcggcgaggggcgaagggagtcgtggagagtgcgcggccgcggcgccgcgtgggcgccggcgcggcgcgtgaaggcagcggcgccgctgccacggctgggcgcgcgcctggcgggagccgggaggccgccgcccgccagctggacgcggcgggaggaacgacggcgcgagtagcggcctcgcgggacggcaggagcgccggagtcgcggctcgcgggaccgtcgtcgccgtcggtcgtttgggacttgggagcagtggcggaaagggaggggagattgcacgggagagagaagaagatattagggttttttttgtttgatgggccaggcttttttcgtgggccaataaaactgaatgctgggtcttctctgggccaaattctagggtagtcctaggcctatctggactaccccttgggtccgcccctggcaacagcgatgtcgctgtccgagtagaaccagaaccaaattatttgagctcgacttcgatccccggatggtcaccggttaggttagcaataaccaaaacaacgcgactgaaattgaaacatcaaccggtagcagactgcccgggcgaaagagactcctctggtcgccaataattttcggtgtgaccacggttaaagattgttcagtgcaatacgcaacacgcagtgccttctcgaagtgcagaggaattattaaagcacctgaagatgagatgaccgcatacttccaacatggtttggttcacgcgaaacgttggattggttatcgtttcgcggtctcttctggtcgatttggtgggttagcgggtgattgtggaacaagtcgggtgcagggtgctagtggtttccgtaagcagctcgacttgacaacaaatttcgccacccaatccgtaatagagcgtacagtctctgccggtgcaacagcagggagatcaacaaaaatggaatacagtaaattagacttggtgcaggagtggcgttttagacttaattcgcacttgacagctactaggggttttactttttcttagaagggtctgaaattgatttttcttaactaaatatagttgaattgtacgtacttctaagcctggaagcaactaagatgcaatcggtgaacttcaagtccagcatttttctcaagcaaagcaccttaaggacaaatcctttcttgcatctgtgactgtgagttcgccatcagacattcagactgctaattctcccagtacttggcactggcagatctgccgatgtttccagcggagcaagaggctggataactgctactagcaccactcacgcaagcgaaagaagcacatgaacgcaaagcaccaacgtatgtgcactgtgcagcgcaaatcgccgagatgccgttctgtaaagcggcgaaagatttcgcttttgctgtgccaaaaaggctgctagtagaacatccgatgccatccggaccggcctacgcgtgaccgccacgtcggccgaccaacggatcgcaagcgaccgaaagcgcgctgcgccgccgctgccgccacgagctcacgacaattccacgaatgcgaatcgaaacggcagcgaccacggcgccacccccatgtgtgtacctgcgctgtgcgtgcggccgagcatccgcgccgcgcgacgagcagacgactcgtcgctcgcttttctccccagaacatcgccgtcgctgactcgtttgttcttttctctcgagcttacgtgtggaatgttcttatatgctttgaacttactccaatgagaaaaaatatatagattaaattgaaatgcatttatcatcctatcgaaatttcacgtggaatttaacttatatagagttataaaaaagagaaatagtggtagaaaataaagtgaacctttgtagtagttcagggctagagctcagctagtgtagcagcaccgcacactaaatctaaccaaatggaggcgaaaagatgtctcgccactcatctttgccctagccatgaccgtcgtcgcgtcggcatcttcttcggcgcctgcaccagcgtctcagacaccttcacaatctttcatgccatagacattcgcgaactctgtggtggtggtgacatatatatctcatgacatacgactgttgtttggccagatggctaggaaggtgcccagggagagttgccctggccccatgctgtatacggcagtctttcttcatcctcgatgccaaccctctccagtggctcactggcgaggcctaaggcacgacgacaagttatagcaatggctcggattaaattttgtaaaattttagtgatcatataataggttttataaatagtaatgatatattttaaatagtgattttgtaatgatgtggatcaaattgtacttactcgacgtgttagctgagccactagagagatgataattgtaagcaattagcaaatgaccatccataggcccgaaaggacgcttgccatctacaagttacaaccacgatggccagaaatggagtagaatctcgccttgtcacattgttatctggagtacaccagtagagaaaatagagtatgatattaccaccgtgtgtccggaaaagatctgcgtaaggcataaaaagtgattatggcgcaatcctttgcttccacccgaagattttggattctaaacgggccgacgccctgttagcacgtaggagtagtataatgcacatggatagcgttttctgatcttctcattgatgcggcagtacagcgacatgcattgtcaatttccaaactactccagctttacacatggatgatggatccactcgcgagctaagatatttgctttctaaatggaagagatatcagtattatcttcggttcagaaaaggatatatcagtactataaagacatgatatctctacccagatccaaaaggtatcatgggaaatatcctattggactttgctcggtactacttctacttcgatagaagtacggccgttgaggcttattcagaagagaaaagtatgaattatcctatgaattattggacgagtagtactaattacatccctaaatctgaaaactagatatcttttattctcaactattaataccaaacgaatcatcccctaacctaatatgaagttgttttggttctatgtgacaattgagtcaacaactcttttttaaaaaataaaatcagcgagcccaacctgttagtctctcgagtctcaccctctctctttcccctcacctctctactacctctatctactctagctctctctgtctctctcttctccctccctgacctccatctctctctgtcatcgagacagcgacggagggggagtcgaggatattaagggttatgaataaggcataccttatattgatagggttacgcaatatataaatatggtataccctcaagtatacagaaggttatcataatcataaggaatttggtcgaagtataaggaaaccatccttctgaatgaaaggtgttagagtcttgtttagatggatgtggactttgaaatctcgtacatgtgtcactagtggagaaaccatctttggtcggtcggccagatttcacaatagtcccggttgtattaaaaactgggactaaaaacatctttagtcccggtttaaaagctcagaggtactttttgatctttagtcccggttggtattaccaaccgggaaaaaagatcgacatactctttactcccggttggtgttaccaatcgggactaaagatctatttgtagtcctggttggtaacaccaaccgggaaaaaagatcgacatgcacggggaggtgtgcgcgcggataggatcgaggtctcctcctccttcccactcctctctcctttaactcccggctcctcctatcctctaactctttacaccttatctcttcctctcctcctttctctcccctttaacccccggctcctcctatcctctaactagcttcttacaccttatctcttcctctcctcctttccctccccaatcctccccacttcttgatctgcagcgcagaggcccgacggcgcctctcctcctttccctcccatcctccccacttcttaatctgcagcgcggaggcccgggcagcgtggaggctcgggcggccggcggccttgcggcggcacggcggcgggcagagggccggtcggcctcgcggcggcggtcggcgatccggcgggctgagggccaggcgacctcgcggcgggcggcgcagcagcggcagcgggcgtttctttgtttttttttgagaatttgtgattcggatctgagatgtatttgatttgtgtgtgatgtgaatatgtgatgtgttagtgataaattttgtaaaagttgtgatgtaattttttttaagattttgtgatgtatttggatatgatcgatttgaggatttggggatgattgatttgggattttgagatgaggatggagtgaaatcaatatattaaaaataatgaagaaaagaaaagaataatggagcaactggatctagctagcctagctctatctttagtcccggttggtgttaccaaccgggactaaaaatgctctatctttagtcccggttgataacaccaaccgggactaaaaatagatttttactcccggttatttcacccgagattaaagatatcgatctttagtcccggattcgtagtcccggatagaaaaccgggactacaaagggttatgaaccggtagtaaaaagcacttctccaccagtgtgtggtcctcttcgagttctccatataaatacaagacctctagggggtacgggatcatcgaatcataatcgcaacaccagccatagcagtagcaatttggaggactcgaagcccagccgctagtcgatctcgacaaaggtctaatcggtactcgtcggttccattgttctctattgtaagctttgtggttcttcataatcctatataaattggattagggatactaccttatgagggacctgaaccaatataatccttgttttttgtgtgcttgatgtcatatcgtatagatccttactccaacatactccaacattctcagaatacggtctacggatatctcccgtcgacagatatggcgagcgacggagggggagtcaaggatggcggcgagcggagcttgagacagccgaggatggcgagcggtggaggcggccctctctctcttctccctccccttatgtcaatcggttcagatggcaagtgacgaaggcggcaagcggtggaggtggctcctccttgacctctgctggcgcgcgcctcctgcatgaccgcctcgtgagcttgtcgctgacgtcgtcgtcactgccgctgagacatgccgcacccaaggccgtccacaacggtgtgcacatgtgtcgtcgccgccaccaatgcacagctcgtcctcggcttccgtaggtacacggggctcctccttgacatatgatagagatgggtgagacagggaagagatagagatgagagagatctgacaggtgggccccatcattttattaaaagaattgctgactagacagccacgtagtaccaaaaccgcttccaaagttattggggttcatctggtattgatagttaagggagaaagatatttggttttcgggtttagaggattaattcgtattcacccaataatttagaggtgtaatttggatattttcctgttcggaatggatggatgtttttaggaagttagactacgacggaaaacatcaaaatttaactcaaattaaatttcaactggtgattacgcaagcacaacgaacgtgctgcgggcaatacacgggtggaaggaggacaactgcacttttgtagtaggagataaaaattcaaactttacaattggtagttctatattatatatatatatatatatatatatatatatatatatatatatatatatataagaacattacaattggctatcaaaccaacaagcagatgccgtcattgttgtctacaaagatgattaaattctggctagggcaaaacataacctcttaagatcatggtcatttcatatcctggagtccctttcgagctttttggtgtgagagtgcaattacaggtgcataattaacaccatgtcttagccaccaggaattaatcatggcgccggcatttccacccaggttgttgagttctactagcatataatttatagtaaacataacccaatattatcatatctattcagatttgtagtactaatttgtatctatatgatatgtagtactatgttactatggacggaataagttatcattttagcaaatataccatacttaaatacatcttaatatttttctcaaacaaatgagacaattagagttaagactgtattaatgtgtgactgcattagtaaagagtagtaagaggggatgctttggatcgtgagaacgttaagtattttgattaaaaaaaactctagcagaacgatgggtaacatagtaggttatattacccgagctccttttgttaatcaagcgtgtcatccgtacatgtaaagtgcctagacacttgaaaattttctgtccattggtacaaatagtagtagaacagactaatgttttcaaagctgcagttagtaattcttcctgcctccctcctaggtgaaaaggtcaaaaagggtatagaaattcccgagcgtgctaataatgtttttgtaaataatataaaaataatatcattttcgtttcaatgtattttaagatgtattggagtagttaaatttataatcatataaaaaatagtaataatatgaaagaccgtttttgttcctatcccgcttagtacagtactcccttaatataagagactcatcggttatccatatttcctaataacccaaaacaatttattaaagaataaaatttaatttgtaggtaaaacttttatatatttgtttgtagcggcttaaaaaccaatgctaaaaatatcgagaatatcttaaaatcaacttcaaatcaagtttaaaaattcaaattttatttagctaccaaaattttttgccaaaaacgtcaaatcgaattttagacacatgcatagagcaatataaataaaaaaactaattgcataatttgcatggaaatcgcgagacgaatcttttgagcctaattagtccatgattagccataagtgctatacacatgttaatgacagattaattaagcttaataaattcgtctcgcggtatccagacaagttatgattagttttttttattcatgtacgaaaacccctttcctacatctggtcaaacgtccgatgtgacactaaaaaaattttatttcacgaactaatactccatccgtactcgtaaagaagtcgtttaggacaatgtttaagtcaaatcttgggaatataaatcatgaataactctcaagttgttgaggttgaaaatataaaaattatataaatagatttgtcttgaaaaatactttcataaaagtataaatatatcacttttcaataaatatttttatagaaataaaaagttaaagttgtgttttggaaaccgtgtcgctgtttaaaacgaatttctttacgagtacggagggagtacaccctaaccgatgggactctattagggatggcaattgtgcccgtttgtccgtttacccgtgggtaaaaaccctattaggattgggtttgttctccattttatacccatgggtattttattgggttaaaagctatgcccgatgggtaaatggacatgggtatgggtaatcactacccatgcccgctttgcccgtttacccgcgaaatctaacttacatgtaggctagaagcaaaatccactagaatacataagccacgttctttgttttctacggtttcccttttatttcccttattatctctccctcttactctgtcgccgtcagaggagagacaccacaccgaggcagagaatatttgatgttttaagttcgatatcaaacttagaaggttgtagactttttgttccactacttttgttgtggcgggtaaacgggcacgcccgcgggcacaagacgcccgcgggcgatgggcatgggcaaccatccttacccgtcatgtagtaatgggtatacccacgggcaaaaataatctcatgggcacgggtatgggtaggcactacccgtacccatcgcgcccgattgccatccctagactctatgctacctgaactcctgaagcgtcgtgcaaaaaaactattccgttagagcaggtacaatagcaggctataagccagctataaacatattttaaagagataaaaaaaagagagagaaaagcagcaggctgcagatctgtagccagctacagtacggactctaagacgtactatgtgtatgataggtaggaccaggtattaatagtatagtaagcaactattatattaattggctattacattggctataaataagttagagccagtagttggctatactattaaacttgctcttagtgtggcatgcacggttgctagtagctgcctgcctgcgccagaaacgcactcattgccagttgacattggaagcagacgagttttctctacagtacgtgacgtgaaaatgcaaaaaagagttgtacgctacgtatcggaacagaaactagcacaacggaaggaaccaaaaatatctccgggaaggcgagtaggagtacagtgcgcggaggcccaagaaacgaccgtgaccgaccaggctccgtgacaatagccggggctcggttcgtctactctcatactacaaggctacggcgtaacgacggagaggagggaggacgtgcacagcgagaggcctgtcccatcaatcacgagccccgcccccaagaccccggtgtacgccacgaaacagccggccgatggcttccccgattcaaaagagagacgccgtagcccgtaggacgacgttaggtcactgtcgcgataacaatcgtcctgataggataatatatatctacatgtcccgatagattgttctatgataggcctcatctaatattactatgttgttccattctgaaacggagggagtatatactagagtaatttatgtccactgctccctccgtcccgaaataactcaatttagaatgggatgtgacccaaaaataatgaatttggacaaaggtttgtccagattcgttcctaaatcttgacatttaagtgtcacatcatcatccactagcaattattatctacaaatttttcaatcgcatgcaagtgtaccaactttattatccgctagcaattattatctagagtattttaaatatcatgtaaatatcatctaatattactatgttgttccattctgaaacggagggagtatatactagagtaatttatgtccactgctccctccgtcccgaaataactcaatttagaatgggatgtgacccaaaaataatgaatttggacaaaggtttgtccagattcgttcctaaatcttgacatttaagtgtcacatcatcatccactagcaattattatctacaaatttttcaatcgcatgcaagtgtaccaactttattatccgctagcaattattatctagagtattttaaatatcatgtaaatatgacagatcatttatagttttgttgtgtttttagaactcagtatataagcaatgtcaaatcattatctccagatcattttcacattatatatatatatatatatatatatatatataggaaggctattatgtactcccgggagtacatactccctaccctcataccgttgattacctttgagatttgtacctgataacgggttagcagtgaaggggacgtgcggtatctacccattagtggatcgtggatggcattttgttttaaaaattgaattaattgactgctcgtgtataactaatccctgaagaatcggtctgtacgcaggtaatgggcggtgaggaatggtatttatatcatcaaaccacatactgcttcatttgttcagggctgcaggaacttggtttggacctccgtagtccagctcgaggatacgccgccgcgcggcggtgctgatttaggatggataaacaagtgaagaaccacagaccttctgatggtacggatggatcaaggtatgttgttctgtttcagtgatttatttcagtatgtgccgctggttttttttctctgaatttcgccgtgtgaacttgagcaattctaaatcatcaattcagggaaattcttatggacgagcgcaaccctaccatggacatagtagatggtattagtcaatctgtccatgattcacaaccggatggtggtcagtcaaggttggatcgtagcttccgtgaatttaaaactctgtaaatggtagccagatactgacacatcttgattgtgttatgaagccgtgtagcaatggaggaggacgtgccgtcgcgggttggatcacatgattcagggcatggaattccagagacaaggtatgtgcatggctaggtgtcagctgagcattcactttaaagcagtatatactacatagaaatgttcagtatgtgtcacatgagaaagttcagtatatgctatcttctaggaaagttcagtatgtatcacatagaaaagttcagtatgtgctatattgcagaggagttcagtatgttgcacagaaaatttagaacatactatatgctgtcgtataacaaagttcagtacatagcctcccatagaaaaattcagtatatatgtgaaaaattcagtaaatactggtgcgtatcaaagttcagactacgaatcactatggaaagatttagtatacgtgtggaaaatgcagtatatgctatcgtctagaaaaattcagtacgtaacccatagaaaaattcagtacatactatcattcaacataaatcagaaagaacccctccattttaaaaaatgagtatatacaatcatctaacaaagttcagaacaaagctccccatatttttttgttagtagtacaacatatattttttttaaatttgcagtaagtactgattataaattaggttgttttttgtaaactacattttcagttagtagtagtatatgctatttttaaatatagtgtctccaatacagaaatttggtcccttcactggattggacagaaggaaacccatatgaaaaagaaggagctaggataccgatggaaaggtttgtatcagcatgttacggatttttacgattttttttgagccaggatattggtggtattttctgaaaactgattgtacattttcttttcagaatggtggtagataatgttgatagcagtgctgtcatacctcctgctgatcctcaaattcttactccgatgctgggacaaagatttaagactgagagggatgcctataatttttataatgtttatgctgttagtaaaggatttgggatacgactggacaaagatcacatgaatactaaaaagcagagaacaatgcggcaaatatgttgttctcaccaggtacatacattatgtaacaatatcttagtagcagaaatttacctaaataaagacttgacgtactatgtgttaatttcgaaatcttttatgcaggggaggaacccaaaaaccaagaagccttccgttcgaattgggtgcccagcaatgatgaagataaatatgtctggagctggtagtggctggtcagtaacaaaggttgtttctgcgcacaaccatcctatgaaaaaaagtgtaggagttactaagaattatcagtcgcacaatcaaatagatgaggggactcgtggtattattgaagagatggtagacagtagtatgagtcttacaaatatgtatggtatgttgtctgggatgcatggcggaccttccatggttccattcacgagaaaagctatggatagggttgcttatgcaattaggcgggatgagagcagcgatgacatgcaaaaaacacttgatgtcttgaaggatttgcaaaaaaggagcaagaatttcttttatagtatacaagttgacgaggcttgccgtgtgaagaacatattttggtctcatgctgtgtccagattgaactttgagcattttggtgatgtcatcacatttgatactacctacaaaacaaacaagtataatatgccctttgcaccatttgttggtgtaaacaatcactttcagagcaccttctttggttgtgccctgcttagagaagagactgaagaatcatttacatggttattcaatacattcaaagagtgcatgaatgggaaggttcctattggaatattaacaggtatgtgagtatttggccgaatttataatttggaatgaattcgttatactttacttattttaagtatatgatgggttattcattggatgcttattattgtccttaattttgcagacaattgtccttccatggcagctgccattagaacagtatttcccaatacaatccatcgtgtgtgcaagtcgcatgtactgaagaaagcaaaggaatttatggggaacatatactccaagtgtcatacattcaagaaagcatttcataaggttcttacgcagacactaacagaggaggagtttgttgcggcttggcacaaactgattagagattataatctggaaaaaagtgtttacttgcgtcacatatgggacataaggcgtaaatgggcatttgtatatttttcccataggttctttgctgggatgactactacacagagaagtgagtctgcaaaccatgtgtttaagatgtttgtgtcaccctctagctctatgaatggctttgttaagaggtacgaccggtttttcaatgagaagctgcaaaaagaggactcggaggaattccaaaccagtaatgtaagtatccactgtgataggtttgttgacctctttttatggatatgtgtaatcaacatttggtgtcgcttggtgcaggacaaggttgaaattaaaacaaggtcaccgatagagattcacgcatcccaagtatatactagggctgttttccaattgttctctgaggagttaaccgatagtatatcttacatggtgaaacctggggaggacgaaagcaccgtgcaagttgtacggatgaactcgcaagaatcattccttaggaaggaatatcaggtgtcttgtgatttggaaagagaggaattttcatgcgtttgcaagatgtttgagcataaggggattctgtgcagccacatcttaagggtatttgtttcttctactgtctaaacatttattttcattgggtcgtactatatgttcggtagtgtttggctttttgaagtaatgcattggtttgtccctttaggtacttgttcagtatggtttgtcaagaattccagagaggtatatactgaaaagatggacgaaggatgctcgggatactataccacctcatctacatgggtacaaagatgatgtcgatgcttcacaatcgaggagttacatacatgtaatgctgaaaaggaagactgtggaggtggctaagattgctaataaagatgtgcagacatttaagatggcaatgacagtcatgaataagcttttggaggacatgaaaaatcagttatctttggatgatggtgacaatagtagagaagctccgaagcgagcagctaggcataaatcaaggtctactgtattgactaaagatggaaacgaagatgttggtggaggtgatgaggacagtgagtatgacgtgccaagtgaggacgagggtggaaatttgactgctgatatacttccaccgttgaaaaagagaagcagaggaagacctaaggtgaataggtataaatcgggtggtgaggttgccagcctgaaaagaagaaaagaagtagggattgagaagaagaacacaaccaatgagtgtgagtccgttgaagaagaaaaccaagtcattgatcatgatgatgaagtgccctttcctcgtaggttttgccacacatgccacgaagctggtcataattcgcgaacttgcggccggacatctacgtacaagagaaaactttagaatatggttccctgtagtttagttgggactcctctgattgttagaagttgttttgttttaagtacgtgaacaaatttttgagaggcgtgtgttttttcatcctatgagcaatttattaagattatgtaacctgtggattggtcagtatatacgaccttaagtaaagtatgcttctagtagtaaattgtgtcttttttgggtagtgtatttgcaccggttaaaaatggatgtctgctgtaattagtttcatttggatgatggtgctttctctataaagagagaaagagatatagtatactggtatttatgacgatcattgtttgcaaaaggagtgtgatttggtgtggatatgagttgttttttttaggtatggagatagaaattagctgtgcaatgtattgaatcctcccgttcactgaaatggacataattatcgatagcaattgactcgttatcacgcagagtcaatgacataatttacgcagagtcaccgcatatattgaatcctcccgttgaaaatgataaatggaagtaaatgacatactgttattgtttggcatagtgaataatttccatagcacagttcgtgcaactgtcattgcaacccagacgatactttgtccatgcatagcaatgttttcatgattctgtcaagataggacagaagtgtatttcgaagattacatgaaaatgttctggtaaagctagaagtagaaaattgctaaactaattgtctttaatttgtcgaagacggtccaccacatattctggtagtattgcctcgttatcacgcagagtcaaaaggtggatcaaaaattgcctccggaggtagtacgggtcctgcgaaagttagagtattttctttatagctttatgaggacatatttatggtggagtgcggtgtgtgcggatatgaaagcattatgtacctctgtaatagggttcagaagacgacgaccatcgtagttcaccatatagttgaatacgtaaaagccacagtcatccctgtatgtttttgagaaagtagtgtcagtacaagctttgggttggttgtatttcgtttgttttaggagtcactcacccgttctgctgctctggtatattttcaactgtctcaaagtcccaattaagtatgtccatgttccaccctggagatgcaagacgcatgcattccattacacactgtgacaccatgatctttatcttgtcatgcctggtgaaacgtgattcccctagtggatcttctgtgtttagtgaatcaagcaccgataacttcttgctctccatgttaaatacgtacagcacgtaatgattgaataggtgaacaggaatcagtatctgcaaagtttaggtttttcagtgggactacttctgtactattgtttacaagagtttctacaatctacgaactgcaaatttgtactcaccaggtggctttctgaaacatcatatactacctctgggcccgagaagtgtgcaagttgatggctagcttcccaaaattcctcaccagctagcgcgtacatctgacaatacagaaagaatcattgaatttatatttttattgatgaaagaaatatattgtttattgcatgcaatgttaccccaaaatcttggttaatgaaatgcctccaaccaaggtagtttgtgttgtgaaatctctcaacttcttgttggaacattattcgaattgcaaggttgagagaatctgaatccatttggctcccaatctttatagtttcttggatgtttcgtagcgtcaatgatattatgaaaggatgggagctctgcagccatgtttttctgaaataaaccatggataaaaatgaatgtcagatttggtggggtgagatgcttaattattctggaagaagaatgatacttactctaatgatgcatcgtcagaaatagacattatataggaatacaggtcgtcagcaatcctggattccagcctctccgttgagcattgctttgacatgaaaggtgacatgagcttcctgtttggtttgactacacgctttgacttgtgcttcagcaagtgagatggtgggttttcaacggtgtatttgcgcttcttctgcccatcgctaccgaattcttcaattagcataatggaacattggttagtcatgcgagttcccgacgtaggcgatactgaagaatttggcctttttttcgaatctgaaaacattcgcatgatcaggagtaaacacattgttggttgaaatttttaatcttttggtacaccaacctggagctccattagattttggaggagtacactgcaagcctccaattttgtgatcatattgttgggtatctgatacatgaagagcgtccgaaaatttgttagagtgtcaagtagtacgagttttatttttaaaatggtgtatgtactcaacgttacctgttggttgatccaattgactagcatcttttgtagcatgtgtggagtagtttgtgggtgtgtggtatcccatggcagttgtgtctccccatggatggagaggaccttgtatatcctcaatggtatcaataactttcgttactgctgcccttatcgctatcttaactgccgttgtaatattagtcttgaaagctctcttgaataggttagatgcgtgaatagcagtttgcatggtgcttatgtcgacgaaatctgatatggtaggcaaaatctcatcgatgcggtcgaatccatcctgaacgtaagatttcaactcctcgtatgcctgttttatgttatcatatataccacatgttagtttaaaatcccttgatcatgtgaaaattacaacttaatgaagaaacaatcaagtaacatagcatacggatggttgacatacctgtgacccgacagttccacgtacgtctaacgaagagaagtgtgattccaagaattttattaaatttttaccgccatcaatggctctagatgggatcttcgaaccggagcataagtttaggggagatagctctggcacatgggggttgttttctcttggttccttcatcaactgaacagcatgtatatcggaaattagctaaattttgcagccagaaataggcatattacagccagggtatcgtacatacctggagtttcccataacgagggaaggggaatcctgggttatgtttactaactacatcttgttgaatcatcctagcaatttgatcatcctcaaactgagaaatgtgacatgttttaacacatgtgatcccaaccttccggaactggagatttctcaaatattttacctgcaaaaatgattcacaatgacaatatgtgtgttgattgtatgctgcattaacaagtcagttttaaatgctaaccattagaaagatgatacacccgttaatggatagttgagccttattcggaaagcaggtgggcattgattctgctgctttcttcacctcatctacaacgaattgggaccagttgtactgttttatattgtcaacatcagaaacagccataatatacctaggagatatgaagtttgcgcaggattgcggtgccaaaagcttcgttgtgacataaagcacaaaagccgccatgaaaaccctcttttcatctattgtcatgggataaccatactgcttctttaggattctctctaagagtgatattttcaggtgtgaaaagtttggtatctcaaatatttcgcacaatatttgtttcttcccatccaattcatcttgagagcaagggataataggttgacctgagcatggcaagccaaaaactgcattcacatcattaggaccgaatggcaactcctggttgacatctttaacaatagcgcatgatttcggatcaactttgctcagtagccatgcaccaaactgcctgtttaccttagtaagcttgatatccaaaagtccatcaaacccaacttcaccaatcaactccttcttcctatcatcgaattctttaatgatattcactacgcatttgggctgacacctgcagttgataccaaaggtagtgttgtctttcttctgtctatttaaaactctgctttgccgatacctggataccacccgtgcagcagtcttatttaggctgccccttgtgccagaaaccttcaaagcctgcagataattagtttttcatttcataaatagacaatactacatggaccagtgtatttaaaatttcaacatatacttctattttttaaaaaaaacagcatacactcatatatgtatggaaagatgaagtacaaaatactgcgtagcaaattctacctatgtgtaccctcttaattaaaaaaaaatcatgtgcactgaaagaaaagtcagtatatgcaaagtttagagaatattactgtatgtaaaaaatcagcatatacctctctatgtaaaagtgcagtatatacttcttcgtaacaaggtccagtatgtaaaccactatggaaaagcctctgtatatatgtggaaaaatgcagtatatgctatcttctagaaaagttcagtatgtaccacatacaaaattcagtacatactatatgctgtcgtataacaaagctcagtacaaagcctcccatagaaaaattcagtatatctatgaaaaattcagtaaatactggtgcgtatcaaagttcagtctatgaatcactgtggaaagattcagtatagatgtggaaaatgcagtatatgctatcgtccaataaagtagagaataaagctccccacataaaaattcagtatatactattgcctaacagagagttcagtaagaaccctgccacaccaaaaatcaatacttaataccgtctagcagattccaaaaagttcccctccaaagaaaaaatgagtatataccgttgaaaattcagtacgtactaccatctacatttttctttatgggggtgggggctaaaacagcattaacttcatccacccaaaaaaccatcatatgcactaaaaggggaaaaattagcatctgaaactgagagagtacatgaaccgaactacacctaatccctctctacaggcatacatgtattcaatttcaggtggcataccttggactgtggtgacaaactaattttcctgtgaccctgcggcaaagaagaaaattttaggcaacgtgtcttgatcttgccgtacaaaaataaacgaatactaacctgctgctttggatgaaatccactgctatggcccatcgattttgccattgttgccccgctcctgcattcagccgactctagatcgattacttctgcttcaggaacacatgttgttgagagaggatccatcgctggaggaaggggaggagtcatcactggaggaaggaacaaactgctatctctgtaccgccgccagccacacagtcgccgctgaatcgctggtccgtcgccgcgctgacccccaaaaccccgaaagctgaatcgctggtccgtcgtcgcgcagttccgtcgccgcgccgccccccaaaaccccaattttcgggataatctgtttggcctgttgggagcaaaccccaaattacggaataagcagtccggtcttttaattagaaaaactaatcggatccaccgagccaaacccgttatgatgagggagggagtacatatctgatcgatcaaatgaacggtggatgggagagggagtacgtactccctaggagtatagaactattttcccatatatatatatatatacatatatacatatatatatatatacatatatacatatatatatatatacatatatacatatatatatatatatatatatatatatatacatatatatatatatatatataagtgaggagtataaactagtaagatggatgaattgtggcaacggaaccaaccgaaatatcctgcatgactattttataatttagttgttttaaaattttattttgaaaatgcgtatataaaaaaataaaaatagatcatctctcgatgctgatacatggtggtaagttgctaacacaaaagggatcggcgtcaaaaatatgtacgtcgagggtctttttataatgttaaaatgcaattattctttcttacaaataggcctttggtgagatcgaatttgacaaaaacgacctatttataagaacaaggaaaaagccctaataccctctcctggtgaggctgcaacattgttgatgtgtcctcctccctactggtatgttcctggtagccgtacttctttccaccctcccccaagggcataatcaataaatatttatcaagtgggtagtaagatgggactcacaaaactaggttataggcccggtttagatcctccaaaattttaccattttagagcactttttgccattttggatctaacactactagtaaaagttgacaatttatcatttgccatttgctagtccatagtagcaaattgtgccaaaacgtgctttgggaccactatttatctctctctctctccaccgaaaagtgctagaatagcaaaagtttagtatgcatctaaacaccaactagtatttttgcaacgtcaaaacttttgccaccaacactttttccatttgtcattccaaataaatctaaacatactcatagttgtttctacctcacacaatatacaatatgtgggtagtaagatatgacctacatgtaaagcaatgatgggatagaaaagagagagagtgagtgagagaagagagtttaatatttttttatgcttgttaccaggtagtagtgctattgcctggtatagttattatctgctctactatccatattcacaatggtaaagtaggtagtaaggggtcttactacccacttttcatccacattgtgggtgccctaagtcatcacctgcgagggatggatgggctatgcgtgaggaacgaaacgactcggcggagagagataaagggtgtgtttagttccacgctaaatttagaagtttaaagaaaaaagttggaaatttatgtgtgtatgaaagttttgatgtgatgaaaaagttgaaaatttgaagaaaaagttgggaactaaacccggccatacactcgtgtatgggaggagggaacacgtcacatggcttgaggggcggttggggaagtcgtatttagagcaggtacaatagcaggttataacctagctgcaaacatattttaataagataaatgaggagagagagaagcagcgggctatagatttgtagccagctgtagcacgaactccaaaacgaagtgtgtgtatgacatgtgagaccagttattaatagtgtagtatgtaagccttaggccgtgtttagtttctgaaattggggagaagtttggggaaagttgagagtttatgtgagtaggaaagttttagatgtgatgtaatgtgatgaaaagttgagagtttgtggaaagtttggtgcgaactaaatatggcctaaacttgctcttatgcggtagtgcgaggggcttcctaggggcacacgaggtgcagatgtggagagaaatcttatagccaacaggttgggattgaatgccatttgaagtgttcgagagaagccggaggggaagaaacgcacacgcttcatgaacggaaaaaatctattaaaatttactttaaaaattatatgaatttattttaaaatttaaaatgattaatattatgtaatggcttatctcgtttgatgtccggtactctcatttcaattttttctcatatctcaaacaagtgcattgtgaacgggctaatcatttttttttctctggtacgatgggacagtagtaatgcttctgccacattttgtcagttgcatgcagggtaaagacagtgctttcttcatgtgtgcgcgctaacttttctgcacaaaccggctggcagagcaaagcccggggaagggaaggggcttgcttgccgagtgccttgcctgccgctgcctgcttgccttgccccgcgcagtgggagcctgcgggcttgcttggagacaaatgccatcacccaccacaatccccttcgctttcatttctttcctcagcgttacgcactcagctgcgcgattcaaagctagcgctgcgttgcaaactgctggcgcaaggctgcccattcctggagcagtggcgcggggacggcacgagctgccaaacaacgtgggccaacgtgcggcactgcacttgcgccggtaccggtaacaacggcaatggctgtcaaaaaggcgcgccttcctcgcatagctaaaaacgaatccaatgcgcacggacatttcaaaatatactacaccagaccgtatcgacagtataagctggccggctggcaagcaccgttctcctccattttgtgccttttagtacatatgaaatgtatttttcctaccgacagaaaacaaatctttttagtcagacgctcctttttttcggaatgacataaatttcagattctttgtccgctgacgtggtttaggggggggtgtttgggactttag

SEQ ID NO: 5294 - DNA, 48490 bp, Oryza sativa
ccgtgcccgcggttatgggcggtcaaccagattcaccgtgattagtctcaccttagtttagtctaatgaatttggatagtttaggtggatggttgggcctgttgcaacgaggtgtggcgttggacagtggatgaataatactgcttaattttacaactgttttcgcattcaacccttgtttataaatgccagtatttatgcaaatgaacctgtttagctgttccttgttgaatctctgcatcatacccccattccggtatgacttgctgagtacagtgggtagtactcagtcttgctctatttctccccaatcccagagtttgagtttgtgtcagatggcgggttctccgaggagtaggcttcgtccgtgccgtcgaggatgcctgtggaatggtgttcccgctgcagtcaagtctaggcttagcctcagttatcttttgttttccgctgcatttatgtaagacttttataatgtttgtaagacgtggatctgtatgtcaacattgtcgtttgtgtaccccggccggtcctggacgggggttttaatgcacattctgcttggaatcctattcgggaatttctgggcgtgacagaccctaaggacttcaggatggtggtccaacgggtgctgaatctcagctccgtggaggcatccctcatcccccaaggggtcctcctcctctgctgcgatccagagcgcgccaagatcctggccatcatgcaggtggtcggggcgtcgggggagcgggccccccgaggccacgatggcgtgggcgggagcagcaggggggaacaatctacctcgggagggggtcgtgcttctgggccccgcgacgggggcccggggggcatccgtcctgccgacactcggggaaagaggaagcaggagggtacccctcccccatctcctccccgagggggcggggcggtgcgtgccagcagcaggcgtccggagggtgccgtgccgactccgcagcccgagggggagcgaaaaaagaaacggctccgcaagatgggggggatcgtgccatgccgggggaacctcatctcgcccccgaggtggtcgtttagccaacctccccgcaggttcgtccccgcgcccaccgcggccgtattcattctcccatctcccaaggcgagttttcactcacccatttctttttgtcttctggtttttcttctgcctcagcgagatcccgtcgcgcccccccccccccccccccgatattccaagtccggccagtctgaggccgaggagacggcgactgcagaggctcggaggcgggaagctgaccggcgagaagccgcggaccgcctccgggaagccgaggaggctgcccaggaggccgtccgggctcgccaggctgaggaggccactcgggaggaggccagactccgccgggccggggagtccatccgggaggcagaggcggcgcgcgcacgcgaggcggcctgccaaacccccgacccgaggcgacgatgacttccgaggccacccacgacgaggccgcgggcgcgccgctcggtcccgacccctcgggcgacgcttgggacgagccagcttcgggggacacccccgagtccggcacgtcgatcggcgggccgagctgcgcggcacccacaccgaggcggctttcccctctgtcttccgctgccccaccgagcgcggagcccctcctgcaggccttggccgccgcgaacgtcacggtgctggacgggttaagtgcccagatggaggccctgcaggcggagcgggcggagctcgacgcggcgtgggcgcgcgtcgaggaggggcggcgctcggtggaggccatggtggaggcgggccgcatggcacaccgccggcacgcttcacagctcgaggcccgtcgtagggacctggcggagatcgccagggaggtggaggaggagcgagagactgccctcatcgccaccgccgtgctcgacgaggcgcgggacgacctccgcctccaatacgggagccgggcggcggagctagaggagaagctcgacgccgtccggggagttcttgacgccgccgttgcccgggaacggcgggcggcggagaacgaggcggcgttccggcagcgcgaagaggcccttgaggctcgcgccacggcgctggaggagcacgcccgcgcgctggacacgaaggagcgcgacctggcggaccgcgaagccgccgtcgccactcgggaggcaacactggcggcgcacgaggccgcctgcgccgaagaggagtccacactccgcctccgcgaggacgcgctcaccgagcgggggcgagctctcgaggaggccgaggccgcggcgcagcggctggcggacagcctgtccctccgcgaggcagcgcgggaggagcaggcgcgccgcaatctggaaggcgcccgtgccgagagggccgcactggatcagcgggccgctgagctcgaggcgcgggcgaaggagctggacgcgagagcgcacagcggcggggcggccgcgggccacggcgacctagccgcccgcctcgcagccgccgaacacaccatcgctgagctgcagggcgcgctggactcgtccgccggggaggtcgaggcccttcgcttggcgagcgaggtagggcccggcatgcttcgggacgccgtctcccgtctagaccgcgccgggcggcaggagggcctctggggcgggcggcacgcgaagtacgccgccaaccaggggggcctcgcccagcgcctctcagaaatgaccggggccctcgagcggctccccgaggagctcgaggagacgatcaagtcatcctcgagggacctcgctcggggggcggtggagctcgtactggcaagctaccaggccagggaccctgacttctctccgtgggcagcgctggaagagttccctcccgaaaccgaggacggcgcgcgtgcgcaggtccgggacgccgccgaccacatcgtccacagcttcgagggtacggcccctcggctcgcgttcgcgctcgactccgacgaggagggcggtgacgatggtgcggacgacagcgacgacgaggccggcgacccgggcgcgtcggagtgagccctcaggcccccgccaatcttaataacttttccttcttcttccgaggccttcgggcccccttcttgtatagactgacttaatctgcaatcaagtaaagaggaaatttctgcgtcagttctgtttgttgtgtgtatgagacgaggatggtctgtgccgcggtccttctatgtcttggcttgaacaagggctcgtgcccaggtcccagcctcaaacggcgcgggtcggggctagtgcctggggagatcctcgtgtcgagactggccaggccgggagcgtggtgaccgagggttatggatgacccgattgtgggcatttgccgattcccccccggagttcaccacgccccggggcacggctcggttctgggccccgtttggcgattttagccggcccgggccaccgagggcagggtcgagcacgagcgtgctaatttaagccaagattcttcaaaaggaaacgatggcacagacacagtcctcaggaaatcgaaaatgcttttattgaaatacggaagagaaaaaaggtaagtatatgcatgtggtagcccccggccaaccctgcacgcccgggggggtgcggggttggcccgagcccgagacatgacacccgacccccactaggggtagaagcgacgaaggtgttcgatgttccacgggttaggcagctctgtgccgtcgcccgtggccagccgaacggagcccggccgggggacgccgatcactcgatacggaccctcccacattggtgagagcttgctcagtccagcacgcgtttggacgcggcgtaggacgaggtcgtcgacgcagagtgatcgggcccggacgtggcattgatggtagcgccgcaggctctgctggtagcgcgcggctcggagggccgcgcgccgccttcgctcttccaaatagtcgaggtcgtctcggcgaagctgatcttgatcagcctcgcaatacatggtgacccgaggggacctcagggtgagctcagatgggaggaccgcctccgcgccgtagacgaggaagaaaggcgtttccccggttgctcggcttggcgtggttcggttcgcccagagcaccgctggcagctcctcgatccacgagtcgccgtgcttcttgaggatgttgaaggtcttggttttgaggcccttgaggatttccgcgttggcgcgctccacttggccattgcttctggggtggggaggggaggcgaagcagagcttgatgcccatgtcttcgcagtagtcaccgaagagctcactagtgaactgggtgccgttatccgtaatgatacagttaggcaccccaaaccgagcagtgatgcccctgatgaatttaagcgcggagtgcttatcgatcttgacgaccggataagcctcgggccacttagtgaacttgtcgacagcgacatacagatattcgaacccgcccggggcccgcctgaacggacccaggatatcgagcccccagacagcaaacggccacgaaagaggtatggtctgcagggcctgggccggctgatgggtttgcctggcgtggaactggcacgacctgcaccgtcagaccaggtcgaccgcatcgttgagagccgtcggctaatagaaaccctggcgaaaggccttgccaaccaaggtgcgtgaggcggagtgggctccgcactcgccttcatggacatcggcgagaagctcgacgccttgttcccgaggaatgcacttcaggaggactccgttaaccgcgcgccgatagagggtcccttccaccagcacgtagcgcttggagatgcgccggacgcgttcactcccttcgcggtcctcgggtagagtcttatctgcgaggtacgcctggatctcagtgatccaagcaatcaatctaggggagctgggagtgctcccctcgggtcccgaggcctggactccgacgggcctcgggggccattcaggcgcgtccgtctcccctagggggtcgggtcgggccgacggctgggcaagcctttcttcaaaggcgcccggtggggtctgggctcgcgaggaagcgagccttgagagttcgtcggcgaccgcgttatcccgtctgggcacgtgccgaagctctatcccgtcgaaatggcgctccatacgccgcacctggcgcacgtaagcgtccatctgcgggtcagagcaccggtactccttacagacctggttaacgaccaactgggagtcgcctaacaccaggaggcggcggatccccagtccagctgccactctgagtcccgcaaggagtccctcgtactccgccatattgttggtcgcccgaaagtcgaggcggaccaggtatctgaggacgtctccgctcggcgaggtcaacgtgacccccgcaccggcgccctgaagagacagggagccgtcgaactgcatcacccagtaggcggtgtgaggcagctgcggggggcccgagctggcctcgggggcggagacgggctcgggagctggggtccactccgccacaaagtcggcgagggcctggctcttgatcgcgtggcgtgattcaaagcgcaaatcgaattcagagagttcgattgcccatctcaccacccgtccagtaccctctcggttatgcaagatttggtcgagggggtaagacgtaaccaccgtgacccgatgcgcctggaaataatggcgcaacttccttgaagccatcagaatagcgtaaagcatcttctgggcctgagggtatcgggtcttggcgtcccggagggcctcgctaacgaagtagacgggccgctgcacctttcggcggggccgatcctcttcgctaggggccacatctccaggacgctcttcgtccgagaggccacgcggggcgcactcggcttctgtgccgacgacctcggggtcggagggcgacaggcgcggccttcccgcagtggccccggggccatcctgggggtcgggggcgcctggcaccgtcggacaagcaggcggagggccagctccggccgtcgggggccttaggccgccattcggctcgggggcctctgctccctgctctctcccgggtcgagtcgaagcagggtggggatgcgcggagtgagggttgtcctcgtcgcgctccacggccaatgccgcgctgaccacctgcggggttgccgccaggtagagtagcaacggctcatctggctccggggcgaccaggactgggggagaactgaggtacgccttcaactgagtgaaggcccgctcagcctcctccgtccaggtaaacggcctggagcgtttgaggagcttaaataggggtagtgccttctctcccagcctcgatatgaaccgacttagggcggccatgcagccggtgacgcactgcacatccctaagcttgctggggggcgcatccactctatagctcgtatcttctcggggttggcctcgatgcctcgggcagagaccaagaacccgagaagcttgcccgcaggcacgccgaacacgcacttatcggggttcagctttatgcgggcggagcggagactttcgaaagtttccgctagatccgagagtaaggtctcttggttgcgcgtcttcacaaccaagtcatcaacataggcctcaacattgcgtcctatctggctacccaaagaaattcgagtagtacgttgaaaagtaggacctgcattctttaacccgaaaggcattgtcgtataacaataagttcctatgggggtaatgaatgcagttttttcctcatcctccctagccatgcgaatctgatgataaccagagtatgcatctagaaaacacaaaaggtcgcacccagcggtggagtcgacaatctgatctatgcgtggcaaggggtaagggtccttaggacatgccttgttaaggtcggtgtagtcgatgcacatccgaagcttgccgttcgccttgggaacgacgaccgggttcgccagccactccagatggatgacctcacggatgaatccggcctccagaagtcgcgccacctcctcgcggatgaaggcttgacgttccggggcctgccgccgcactatctgccggaccggccttgcgccgggccgcacggcgagacggtgctcaatcacctccctggggaccccgggcatgtccgccggtctccaggcgaagacgtcggcgtttgcccacaggaaggagacgagcgcgtcttcctatttgtcatccagaagaccaccgattcgtgtggtcttggacgggccgtcgcccagggcaacctccttgaccgagacctcgtcgcacgtgaccatccgctgccttggggcggccgggacggaggtggcgagcctctcgtcgccacccgcgggcttggacgccgcggcgaggtggtccgcgcgctgctccatacaggcaagcgcgacttttaggtcgccatggacggtgatggggccaccggggcccggcatcttcatctggagataggcgtagtggaccgccgccatgaacttcaccaacgcgggcctccccaggaccgcgttgtagggcagactgaggtccgccacatcgaagtccacccgctccgtgcggaagttggcggaaccaccgaaggtgaccgggaggttgatatgacccagcggccaggtgtgccccggcgtcacaccgatgatcggctgggacggccggagcaccatccccggggccttgatggcgtcaaaggctgcgggggaaaggatgttgagggctgcacccccgtctatgaggacacgccccaacttcacattgcaaacggtgggggaaaccaccatcgcgatttgtcctccctgggcaacgcacggcgggtggtcggtctggtcgaaggtgagggcaacctccgaccaccgcgcccgccgcgtcgcctcatgggtaggggccacggccagaagctctcgcttcatggccttgaggctccggcgagaagcgtgagcgcacgctcccccatcgacggtggcgacggtggcctcaggctcctggaaccccaggtcatcgtcgccatcgtcgacgtcctcggcggtggccttctgcttggcctcacctcgccggttgccggcgggagccgccggggtcttgccctcacggcgctcctgcctcttctcctcctcccacttcctcgtccgctcagccaaacttttgaccgcgcggcagtccacgaggtcgtggagggaggtgttgtgcacggtacaccacttgccggttgggcgctcccacctgggagcaccggcctccttctttttgtcgctcgcaggcctcccctttcggggggcccgcgaagcgccctcgacggcgaggacatgaccctcgtcgtcggaacgggccgaccccttcttcctcctcccgtcccgccgccctgaccgagcggcggatccgggggcggccggagctgccacaccagaaccggaggagttccaggtccaggcctcctccttgcgagccacacggtccgcgagctcaaaaagttgcgcggtggtctggggctccttggaggcgatcttctcgagcatgcggttgtgccgcacgccccccctgaacgcgtagatcaccgcgtgtgcggggatgcacggtatggtgttgcggacttgacagaaccgctgaatgtacgagcgaagagactcatcgtcccttcgctgtaccgcatgcaagtccgcttcttcgcctgggcgcggatatatgccctggaagttcgtggtgaactgctggcacaaatcctcccaagagtggaccgacgcgggtggcaagttcattagccaaccccgcgcctgacccttcagggccatggggaagtaattcgccatgaccctgtcgtcacccccggcagcctcgatcccggtcgtgtagatctggagaaactcggcggggttgacgcttccgtcgtatttttcggtgatggtgggccggaatcttgggggccaacggacgttccgaaggctcgccacaaaggctcgacagccagcaccgccaaccggggacacggggggccggcccccgtgcccgaaccgaagtggcgctccggacgaggaagcgccctccgttgcgtgggcggcgcgacgagcgtcgcgccggcgctcgatattgaggcgggcatccggccccccacgcacatcttcttgggtcggaggcgttgacgagggaatggcggacgaacggcgggtaacggccgccgctcgccgcgccctccgcctcgacgacatggagccggctgcggcagcgccagaggcctcggtggcggaggaccgcccgccggcgcctaggcgccgctgcgccgtcatgaccaagtcggccacgtcatccagctaacgtcgggctggagtctctggatcggggacgacgggcgggtgacgcaagagcgcgcccgcagcctggagcgcgccctggggcgtgccgccatcgccgtagacgaggcggcgacgcgccctgtctcgccgtcctcccccgtcgcccgcgggcggcgaagtcgcggatcgtccgacctccccgagcgcctccccccgcccaggatttcggcgagagggggacggtggggtgcgagcccgacggcgcgggttctgctccccatcgtcaccgctagcgttcggagagaggctgtgcgccactgcccgttcggccattgggctgagcgggcgaagcttggcgcacacgaaagaggacgagggcttagaaagacccgcgcgccccctactggcgcgccagatgatggagcgtggggctcctcaccgggagaccgcgcaggcccccctttgccggttcggccgggggcgctaagtgagtttctttgccctcgatctgaggaacgtcagcgagagaggaaatgcgcaagacacgggcgacgtagacaggttcgggccgctaagaagcgtaacaccctactcctgtgttctagtggatctgtgcatgaaggaatacagagaggccgagagcgaaagagagttcaggctctagaaaccattcgccagagtcccccctcccctcctctcttctccctctttttttctaggcctgggcctcctttttatctggtcaggggtcaccacatgggcctctagctgcctaagaagggaaacatgctttttacaatgagggctagtctacagccggaagtgacctctgacaagcagagcgcacgtctcctgccccgctcgcccgcttttccggtggacgcccatttcaaccttcatttaatggccagcgacttccttgccatacttgcgctgaagcctggaatggatctgaccgggactgacataccaactccaggagttagcacgccggctccggctagtgacgagagccaggaagctctcatcattccgacgggacggggcgaggcgtgtgacaggccgcctgttgccacctaacccgcgatctgaccggtctgtgaccggtcacacaccgtgaccagtcgcggaccggataagcgtgcgctgcgccgcattaaatgcggcgtggcgcgctcgtccaatcctgctataaatgcggttaggtgagccccgctgtgctcacctaacccacacgcgtggcgccaaaaccacagggggtcggggcgccccagcactcggggccgaaacgggggcgccccggccctcggggccgaaacgggagcggtccgacccctcggggagacagagggaggggtggccacgtcatcctcgggcccgacccccccgagggggtcaggccacgtgggtgaccgcggcttcccaagcctctagtcacaatacccccggccccatgtcaccgacaacaccgatcacaaaagtcttaagtatatgttcacacagaccgagttatatatgaggcagagaagatggttggaactaatcaaggattacgatcttggaattcattaccatcccggtaaagctaatgcggtcgcggatgcgctaagtcgcaagacctattgcaatgaagctcaaatatggccagaccacggtcgcctgtgcagagaattggagaagttaaggctaaccgtggtacagtcaggtgtccctgccagcttgacagtgcagcctaccctagaatcgcaaatccgggaagctcagaaagatgatgaagggataaaagaattaataaaaagaatacaggagaaggaggacaccgatttctccatagacgatcaaggcacagtttggtgcggtccacgcatctgtgtaccggccaagaaggagttaagagatctcattctaaaggaagctcatgagtccgcctactccattcatccaggaagtacgaagatgtaccaggatatcaaggcatacttctagtggactggaatgaagcgagaggtcgcagaatacgtagccctgtgtgacatttgccaaagagtcaaggcagagcatcagaggccagctggtctgctgcaacccctaccgattcccgagtggaaatgggaagagatcggaatggatttcatcaccggtttgccaagaacccctagcgggtacgactccatctgggtaatcgtggatcgactcacgaaatcagctcatttcgtgccagtgaaaaccacctttgatggaaagaaactagcagaactctacatgacccatgtcgtatgtagatttggctgtcccaagaagattgtgtcagaccgaggcactcagttcacctcaaggttctggaagcagttgcatgaagctcttggaacagatctaaatttcagtacagcttaccatccgcagaccgatggtcagacagaaagagtaaaccaaatcctagaagacatgctacgtgcgtgtgccctggattttgaaggcacttgggatcgttgtttgccgtatgctgagttctcatacaacaacagttatcaggccagcattcagatgtcgcgaaatgaggcaatgttcggaagaaagtgccgcactcccttgtgctggaatgaggttggcgaagcactggtattcggtcctgacatactcaagacagcagaagaacaagttaagctgatccgagaacgtttaaagacagctcagaaccgtcagaagaattacgctgacaatcggaggtgtgaccttgaattcgaaaaaggagaccacgtgtacctgcaggtatcacctctccgtggtatgaggaggtttgggatgtccggcaagttagcaccccgctacatcggcccctaccccataaccgccggatgtggcgaagtggcttatcagcttgagttacctgaaggtctcgcagatgtgcacaacgtgttccacgtatcccagttaaagaaatgtcttcgagttccagaagaacaagttccccttggtaatatcgagctggaaaagaatctgacctacaaggaaagaccgatcaaggttcttgaagaggctgaacgtcagactcgaaggaagactatcaagttctacaaggtccaatggaccaatcattctgaagatgaggcaacctgggaacgagaagatcttctccgcgccgagtttccggagctgctcccttaggtgctgaatctcggggtcgagattcttgttaggggggttggtctgtagcgcccgttccgtcgtggcgcctagcgggaaaatgtaattcctaaaaaccctaatttcgaaatatgtttccttgcttattgtctagtgtccgtgccaattccggatctcaaatccccgatcgatcgtcaagttcaatcctgaatccaaatccttcccaaatcaaatccctccgcaaaagtctatttcacctccctcaggttcgatgggccgaattcctctcggcccatctccctctccctccccatccctctctctctctctctctccctctccccccgctctgcccgtgcgctgcgcccgcgtgcgcgtgagccgcgccgagtcgagcgcccttcgccctcgctgccgtttcctgtcgacgccgcccaaatcgccgcgccgcccgttgcttcccgcgcgcgcgcgcgccatggtggccgaccggccagtcgccgccgccgtcagcgcctgcccgcgcctgccgcccgtgccgttgctccgctccaaaccgcccggccgtcatcgccgtcgtcatcgacttggccccgcctctcctcgcgcgtgcttccaagggacggaggcagagcttccccccctctgccgcatcgccgtctctccctcctccttttcccccaaagtggcaagggggcaaccccctttctctcccccccccccttttcccttttcccttttccctcccgccggcgtcatcctcccccccccggttgccgtttgggccgcgactgccgagcactggctcgctcccttgaccgcccaaggtcggtttccaaaccgacattgccgtcctataaacccaggcgccctcccttccttttttcccctcccaatcttccccgtttttcacccacgccattgccgtccctctcgccgaccgccgccgtcgcgtgtgccggaggagccggtgcgcgctaggacgcggaaggggactccgggcgctcgtcttcttcctcttccccggcctgaggccggagagatcactcccgtgccgtcggcctctcgtcactgcgccccatcacccccgcacggtagtgcctccctccgttctccctcctcgttccatctcctccccttagactcgggtagtagcacgagtagcctccccgtagctagctagcgccgccccgaccgttgctgccgctcgccgtgtgctcgccgccgtcgccgcccgtgctccgtagcacccgttcgtcgccggcctcgctcggcgtagctccgccatatccgacgctagcaacagactcccggagtcgcgtagatgctctagctcgcccgaatcggtctcccgtcgcgccgtcgccgtttcccccttctctcgccgccggttgccgctaccacaatccgccgccgtcgagcatcccccggcaaatccgagccgttggctcgtctcccctcatcccgtgcaaccttccggtgtgctcgctttcgcctgtatcgccgtggttcgccccgccgttcgcagccaccgtccgccgtccgttccggccggcgtcttcttcaacctcccgccggtccgcgtggcaaccacataggcaagccacctttgaacatcttgagcctatatttgaacttaagtatgttgcttgaaaaatattatgcattgataggattgcacttaatctacatgtcccgtctgcaaggcagattggcggacctacctaacttgttgcagttgacccctccattgtaattattataccatgttcccttgtaaccacctagttacgcctcggtaatcgtgcactctgcacgaatatcgacggtcgccttcaaacttaaaatctgataaacatcttgggtaaaacttaggttttacaaaacacttggaaaacccgacacctgggtcggtgcttgcgaacctaaatgaatttccaaattcgcagaccggggaacgtaccgggtgtacggttccccgctcttgcacttaaggaccgtttccttagaatttcatccgaacataagacaagtacgaccacatgggtggaatgggacacccctggctgagtaactagctaatcgggggagccatgatgccaagagacatgtggattcaacggggtggtgtcggggaggacccccgggtttcctggcacagtatggtctgggacccctctcgttggcatatggtgaacctgtgtcggctttcgaaatgccttgtcgtgaaagccttaaggtctctagtcgtggccgttctgcatgggctggatgatccgggttagtaatgtcgtgtgggtaaagtgtacccccctctgcagaggttattaaactattcgaacagccgtgcccacggtcatgggcggatgtgaggtgattcctagcgtagttttgtttgactactgctttgtgaaatttgctgatgtggtttgggttcgatgtttggaaaacctgcggctgatgggatcagccaggcccgggtggccgtttaaaagccgttggccgggtgccaaccttgaccaattcaaaagactgataccttgcacatactccgaccgggcgagacgcactgtctcatccgtgtcgtttgagaagcactcacttagttgtttcagaaaagagtttaaataaaatcaattgcaaaaacaacagcctttccttgaagcctgcattaaacacttatttcccatggcttgctgagtacttctgtactcatccttgccctatataaataatccccccccccagttgctgaagaagatgaagcggatcccgctgacgaggagttcttccaggagcaagccggctacgatgagttttagggtttcggcctagttcccaagtcgcgcctgtgatgtctggtccaagtcttggcttccgtttcccttttgtaatgtagttgtgagctcgggatctgtccgcagcccaacatgaccgtactcctactctataataaagagacctctgttgctgtgatattctgtcttcctgtgataccagcactgtttcctgggactggtatcaattaacaggttaatttggagcgtcacgggctagtcccgctcggggctagttcggggcgtgacactagcattatagtacttgctcttacctataaacatgtattacataattaatgtctggtcacacctgccatacacacatgcatcttgaagtccgtgctgcagctggctataaatctgtaacccgctgctcttctctctctttaaaatatgtttatagctggcttatagtgctattgtacctgctctgatcagccacacgttgatttacaatacaagacgacgtgcatgtcattcagcagctcagcgcactcggggcataagcctgaatactgaggtggtgttcttttcttctgaagatgaagatgaagttttttacgtaaaacgatgtggtataaacgtatgattaattgagttttaattattataaacttaaaaatatagattaatatgatattttagagccactttcatataaaaagtttatatacgaaacaccgtttagtagtttgaaagcgtcaaacaggaatcttaacggagcctcagctgctgcatatggagggacgcggtcggggaggagctgcaacagcgaggccatcgatgagcgcgtgctccatcgtgcacggaacgccacatttgcgtgcgcttatttatcccgtcgtcgcacgcatcgcgggtcgcactcgcaccatgcggcagagcgcgcttttgcttttgtatcgccttcgcccgtgaggcacacacaagtcatccctcgtgagtgtcacatcctaaaaattcaaaagatataaattgttgtttaaatggaattattagaatttattttaaaaagctttgaagagaagatctaattttaattaataaattccaatataaaatggggccagataaaattttattaaatactttgcttaattctataattcctagatttttctgggatttatttgagctaaggaagtatttttaataaatggaattgcatttcatgaataatttaaattgaaaaaggttttaaaaagtcttcttttggctttgggccgaaagtcggcccaaaacccttccctctctcctcggcccaagccggcccagtccgcagccgcccgcgcgcgcgcgtccgctcgctgacaggtggggcccgcctgtcaggtcgtcgtcttcctcgcgacggccgccgcccgaaaccctagcaccgcgccgccgccgtttccttccaaatccggtcgatcctttccttctccggccgaattgatagaggggaaatgatcctcgggatctcctctaccttttcccctttggaaatatcggctaaatcggcttggaaagtgtttgattcgaagtcgaatcggatcggcttttctctctccgagcccgacctttccatctcgtcgccggtcgccgtgggccttcgccgccgcctcctagcccctttaaaaggacccccggagtcgccgctacccgtcgccaccctcgccttcgcctctcgtcgccggtagagctctagcgccgtgtgacctagcgccgccgtcgccgccgtcgctccagctgtgcgccgccgccgttccggtcatcgccgtcgctcgggaagaccgccgtcgtggtcgccaagtcgccgctgtcctcgtccgccccttcgccatcgccgaagatcgccggagcaccatcgccgccgtcaacccgaagaccgccgccgtttcttcgtcgtcgccgtcgccgtcgccgtccgttggtcttccgccgctcctttggtcaccggtgagttcgccgcgtcgcgctctacgtcttggtgccctccgttcgtgccgaagcgccgctgttcgccggcgagcatgcacgcccgagccgccgagccgccgccgccggtggtgacgtcatcgccgacgtcatcgtcgccctctcccgtgagccggtcgtggaccgttcgatctcggccgtccgttttggatcaagtcgatctcggccatccgttcgcgtgaaccgtcgccgtgcgcccggtccaccgcgaaaccctagccgctgacgcaataaatccctttttccttttcaaaaataattcattattgcgtcataattcaattgaaatccatataagtgttttaatccgatttaatcttcaaaaattcataactaattcatcttagctcggatttagttggttcaagtctctaaatttttccaaaattgagatctacatgttaaaaatatccacatgtactgttcatgcttgtttttgtgctgttttggtgattttgctcttttctgcttagattccgtcgtttccggagagtccgttttcgcaggagaagagtttgaagagttccaaggccagcaaggcaagtcacacagatcccaaacaaccctttgagcatgttgatcccgtttaaagctatcatttctattcaactattgcatttattttcgaatgtcattgggtggaattaacctattgtttgctaaagcccttttgttcttgattactttattccttgataccttgggttattataacttgactagttgagctttatatattggttcagctagatattagatataattgcttagccctgcttagaaacattagcacactattgggataacttaagatttactattatttaatgatggcttaatgataggtcacgatggtcaatcgtgattggttaattaattaatgtgccaactaaaacctgataatggtgggttgtgagcacatggttttgatggtcgtgctcatgacaattaaggaccggttcacgagtttcggttgtgaaacattaaccgtgccaaccacaagccagcatgggcaacggctttatcttttgtatagcatggttcattgcggggcaccagactgagaagtggcggagataagcccacgggggtcgctggggagtccatgtcttgtttataagggggtgattatgatccaggaaaggtgcgctgtaatggattgtgttgtgcaaggggtattgtcacaactcctttccgaggtaccgtggtggtattgaggcacatggtgacatgatgtggggttgtgtcttgtgggtacagtggtacacctctgttcagagtaaaactattcgaatagccgtgcccgcggttatgggcgggtctaacaatgtctttcgtgattagtctcacacatctcatcataataaaagatgctataattggtaataatttgattagctcctggtttggaatggtatattcctggtttggagataggactgtgcagccgggatggttgttcagaatggttgggcctatacaacagggtatgttgtatagcgttggattaatattgtttaattattacttaactattttattaaattctgaaatgtttattaaaggctgtttatgcaaatggaaccctattatgccatcctttgttatcctgtgcacttgcatatttgctgcgtgacttgctgagtatgtcatatactcaccttgcaatcattcatcagaggaagagttttacagtgatgccgatggtgtggaggattaggtgtagccccggtcaagctgcctgtggaatggagtcgtatgcgccgtttatctttctttccgctgcttagatctttattgattgagaggaactatctacctctgtaatgacattttattcgcttattaattagagtaataattgtactctattatcaatttgttattgtgtgcctcggctgattcctggacgagggttcacacacatgtaagcgtttggaattttggatagaaattccgggcgtgacaagttggtatcagagctccttgaccctaggttatgccaaatggttacccatagaagccctctaaaaatattggaaaagtagaactgttctcctccccttctcttttaattaaaccaaactaatggcacatgcatttcctaatattttttttagtggttctcgttcaaaatttattctagcgttattagtactgtacatctattactgtactaatggctcattttaccagcaaaagttttacaatattgtttagtttaatcttgctgcaatgaaataaatttatcatgttgattttataactttcttttatttcttttgaaaccggttgttcaaaagtacaaaatttgtgaccttgtttccaactgtttcaacttatcctgcaagtttggcttaccttttactttgattttctaactttattcaaattaatccaaaaacttgtgctattaattggataaatgtcttaactccctcctttcacttgtctttagatgccgcgctacaagcctgagtacttgtttggtgttgagggatttgtccaggagttgcgtacgatgtcctttgccataggatttgggactgcccctttttatgcccaaattcctcatgatcgtcacgaagaaaagtgccgagtcaaagtcaccttgaacagtaatagtgaagatatcccctcagtgatgttcgaagccggaggaagaaactacatccatacatgtcaggaggtggcaaggatcgccataggagagctccgcgatcgctacagtgatcagttggccgacactgagtatcgctaccatcctcgccaaccccagggaagtgaccgtggcagctaccttgagactgagggaattgagaatgatgctaccacaaggcatttggttgagatgctgtgggctatggatgaaacccgtgcggagactgtgttagcggctcaagatcgtgaagatcggaatcgtggtaagatttgcaagttagaggacaaggtggatcgtttggagaaggaactagccgtattgaagggagaagcaccaccgcagaaggccagggttcgtctcaccgcgaggaagagagctctatttgtccctcgctaccaattggtgccaaaggtccgtgtggtggagaaagaagttaccccagccctagcagatcctccggtcgtcaatgtaagtgatgatgaaggagatgaatcgaagcgcacccattccaagattgagtggggagcaactcaagatgatgaagacgagctgaacgagccttcaatcaactccgatgcccggaagacctagaatgccttgtcaaaccgttgtcttagatcgttgtgttagtttgcttgtttaagtttggttgtgtgggtcttgcatgtgatttacatcagtggtgggatgtaagtgcatgcgtttgtttgcttttgagtgttaggaagttggtgagtttagtggtgtgagagtcttcagttttgtaataatgaaactcagttaagatcaataaaagttaaagtaattctctgccctaagtagttttccccggtttctcttcttgtgccctgcccatgccagatggtgctcactcgcagcaacgggaatggccccaatagtaacaataacaataacaatgaagggaacccaactcttgcccaagttcttgctcaacagacacagcttatgaacatgatgatgcagcaactccagaaccagcagaaccagggaaataaccatgcacctccccagaacaagttagcagaatttcttcgtgtgaggccgcctattttctctagtaccgctaatcctgttgaagctggtgattggctgcatgccatagagaagaagttggatttgcttcagtgcaccgatcaggagaaggtctcatttgcatcacaccagctgcatggccctgcctctgaatggtgggatcacttccgccttaataggattactgctgaacctatcacttggcttgagttcaccgctgctttccggaagacgcatataccatcgggagtggtgtctctcaagaagaaggaattcaggtcgcttacccagggatctcgctctgttaccgagtatctgcacgagttcaatcgtctggctcgttatgctccggaagatgtacgcactgatgaagagcgccaggagaagttcttggaatgacttaatgatgagctttcttatccactcatgactggggattatcctgatttccagaagttagtggataaggctattcgtcaggaggacaaatacaatcgcatggagcagaagaaacgccggattgctcatttcatgacgcaacaggggaataatcagaggccgcgtcttactttaggaccccagtccatgccacagggaggttcttcgtctgttgttcgtccgcagcgtcagttcttcaacaacaatgctggcaacaacatccgcaatcaagctccacgccctgttgcagctttgacacagcaacaacctgccaagaaggagcaaggcagcaagcccgtggtgtgtttcaactgtggagaaccaggacattacgctgacaagtgtccgaagccccgacgcgcgaaggttgtccctgcccagagcaactctaccgcaccagcatcaaaggcccgtgtcaatcatgttgctgctgcagaaactcaaggtgctccagatgtgattttgggtacgttccttgttaacttagtccctgcaacagtgctttttgattctggtgctacacattcattcttatctatgagttttgcgggaaatcatgggatggaagtagaagatcttagacgtcctttgatggttaataccccaagtaatcaagcactctctttgcaacatagccccttctatcagaatagaaattcaaggagtaccatttctggccaatcttatcctgttagaatccaaagaccttgatgtcatcctagggatggactggttagccagacataaaggtgtgatagactgtgctaacagaaaaataactctcaccagcaatgatggtcgagttgtaactgtgcatgcattgtctcctgagtttttaaggtcaagactgaaccaaataactttggaagagattcctatagttcgggagtatcccgatgtgttcccagatgatttacctggtatgccgcctaaaagggatatagagttcagaatagatttggtaccaggaacaactccgatccataagagaccttatagaatggcagccaatgaattagcagaagtcaagaggcaagtagacgatttgcttcagaaaggatacatcagaccgagttcatccccatggggagctccagtaatttttgtggaaaagaaagaccatacccagaggatgtgtgtggactatcgtgcactaaatgatatgactatcaagaataagtatccgctgcccagaattgatgatttgttcgatcagcttaaaggtgccaccgttttctccaagatagatcttcgatcagggtatcatcagttgagaatcaaagaggaagatatacctaagacagcttttaccactaggtatggattgtttgaatgtactgttatgtcttttggacttaccaatgcccccactttcttcatgaacttgatgaataaggtgtttatggaatacctagacaagttcgtggtagtctttattgatgacattcttatctactcccgaaccaaagaagagcatatagaacatcttcgccttgcactagaaaagctacgagaacatcaactgtatgctaagtttagtaagtgtgaattttggttgtctgaagtgaagttccttggtcacgtcatctcagcaggaggagttgccgtcgatcctagtaatgtggaatccgtaaccaactggaaacaaccaaagacagtttcagagattcgcagtttcctaggcctcgcgggatattatcggaggtttatagaaaatttttccaagattgctaagcccatgacacgattgcttcagaaagatgtgaagtacaagtggtcagaagaatgtgagcagagttttcaagagttgaagaatcgcttaatatcagctcctattttgattttacctgatccaaagaagggtttccaagtgtattgcgatgcatccaaactggggttaggttgtgttctgatgcaagatgggaaggtggttgcctatgcatctcgtcagttacgtccgcatgagaagaactaccctactcatgatcttgaattagctgcagtagttcatgcgttgaaaatttggcgtcattatctttttggtactcgtacagaggtgtataccgatcacaagagtttaaagtatatctttactcagccggatttgaacatgagacaacggagatggttggaattaattaaggactatgacatgggaattcattatcacccgggaaaggctaatgttgtagcagacgctcttagcaggaaaggctattgcaatgctacggaaggacgacagttgccattggaattatgcaaggaatttgaaagattaaatttgggaattgtcagtacaggtttcgttgcagccttagaagcgaagcccactctaattgatcaagttagagaagcccaaattaataatcctgatattcaagaaattaagaagaatatgagaagaggaaaagctatcggtttcttggaagatgagcaaggaactgtatggttgggtgagagaatctgcgtccccgacaacaaagatttaaaagatgcaattctgaaagaagcccatgatactttatactccattcaccctggtagtaccaaaatgtaccaggatctcaaggaaagattttggtgggcaagtatgaagcgtgaaattgcagaatacgtagcagtatgtgatgtttgtcagcgagtcaaggcagaacatcaaaaacccgccggtttgttgcagcctttgaagattcctgaatggaaatgggaggaaatcggtatggatttcatcactggtttacccagaacgtcatcaggtcatgactctatttgggtgatagtcgacagacttaccaaagtggctcatttcatcccagtaaagacaacatattctggaagtcggttggcggaattgtatatggcaaggattgtgtgtttgcatggcgtccctaagaaaatagtgtctgatcgaggcagtcagtttacttcaaaattttggaagaagcttcaggaagagatgggttctaagctgaactttagtactgcttatcatccacagacagacggacaaaccgaaagggtgaatcagattttggaagatatgttgagagcttgtgctttagacttcggtggaagttgggataagaatctaccttatgcggaattttcgtacaacaacagttatcaagctagtcttcagatggctccttacgaagcactgtatggtcggaagtgccgcactccgcttttgtgggatcaaacgggagaacgtcaggttttcgggacggatatcttgagggaagcagaagaaaaggtgaaaatcattcaagaaagattgcgtgtggcccagtctcgccataagagttatgccgacaatcgtcgtagagatctaagttttgacgcaggagattatgtgtaccttcgtgtcacgcctcttcgaggggttcatcgttttcataccaaaggaaaattggcaccgcgttttgtgggaccttataagattatcagtagaagaggagaggttgcttatcagttggagttacctcaatctttggcaggagtccataatgtgttccatgtgtcgcagttgaaaaagtgtttaagggtacctaccgaagaagctaatcttgaacatatagaagtccaagaggatctgacctatgttgagagaccaatccatatcttggaaatagatgagagaagaaccagaaatcgagttatccgtttttgcaaagtccaatggagtaatcactcggaagaagaatcaacttgggaacgagaagatgaattgaagtcagctcatccgcatctgatcgccagtgcttccgaatctcgaggacgagattctgtttaaggggggtaggtttgtcacatcctaaaaattcaaaagatataaattgttgtttaaatggaattattagaatttattttaaaaagctttgaagagaagatctaattttaattaataaattccaatataaaatggggccagataaaattttattaaatactttgcttaattctataattcctagatttttctgggatttatttgagctaaggaagtatttttaataaatggaattgcatttcatgaataatttaaattgaaaaaggttttaaaaagtcttcttttggctttgggccgaaagtcggcccaaaacccttccctctctcctcggcccaagccggcccagtccgcagccgcccgcgcgcgcgcgtccgctcgctgacaggtggggcccgcctgtcaggtcgtcgtcttcctcgcgatggccgccgcccgaaaccctagcaccgcgccgccgccgtttccttccaaatccggtcgatcctttccttctccggccgaattgatagaggggaaatgatcctcgggatctcctctaccttttcccctttggaaatatcggctaaatcggcttggaaagtgtttgattcgaagtcgaatcggatcggcttttctctctccgagcccgacctttccatctcgtcgccggtcgccgtgggccttcgccgccgcctcctagcccctttaaaaggacccccggagtcgccgctacccgtcgccaccctcgccttcgcctctcgtcgccggtagagctctagcgccgtgtgacctagcgccgccgtcgccgccgtcgctccagctgtgcgccgccgccattccggtcatcgccgtcgctcgggaagaccgccgtcgtggtcgccaagtcgccgctgtcctcgtccgccccttcgccgtcgccgaagatcgccggagcaccatcgccgccgtcaacccgaagaccgccgccgtttcttcgtcgtcgccgtcgccgtcgccgtccgttggtcttccgccgctcctttggtcaccggtgagttcgccgcgtcgcgctctacgtcttggtgccctccgttcgtgccgaagcgccgctgttcgccggcgagcatgcacgcccgagccgccgagccgccgccgccggtggtgacgtcatcgccgacgtcatcgtcgccctctcccgtgagccggtcgtggaccgttcgatctcggccgtccgttttggatcaagtcgatctcggccgtccgttcgcgtgaaccgtcgccgtgcgcccggtccaccgcgaaaccctagctgctgacgcaataaatccctttttccttttcaaaaataattcattattgcgtcataattcaattaaaatccatataagtgttttaatccgatttaatcttcaaaaattcataactaattcatcttagctcggatttagttggttcaagtctctaaatttttctaaaattgagatctacatgttaaaaatatccacatgtactgttcatgcttgtttttgtgctgttttggtgattttgctcttttctgcttagattccgtcgtttccggagagtccgttttcgcaggagaagagtttgaagagttccaaggccagcaaggcaagtcacacagatcccaaacaaccctttgagcatgttgatcccgtttaaagctatcatttctattcaactattgcatttattttcgaatgtcattgggtggaattaacctattgtttgctaaagcccttttgttcttgattactttattccttgatatcttgggttattataacttgactagttgagctttatatattggttcagctagatattagatataattgcttagccctgcttagaaacattagcacactattgggataacttaagatttactattatttaatgatggcttaatgataggtcacgatggtcaatcgtgattggttaattaattaatgtgccaactaaaacctgataatggtgggttgtgagcacatggttttgatggtcgtgctcatgacaattaaggaccggttcacgagtttcggttgtgaaacattaaccgtgccaaccacaagccagcatgggcaacggctttatcttttgtatagcatggttcattgcggggcaccagactgagaagtggcggagataagcccacgggggtcgctggggagtccatgtcttgtttataagggggtgattatgatccaggaaaggtgcgctgtaatggattgtgttgtgcaaggggtattgtcacaactcctttccgaggtaccgtggtggtattgaggcacatggtgacatgatgtggggttgtgtcttgtgggtacagtggtacacctctgttcagagtaaaactattcgaatagccgtgcccgcggttatgggcgggtctaacaatgtctttcgtgattagtctcacacatctcatcataataaaagatgctataattggtaataatttgattagctcctggtttggaatggtatattcctggtttggagataggactgtgcagccgggatggttgttcagaatggttgggcctatataacagggtatgttgtatagcgttggattaatattgtttaattattacttaactgttttattaaattctgaaatgtttattaaaggctgtttatgcaaatggaaccctattatgccatcctttgttatcctgtgcacttgcatatttgctgcgtgacttgctgagtatgtcatatactcaccttgcaatcattcatcagaggaagagttttacagtgatgccgatggtgtggaggattaggtgtagccccggtcaagctgcctgtggaatggagtcgtttgcgccgtttatctttctttccgctgcttagatctttattgattgagaggaactatctacctctgtaatgacattttattcgcttattaattagagtaataattgtactctattatcaatttgttattgtgtgcctcggctgattcctggacgagggttcacacacatgtaagcgtttggaattttggatagaaattccgggcgtgacagtgagcccccggtggactttcgcaacaacggtgccaagtggcaccccgcatcacaagctcaaatcccacatgaaaatgaccaatcggcgatagatatatgagtatatccatgccaagattaagctaagttcatcaatgtgacaatatatatacagcgggagaagctatgcttctcaaatcaacctgaaagtgttcattccataacctaagaaattgagggaagagaactagagattcgatacaagggtgcaaaactgtaatggcagcctgagaaaagtcgctgggagacttgagagttgagactctgattcctttgcagtccatagcaatgctggtgctatggcacctggctctgtctcattcatccgtgaacatattgccatggcggacagacaaaatgcaggggcagaggcacctgagaagccagtcatcatacagaggaaaccaagcattctttgtctcctagcagattcccctgtcaatgtgaaagacaactagacaagccgcctgatgaaaagcagctgatcatgtgccattgggagtggcatctgagagtgtgtggttgatgtcctcgccatgttttccgttcatctgcacacgttgccgctggataatcggaaataggtacgttaggggaaatatcaaaatggttgctgcatataagttgctaggtactatgtagaagataaaaggcttgtggttatgttgcaattgaactacaatgaaatgtagatatgtttcattgttggatgaaaattttatgacaaaataacttctaagtttgggaagttcatttggagattaaaatagaacatagagtagctgattaatgctctatgatacccgatcagtagaatcgacagtgtttccatttaacaatttatggaactcttccttcatcttgcaatccttctctagtttatggagctcttcctttgttctgccatctttatctttcgctgtaactgggagcaaagatgatccatttgtgcgatctggcatttctgtagaattgccactaacgattgttacagaatgaaccacatggataatactgcataattaaaggaagctaaaagagggtacctggtagcttattgtcaataaagaatacaaccaaattgacagtatacctgacgaaaaagaatgcaccaaagtcagatgccactacaaggcaatcatattacagaaatgaaactttatcctaccaagcaacaacaacatccacgctgtagtgttttcgagaagcaattataagaagactctgaattatagccatcagccaagcaagaatcttaatcaacctaacaaaacaggaacaaccaatgagattagaagatcagatgtcagagtactgagttagcatgcaacttgaaccaaatttatgacatattacaggcaaaaaatgaccagggaaagagacaaataagcgtgtgtgcgcatatgcattctatattttaataccttttggatccatatttatgatatgtacgcacgaaaacaagtgtaaagatcatgtgagatgaaaaaatcagatcgccacaaccaaaaagcactccacgaggaactgcaaaggaaaaaaaaaggaaattcagatgattttccacccatctggacaaaagattcaacccaacaaatgatgaaaggcttacagttgatcaggagcacttcaagtacattatggggcggtggaagagtggccatttttgagccctgcaaaatgcaaagataaatgacttcagtaagcctttaacaaagtatgacagtatgtagttcacgagtatgctttagctatgatgagaaattaaggttacctcccgacagtgataatttggacctgggagctgagtggaatagaaagtaataatccgcaaaaattgtgaagcctagaggaaagaaaagaaaaacatcattgttacatcatgattataatggttgcagagataagttaaaagacatgggacagccacttacaactaaaaaggccagcaccctgcgccagagtagaacagtgtagaaacgtttgctatgataaataaaagggtgaaaactccactgcaaaaccataaagattgtcagtcaattacactactttatgatcaagcattacatgcaagtagcttaaacaaaccaaattctgttgatgcggagaggagcaaaatacataaacgcctctgctatactacaacacaaagaagtgcatctcacattctcaccattttaacatcttaattgtacagaaaattggtgcaacaaatagcttcgaaaaacattttttgttcttacagatcatgcagacaagaccttactaaaaggaccaaactaccatactgtagtacatattggaggtggcaataatttatcggagagcaattgattaacccatggtcataaggtacaaaatcacactaagctaaattatcaaattactttttcactttcataaatcaatctggatagccactattttcaaatttatttctcactgcagctctttcaaattgtgttgtttacttgtcaatatcagcagggctgtcattgccatttacactacaagatttctggctaacttattcaagatataagaagaaagggtcattacaaaacatacatcattaattatcaaatatgtatgaactatgcaatagatgatcatatgcagtgaagcaaaatagccacctaccaacaggaaggaaatgaagatgaatgtgaacacgctctcactaacatatcctttgtcctgtccaagttcctaaaaacaaagagaagtgccaccagtggcaggaacaaatcagtaccattgttctttgacagatatgagattaatttttaccaggtcacataccggaagagccatgaatcccaagtcctggagcagtggcccaggtcgatgcaagtaatgtactcctcgagcagccagtccatgaatgtactaattataggtaaaaggattgcatgaatttccaatatcatccattaatgaacagataatattatgtaagaagtaaatcttgagaagatgatgaagaacaataaaagttggacattttattttatttttccacgctctcaaaaagagaacctgtagaaaatacaaggagaagaaagattttatttaggcgccaaccggcatttcgcattgcaacctatcaagccatatgggaaatcaaatctcacgctttcccaacagttagtttcattctttctccatcgtgtacagaaaaggactgtagatcttactgcgctctaaaatgtttactcatctaaggaagtaaatcaattataataacacaaacatggagaaaaaaagttatatgaaatcaccacagttgagtcagatttctagggaatggagcatgtctgacagggagcagtatcacaaatggaaccaactatgtcaaaggattgggtgcgcgattttattaaatatcaagaggataggttgcacctaagttcaaatgaattcatctcctatatctcaactcaaaatagaaaataatgcaagtcctattatcccaaaatgttaattgcagtattatttctgaggtcaacttatgatatttaattattatcttctcataatagagcatatcctgttacagtacaagcgaatatatctgatgacaggcccatgaatatccaattcatttccagaatggcattaataatcatctttagttcaataaaccaacctacaagttgtttgcatgagcatgattacagtttcgaggagactacatgcaggacaagaaacatcacagtaactgcataataagcgcgctgattttatgaaaagaatttcagaaataaataaatacttgcaaaatctagacaaacataagaggcaatttatctaacatattttacaagagggaccaatagcaagctaattgtctcaaactctctaagcagggaacttttgaagaagacacaaggcaacaatttctccccatgatatgacatctatcatggtatattgcttttgaccttggctccagctcaaccaagattgccagtgcttgaactgctttctgtgaatttgcagtagttgctcatccaagtatccaacatttctcaacaagctctggatttttttttctactctgaggacatatcacataaacagattgaatcatacttccatccccaatactcccctcttgattaacaacaaactaaattcacctaaactgtgcagacatatagttttcatgcaaatgttcaatcagccacacccttgctcgaggtgaggtataatttaccacacttagttcatacaactaaaccctctgggcagtgttgacacagaattcgtaccggtccccaaatccaactctaaaattagcatagattgtacgatgcagagctagctaaaattgccgttcaaaaggggtcgaccacgtgctatatcaaaatttttgaaacacacagaaaatagcagtcaagaattacaaagcacgccacaaatatggcaattatgcacacggagccacggaggataaaaaaaatcaaaggaaataaactgaagtttacctgaaacaccaatccggcaaggagcaagcgccacttctcgaaaagaagctgcagctccaccgctatctccgcacacaccttcctccatagctgcacaaaggcgggtaaaaaaaaatcacaaaccatagctagaacatcccaaccccatgtgccaacgaatccacaccttggtagcctcccgagcgatgtaaaccgccatggccgcaactcccgctcctcgcccgccgcctacaggtacaccctggagggctcacacccatgctccgatccgcgcatcactgctgggatcacggcatctcgtcgcagccaggacctcgccacctcctcgggaccgccgcgagatcgccgcccgccgagcggaggaggatccccccaagcagctagctccggggcctccaagagggggggggagcggcgagcggcgcgaatgcaattttccggcgacgaggcgagtgagggtgggggtggtcaggctcaggccgccgcggaggagagtcacgcggcgacggcgtcgacggtttgaatccgggagggggagggtgggttcgaggaacaaaagggtcagcggagtgggcgttttggtaaaatgcggtgggtttaagtaactgaccgcattaagcggagtagttgcgcttctctttcctttctttttcccctgtttttagaggattgcgctattttttttggttaccagtgcttccaatgttccaagaatccaagttccagctcatctagggttccattcatggaattaaatgtagtagtatcatattatagaaaattgatactagatcgatatatgtctcacgaaatactagtgaacgggaaattcaagaaaatgtgaggaacattcgtcttaatttttgtacttcctctgtttacaaatctttgatgtttttcgcaatatttgatactccctacgttccataataaggcacaaccacttttagtagatgttatataatataaggcatgcatgcaagcatgcaattaactatggcatcttctccattaaattattacttttttaaatcttccactctcatattatctgatcatattggatgtatgcattatatttattaggatgattcaaactacaagatgataataattattttttggtctttatgttaagagtggttgtgccttatattttggaatagagggagtatagtttttgatgaatttgttcatcaaattcgtgttaaaataactttgtaaaatctaataggtttataacattacgataataccctccaaaataaatcgagaaattattaatagtcatagtttgaaaaggtaatttgaaacaaaacagtgcattagtttttacaaccaattaccatagaaataccaaaacattattatttctgataggtaggaacagacacatccattacgtagggtgagatgactagaccaaccacgacctgtgacaccaacacctccagaaacatgccctagtatagcgtatagccaccgacccgacatcagcccattagatcaattaggtactaccttccgtcctaaaatatagttatttctagcacaatactttgtcttaaaataaagctatttttctacctatcttctcctctcaaccaatcacaaccattctttttcacctaatttctcttttcaaccaatcacccacatttttcaatcattctcacctactttcttaatacccgtgccaatcttaaaaatgcttacattttgggacggagtaatatttcatacacgaggtatcgatcatcatatgatctttgtgtatatgattgcttgtcttcatttctaactcgctcaatcttttttaatgcatcatcaagtggggtgattacgattcatgtgctacatgccgtgcacgagcacagctacgcatttgctttctgcggtttgccaatatcattgtagaagttctttggtgtttaaatgtattgattataatctgtttttatgcgattataatataaatataatatattttacagcaaaaataatataccctacaagatgtctttgccaatgatctccgtcgtcccatgtgcgccatacagttgtatgattgtatctgccactcggcaacaatggagccgcaaagagcttttggaagaagtttgcaatgtcctaatgacgtatttatcaatgttcaattagacttggctacggcagccaaccagagcctaacccggtttactcaaacttggcctgcacaaattatttagtttggcatattttactgttagtatcaattaacattatagggacatttaagtatttaactgatatatacgtctacattctggtggtgctggggaattcttttttttcatataaatcttcagtatttgtgattgaagatagcacgtgtacttgtttattccatgtattgaccgttgtccgctgtgatatcaacaaatgtacgtaccccgatactatacaaaacaattaatgtgtactctcctatgtagcacaccacaaattctttattgaaaacgaagcatagaacattatatagaggccggccggtgccatccttctctcgaaggatcaaactttgctaatccatcgttccatcttctgtgctaggttggcaccaagctagcgtacgctgtctatccgcggaataaccatccggtcatgcaaattccaccttccttgtaataccattccaagtcaaagctcggagaatacgaaagggaaccaagccaagtcttattttgtcattccgatacctattttccccatgtgaaattcgaatgttctcaacatgactcgaaactttgatactactacctgttaactgctttctcatgcagatcccagcgatccggatcggggttcataaaaaaaccgacacagctggagatggaaacatggagaaccaaacaaccccaagtgacgcgaacgtggtggtgatcacacgctgctacgggacaagccgatgacaagtgcacgtctgcgcccagcaactttgacatgtgccgttggccaagccaaatttaatactccgtatcatacacatctgtaccgaatcatctgcgtagcagtatcatggcgtatcatgcacacacgtggcggataagctggcttggacggctaaagttgtacgcgtccagagcgaggaggtgatgaaaattagaggagaaaggttgcagtcgcggcgaagcaagatggacaagcagacgccacaggggcacggcgagaagccgcggtatttgcccagatgggcgcctgttttgttcgaacccgacaggtgctttcagccggaaaggcgaggcatcatcatccgcgtcgaagacgcgtagcgatcggtagagccatcaacacacgcacgctgcggtctcgatcatgattcgcactttcacagcggttcgtttctggcgttttttttttctttttttgcgagcacgatcacgatctcagctagctagttttacatccaaaactagtactgtcgtgtacaaggaataaaatggaacggttttggggcaaaaatccttcttttccccaaggagagggagagttttgcacataataagccttcctctccgaacgaacatcaacatgagagggattgaaactgacacaagatatccagtttgcatcaggtttgatgaggatggagggcatttgtgttccttaaatgtaaggttgtcaggaaatgctggcgaattttgaatatggagcaaattcggttggatctccttgaaaatggggagttttgaaccaacagttcaagagaacaaactgaaaagataaaggtacaagaacatatgaaagtgaaactatccaccgcagttgtttcgcctacatcgttagtccttatcagacgctgtatatcgaagagaaccttgtagtgctctgtacacatatcaacagacaatagcaactatcaacaggcgacaatcacccagtcgtcattattacttcgaggatcaggatcagtaaatcaacttgttgataaatagtccccaaaatagacgctcgtggatagcgagatgacgagagatttgacaccgtgacgaacagatgattccaaatgttcactgtcatatcctgttgtgtcgcccaactctgtcaaagaatattcaggtgtgatcagttgaactaactcagatttttagttgtgtcaaaaaaaaaagaacttagattttagtaggctgcgagggcccaaagcaaaacaaatactatgactgcttaatgatgggcctaaagccatcagtggtcatggcccaaatatggattcatgcagcacaaacgggctttagaagcgaatagtcctgacatagcctcctcaccactgggccagaaaatcagagactcgagcacaacgcccgaccttcccggaggcggacctatccatatcggaaagcatgcgtgcatccactcgaataacgtaaggctagattgcactccaagtttttatcgtgtgacttgggccccggaccagcctgccgggctgccggccgccggcggcgggcgacggaaggaataatcagcttcgggcacatagggtgcggtgcggatgcgtgcatgcacgtatccactgaaccgagccgcagccgcgcgcgcagtgggccgtcactccatcgatcgcgtggcctaccggcagcacgacccggcggcacatgcaataggatgaggagaagattgctcgcaaaccaggatcatccgatgaagtgattagccccggaccaaatcagatcaaagaggattgctgacgcgagcatgtagtagtgtagtactactcctctgttgactatagcatcgggtgatcgatggaacaccgtatctgattctgctgcactatgctgatcagctgatgcggtccacacgttggcacgttgctgtatattctgggaagcatggcgtgttctacgccaacacgacgacaagtggctgactttgtgtagtactccctacgcatttcaacggatgacaccattgattttttttatccaccttcgaccattcatcttattcaaaacttttgtataaatataaaaacatttatgtcatgcttaaaaaatatttaatgataaatcaagtcacgataaaataaatgataataatgtatatttttttaaataaaacaaatgattggtaaaaagtcaacgacgtctaaattatgtatgcaacacagcagccaaggagacacaagagagtcaaataaagctttggcatccgccaccaggacttctctaaactggtgacaggtgggaaatcaagatactccctccgggttgataatacttgtcgttttggacaggggcacagtcttcaaaaagtaactttgacaactattttctattataatatatataaaaatatcaacaaacatatgattttattgaagtacttttaaagattaatctacaaatatggttttcatatttttaagataattattttagaaattatttgtaatcaaagattttaaagtttgactttacccttgtctaaaacgactaatattatcagctcggatggagtatataattacctatgaaaatacttcctccataaaaaaaaactcaaccttctaaagcattcgcttacaattagaggagggccgccaaggctagagaagataagataattggacacaggttaattccagcaccaaatctatcaggcctgtaagctcctatcgcagggctggaccatggtcccaactcccaaacgaaagaaacagaaaggctcacgaattaaaaaccggattgtctcactagattctggttgtgtgcattgctgacctgttgtcaataccggtcccctcgcagtgagaaactaccaacaccaataatccatcgctccgtgcatcctggcctcctggggaaagagccgatggcccaaggtgatggacaaatttaaatgcaagtccgacagaaaacagctggtgcaactgtactctcgtactcgtacacatgcacatactcctacctaggagccaccttttccgctttgtctacgttcaggcgctcgtctcggctctcttggcgggcagcctcaaacgctccaaagttttttcacgtggttaacaaaataacgctccaagctagtatttgactttgtgagcaatgaaaaatgaaaaagacttggtaggtaagcacaaaggctccatttgtgttccgcagacgtaattcggcttttgttaattgccatggtagtcagtctgccaggcctccagcaatcagccatgagagcgtgacataagcgcagaacataatcaagtttaaatataaccgattacagttgactaaacacattggagagaattcttctattcccgcctctgccatttcaactttcttcacaatcacaaatattccaggtccgggtcttgtctcccaggctacggatagtaccgccaaaacattttgaattctccagtacacagagtgcccctaggatctccagtacaactccatcaaatactagcctcgtagcctgttgattcaaaaatatgtttttctactacttgagtcgtacacctgcattacgacgctccgctgctggatttgatctggagaacggagagagcaatcagaggatgcaaatgacgcaaccagcgcgacaacgagccgagaccaatcgatagagagaaagtggccgtggcaccgcccaactgctggctctcggcaacctgacggccacatgggcgccggttgcaccagctcagacgcaacgcaaaacccaacctttccaccgatcacgacagcctaacaatatgtgctcgcctagctagcctcctcgtgcacattcatcagtcatgacaccaagatccatcctactagtactatactgcctaccgtacggtgcagcaaagcaagggtacaaaggcgccttcgaacaggggattaggagggggattagtattagtagtagtatcagctttgctgtaaaggcatcgttaagaaaatccggatttcccaacaaggcgccgggcaaggttctcttttaaatttgaacagaacccgaggtttcgttcgacggcaaggtggtacaaaccgaaaacaaaaggacttggcacgccacacgagataatagctttacaaattgaccggtcagaggcctgcccggccacggccacacgacacgccgcaacaaaagacgacaggaaacagccagctgccgaaacggaatccacccaaaactctggccaaacgcccggcttggcaaggttatctgtatcctaatccacacgattatataccgagtgcccgagcctaaacgatatttttcacatgatcctatcaaattttagagagtatatccagatactgcgatcgctatgaaactatcaaatattatttaaaataaaataaattgaaaataatgggaataaatatactaagtttacataaaaaacaattaaatatattaaaatcaatattactagccacctagtcggacgttgcgcgactttagatacccattttaaaccccctatacaagaaaactcttatactggaaatgttataataggttggtttgttttgaattttgatcattaagcgtcattgatggattacctaagttgataagcatatggcctcaactatatgttcaaaattttattacacaattgatgttgtaatgtacaattccatgttcaatataaactcaaaacaatcctatatcccatctatctattcacatgcgaaaacatatttgtgctgcttgtagccaatatgctccttcctccgtttcatattataaaactttctagcattgctcacattcatatagatgtcaatgaatctaaatacctatatatgtctagattcattgacatatatatgaatgtgggcaatgctagaaagtcttgtagtatgagacggggggagtactgtttaagtaaatataacaatgactataaatcatcttttactaattcaggaaaataataataggaaaatattactttaacacttattcctttagctaggaagttcttcaaaccgcctccatcctgtaccagtgttatatcaagttcatattatattatactacctctgtcccaaaataagtgcagtcgtggatatccgtgcccaacgtttgaccgtccgtcttatttaaaaaatttgaaaatatttagtcacacataaagtactattcatgttttatcatctaatagcaataaaaatactaatcataaaaaattttcaaataagacgaatggtcaaacgttaaacgtgaatagtgcaaaacagcacttattttgggacggagagagtatatgcatagcacagagctcatcatcttcccttttgaaggagataaagccgaaagtagttaagatttagaacattaatatgtcacatataatctgagatgaattggattatacttgacttctattaggactgtccttaagacacccatcaaggaaaaaaacattttttatataatgattaaaaacccatattgtgaatgaagcatttaactatacacattccaactatttagaaaggcggagtatttatgcttagaaattctgaaggttggcatgcaggtcatgtagtcatcagatagaattcagtgacaggggaaacaaccatttttaatcagcatattgcagccatggtaccatcagagtattttgactgatgtttgagattactgctgatatgaaaccaaatgaacctagctaaaaattaactgttttaatctgaacaacttcaaaatttgttgcaactgcaatgacaaaattacatgatattttatctgagctttccttggttatattatgagtatcatgagacatccaataggtgtggttaaacatatgaacaatttgagcaagctagctgtgaggaaatgtaaaagaaaatgcagagacaatgatttggtaccgtagctaatgtttgcctgatttcagaatatatgtatggattgaaaagctactgaatcaattgcaaataaaatcacatatctggttatttcggaagaggatctttgacagctctcgtcattgatggagacaaagaatcaacgaaccagcgtacctcagcttctagcttcttgggtccagttatatcaaggaatcaagatcgtggaattcactcaactttttggcaatcaacaggaacatctctagtttgctatatgccctagagctcaccggcgaggcggtgcgtctcctcggagatgtggtagaagccggcgccccatttcatggcggcgagcgggccgggcggcctcctgccgcagcgggattcggtggctagaccgatctgtgggtggaggacggggacgaggtagtggagacagaggcggcattggtagaggggaagaggaggaggaagtggtggcaggcagaggcggatgaggaacttgcgccaacgacgtggatatggagggggcgagtgggcgcggtggaggaggagggtggaagtggaggtggaggaggcgacggcaatggggaggcggcgatggaagcgaggagatgggcaggcggcggaggcagcggtggataattttttttctttttctttttcggaccttttcacctgctcggtgatttttcttttttatacggcacgacggcttctcctattcgcgacgcctcggctggaccatggaccgttggccactggagcattctaccatggtccagattttttttttcactcaactttactacttcacatctgatggctggtgttgaattcattgtgcatccaacggtcattattaaattgataacgtggcgcaatgaggtgacgaaacactttacttttttcactactttagatatgctctaattcatgacatattactctgatcctacagtaatataataatataaattttaaataagatgaacaatcaataatatgataatataaattttaaataaaacgaaagtacataagtacatagaaacccattgttacgtttaaaatgtgacagatgtaccttaactttgtggcttggtgctgtgacgggggacccaaggggaaattcacaacacaagccgtgatctcgtgatgctgtgttattaatctcgcaaccaatttggcaagaattatcggagttgcgagttcgcaagttgcagcacaagcgtcgccgtcggtaggtaatgacaggaagctgaagatgcaagatcccgggccccaaccagggcagattcttcggtggcagatgaccagttgattatgattggaactaaaaatagaccaaagaaataagacaccaccatgttaagcaactaggacgtcatatgttagacttgtcaagatacatcgaacaggttgagtaccacaaccacccgttttacctctgtacttcctactactccacatccatccaactacagaaactgtcgcccaacccaaatcagaatcccatatacatagccagagcaatatgctatgcaccaaaaaaaaaaaaaagtggaaggggaagcactgatgcacaattacacgaataaactgtatactcatgtgagttcctgactcttgaagcaacatatttcaaaaagatgcaagagagactgatgagacaaaggcaacacagcaaacgcagtgttaaaggaaatctgaagctcttattatttctttcttacaacttttcaaacatctgatgatttcttccaatcatcatacgactagagctaactggcatagagctaactagcatagtactccctccgtcccacaatataagagattttgagagtttttgcttacaacgtttgaccactcgtcttatttaattttttttcgcaaatataaaaaacaaaaagttatgcttaaagtactatagataataaaataaataataatttcaaaatttttttaataaaacgagtgatcaaatatttgcaaatgaaaacttaaaatctcttatattatgggacggatggagttccattcaattctccaaaagaacacttattattggatatatcaccgtcaataccctgaacaacctacggaagccatgtatttctcatctgttgatctgcatccatcacccaccttccaaaataaccaatatatcaccatacaaaagaacacctaacactgatgctactgccaatgccattcctaattctagcctaacacctacctagcactaataatagtagcagtaataattcttaaatatgatccattaaactgggattagaacagacgaacgaagcaaatctgcgcctcagtatgtccattcctggggaagattcacctcgcgcgcagcggcaagcgtaggcggcgccgcggtggccgcgtggaggtggtgctgcacccgcttctgggtggtgagcattgcattgctccgactgaccagagcgtctgtgagaaatgaatcaggaaactgtcaggagtactactcattggtgaaccgtaacataaaaattgtaggcgtggagtgaacttaccgtggtcgagaacgaaaccgccgggaaagcaaggacgggcaccaagatcgtcgacgttgaggttgagggcctgcacgacgcgcgcgggcagaagcacggtggagcagcctgaaggcaagcagagccgcagaattttagcccaaaatacggcgcgactcacgcaaaaaagggcaggtaaaggaagaggttcggaggaggtgcgcacttggctttttcttgggctcggcgggggcgccggcctggcgggggatgaacacgccggtgcccgtgcgttccgttttgccgccgggagggctgaggaacacggcgcgcatgccggccgcggacgacgcctgctggtgggccttctgcagcggtggccagccggaggagttcagaccaagcggcgcgccgacgccgacgccggcgcggtgcgttccccacgccgccgctgctgccgcggcgagctgctgctcccgttgctgcttcaacagctgcctctgcttcaggaggtggaactggaaacaggcggagacgaacagaacatcagaacagtcacaaaatcaaacagaaaggcatggaacagttgatttatggcgaaagaacttacatgagcgacttgaacctggcgttgggtgagcatgttgttgttgggcgcgaactggaaggcaccggcggtcttctgggcttgcaccggcggagacgggtttctcgcaggtgggacgaagcggccatggccggcatgcgcatggggcttctggggcaccgggatgctgttcatgcgcaggcgagcaacctgcccggcagcctcggagagaacgtcccaagggtccgtcggcggctgctccagcggcgacgacggcggcgagctgaactgcgacgcaccgccgttggggctatcctccccggaagccgccaacccgcacagcgtcgactgcggcgaccccgccatcacctccacctgtcacaaacaaaagaacacgatcagatttcgctacaacgaaggcgcaaacacaaagcatgtcgaacaaggccaaacgagacaccaaccaaccttggaacccgttccctttccaccctcgccggcgaggaggtcggccatgcgtcgcgcgaggccatccaacccgtcctcctcgtcgctctcgctcttggccgcaaccgccgccttctcctccacggtgaagaaatcatcgtccaagaactcgtcggggagccacaactccgcctcggcggcgccaggggtgcacacctccgccatttggcccacgaaaacacaaccccttccgtccgcgcggctgctgcaagcgtggacggaacacccactccccacacgaggaggaggggtaatataggacggcggtggtgttggccaggaattgccgcgcggggaagaaacaataataggcagcggcacgtacagggccaggagaggtgatggctgatggctcccctccccgcctccctcctccagcactagtacgctccaacctcctgtcctcctcgtctgtgtgagcgatgggggggacccaggaaggcaaaacgcgaagtatcagatgatgagatgagatatattatcccccggaaagcggatggacggaggaggggaagcggcgtgggggtgggatggaggggagaatgtccaaggacggctggggattttatcgagcggctgtggttacggaggtcaaagcggtcctcatctctgcttgtgttgggtggctttataaagtgagccggaaggagtgtaattagtgggtctgatttttatttttacggattaaccgcacaacggcacaagtacggctcaggcataggcatagcttatctcagttccatgataaacttaaagtctgtatgtaaaactataatattttaaattataaatttcacatgacatggaaacaaaatgattatccaaatgttatctacgtaatcatagatttaaatttgtaaagctaaaaatattcaactgtaacaaaaaaaattggatccagagctatatccaagagggcctacatctgccgtaaactttaaatgccaaatgaattgtttacggttaaaaaaaaagacttggagttaggactatttgggaagcaaattttggccttgtttagttcctaaattttcttttttcaaaacatcacatcgaatctttagacacatgtatagaatattaaatataaataaaaaagaaaaactaattgcacagtttgaatggaaatcgcgagacgaatcttttaagcatacttaatccatgattagccataagtgctacagtaacccacatgtggtaataaaagattaattaggcttaataaattcgtctcgcgattttcagtcgagttataaaattagttttttttcattcgtatccgaaaactccttccaatatctgatcaaacattccatatgacatctagaaattttcttttcgcgaactaaacagggccaaatgagtaaccgagtgtctggaataaggtagtcagtgtatgtgattaggactagcgtttgaaaccaccaaagataatagtaatgtgttttcctcctgagaattggtcctttttttttctgaaaaatgcatctaacttattgttgctatttttcctttggtattaagacaacacactccccccaccaaaatggtagtagtagttcaacaaatgttgacaaaaaaaccacatgataacaacaaaaaaggtttgaagttcacatcaacatctgatggtaatgtactacaccagtcctactccttgtggtacgatcggtttcttgttttccatttttgcgaggggggtgccaacctactcgataatccgggagagtactggcgagataggcgtggtacgaattaaattggtcgatgtggcgtaaagcacgatcgtcacgagactttcaccgggccgcagttctcgtagggcttcatgttcgtgtttgcaaccgcattcaattcgtgacctggttctgcacattaatgcgcgagtttcgcgccttgtaccgtctgtcctggtatgtacgctacagcagccaaacacgtcacgtatgaaaatactgcgcaacccaaagaaccggagcccagccgtatacccggctagcgacgcgttacaactgtacaagaggtactaacctggatgacatgaaactatgaaagtgaaacgcagccgaacattcgccggtggatttgcggtttcagggggccactccgtaggtgtgtgtggtgtggcccagccgagcagttgatggtcaccgctaagattgagcgtggaaacgaactacggcactgctggggtggggggcccaatgcagcagccaaaatgcgtgccatctatgatgcacatgttatacaatgtactccgtaccccacgtacacatactcctatatactccctccgtcccagaaaaagacaaacattggtttccgtgtccaacatttaaccgtctatcttatttaaaaaaaattatgaaaaaaattaaaaagacaagtcacgtataaaatattaatcatgttttatcatctaacaacaataaaaatacaaattataaaaaaatttcatataaaacagacagttaaagttggacaagtttgactttttttacgagggagggagtacgtatctctactttacaatgacattgattgtcgtacgagtaccgacagctggaatacgtggttcgaaacatacgtgccctggctttcctgggcatcaggccggtcgaggggaattccacaccgagctcgctgcccggtgggccccgctcccagggcagcaactcccgcggtttttgcaaccggcgaggcgcaccgcgcaccagccaagccacctcgcgcccacctcgcggacgcctcggccctaaaccaccacgttccgttcacctcctttatcgccgctaatctggcctcgtccgcgtgccttttcttttttttttatttttttgccttagcgggatcgcattgtttggcgggcagacgaaaatagcgtgaggcgctagcatttcgcgggagaaagaaacgtggaagcgaggatccgagaacgctggtcgctccccatgctttcgcatgcatcgtgcgtttgtgctccggctgaagtggagacataggggaaaacaaaacgtggtcgacgtgcaaggcgccaaggccggcaggcgcggccgacgtgcgtacaacctaaaagagcggagtttcgagtttaagagggtgtttggaaactaggggctaaactttagtccctctcttttatgagagggactaaagtcccaaacacccccccctaaaccacgtcagcggacaaagaatctgaaatttatgtcattccgaaaaaaaggagcgtctgactaaaaagatttgttttctgtcggt

SEQ ID NO: 5295 - DNA, 31556 bp, Oryza sativa
  unsure (1)..(31556): unsure at all n locations
cggcggggggagagcggacgacggcatcgtggggaggacgaacggcggagacaggtccccgccgccggtgcggggcgcggtggggaggagatggggagacggccgggtagggtttgggccttggttaattggatccatgccactgcaaaagtgcaaatatggcatatcaaaataatgccactcttattcgtcatatcggctacgtactactgaaatctaggaaaattggaaccatgccactacatcacattttccatcaaaaatccccgttagccccaaactgcacgtgggccccacatccctcccctctcttctctttccccttcctctctctcctccaccgtagatgcaacaggaggtgtcgtcatcatcgtatgagggaggtccggctgcgcctgcgtcgtcgtcgtcgtcaagcgccgaggatgtagtccacctgtgaccgagcggacgcagtgaactgcgccggcggccgccgccgccatcgcactggagcgaggccgccctcgtcgccatcaggtggtcgacgtgcacagcgaggacgagggacgccagggtcacgtcaagggcggatctacccattaggcagggtgggtcgaccgactcagctacgacacgtgtcaccccacaacctctagacctacttacctccttatagtagtcatgggacattaaaatgtataacaaggtgtaaacacccaacagattaaggcaattatgcgaatgaactattaatacgatatgtgttgttttcgattgctcttatcgagtgtacatcttcgttctctgccccatctttcgattgccgccggagtgctgcatgaggttgcagatgaactggtctaggttggtcttcatctcggtgtgactaccatcggccgggagcttcccttggaggaaagcggcaggaatacaagattaattgtataatgttaacatccacaatccaaattaagcagaaatttggattcacatgaacaagaacgaatcagaaggaggataggttttagtgccttggtgaccaatgcttgcgctttgacgaacttgtcatcccagctgaatatggagcgcctcgtctcggagccggcgggcaggactgcgccagtatcgtcgtcgcccactccccgggcgaggtccccggccatcgcccccgcgccggtcgccaccccgcccaccgccgcaccgccatccccaacactcgttgctgcagctaccaacctcctcccggcgcgcttgctttctgctcctgaaccgaagaaaggaagagggagagagatgacggaggttgacaaaaaactggacggaattggcatagttccaatttccccaaattccagtggcacatagccgatatcgcaaatagtagtggtatttttttaatatgcagtggcatggatccaattaacccttgggcctttgaggtagatatgactgcttttcatgaaagcccgtgtctttttcatgtttatagcactacccctataaacagaattttcttttcatcgggtgtgtttagttcacgctaaaattgtaaatttggttgaaattggaacgatgttatggaaaagttgaaagtttatgtgtagaaaagttttgatgtgatggaaaagttgaaagtttaaagaaatagtttggaactaaacttggcatttgtattgtatttctattcaaaccgaggggttttccaaataaaacataacagggtgtcagtcggttcgaggatatatacgatattccgtgaaaagcgaggagtttttttttgcaaaaatactcaacataaaaaaactcaaaaaagggggaaaaacgcagcatacacactactatcatcgatattttgtttgagatgtgcaacagacaaagcccgaccgaagaaccctaacaatggcgtcgaagctcgtgacggcggtcgcccgtcaagcggcggccacatctcgcgccgcccgcttagctgcggtggcgcgccatgacgcggcggccgcatctcgctccgccggcttagctgcggcggccgcatctcgcgccgcccgcttagctgcggcggccgcatctcgcgccgcccgcttgaagcctcgtcccccactggacgacgctgcccgcctctccttccgctacagcagtgaacctccaggtaaatcataaccaatccctccctgatccctccctgtcctcatggtgcagctctccaatttagcatagtctagataggcaggcagggggattaggatttaggaggaatacacccatctctggtctgtatcaaattcattcaattgttgcatgctattcgtacaattcactgttttcttgagcacttttactgatgtaatgtttgcaaaatggtgattggttgtgatatatagatgatggaaagtgcgtgacaaaagaggaccttgagtcggacgaagccgtgtgggccttatttgagcgctattgcaagtcatacaacaggaagtatgatcatgctcagatggttcgccgcttccgtatattcaagttcaatgcaaagagaacatattgctggaaccagtatcttcataaagacgtaaaggaattagctcgcgccaaaaaggatagggatttaggactacctgtcgactcttggtacctacaaaaagagttaggcgaatacgacgatgggggggagccacttactgaatattggcggaaattttgatggaaaaccatctgccgctggtgtgtcctgcatcactccacatgttactgcagtaagagcagtttgctccccaaatcacttcactgtaataactagtagtcctttgacgttccgtgtttcttactaaggatgcgttcgtttgggtgatagggagtgagaatgcacatcgttttccgcacgcacgcttcccaaactactaaacgttgtggttttttgcaaaaattttctatatgaaagttgctttaaaaaatcatattaatccatttttaaaatttaaaatagttaatactcaattaatcatgagttaatggcttacctcgttttacgtatctttctaatctcctcaatccccttctcctcaaacacaccctaagttatgcttgtgtaccatctacttaattatctaagaggtcatgatatcttgcatatggttccacgtatgggagtgtgtgcgtgtctttttttttttttagcctttttggtttacaagcacaagttttctagcagaccaagatcaagtgtgatgattctggtaatgtatgcagctgtttgtgcacattaatttgttgagcatttattatgacgaaactaaaggttagtatatattgttatgtctcaaaaaattcaacagtttaaccgttatcatttactcattgttcgttcattgatgtatacaatatcaattatatccagtggtaggacctttattaactaataacacatgaatcttacttgaatatatatccagtgatggaactaaaatttgttatttggattagttggcacattggacaaacgaacggctgttaactacctatgtgaaaaattacttagattgatcatgtggctgttaattcagtttatctagaaaatatttttgcaacctacttgtttggtgcttgcattgtttggcaacccaatgagcaagctctaggtgcgcagccttgatctctagttacatgtacagtagttgcgctgcctcaaggcaccatgttaaatgcagaaatctagacaaaattttgtaatatatcctgaataacttcaatgttcagactctttcctatgattcttttgcaatgtaaagaacttcatcaagttgtatatataaacgaacatataatccaggacaacaagacacattctttctgatctagatttgtgcacatcaactagattcaattcatatagaccaaaagaaggaatatatatatatatatgcttgtgtacaaagaaaataacataaccagtataggagaataagcccacaaaacaaaaacaaataatatagttagaggcattaactttgagcatactctctcttaagtctcaactttaattggtctgttgtataaatggtcagtaactggtctgttgtacttgtactattttctcgatgcaaccatttgccttgtatggcatattgtatatataaacaccatggattggtgagctagcctatgttactacatgtgtgcttggcattgactgggcgctttgagtagggactgaaaggttgattgtttgaaccgtagctcggatggacgagcgattggagaccgtggatttgtagacctcatcgagatgtaaatccattttagtctggccgtttggacttcagatgaacacattgttgtttggttcattttgtttttaagtaaagactgaattgccgccacaagaacaacttgtgaagtgggtgcaaatatagatcatataaaacttgaaaattgctgaaacagaccattgtgcgctagattggatttcctgtttattttactggtgacaggtcgttattgctgtgcatggagagtttgaaggtcagtttcaagtttatgaataaaagtttttctttttcttttttgtttggaacaattaagctcttattattctcttactgtctgcaataaacagttgataactccagcaaactgaagagtaatgttgcagcatctaagacttttgcatgtctccatatcctaaaagttattctgatgagaggcatgttcactgacagcttgatccatgtgtcatgtatttcagtgtttaaaaaatgcataccccaggttatgtttgccattagagcaagttcaataatatagccaactactagctccaatttatctatagccaatttaatagctcattcatacaatagttatatactacactattaatacctagtcccacctgtcatagacacgttgcgttttggagtccgtgctacagctggctacaaatctgtagcccgctgctctcctctctcctaatttatcttcttaaaatatgtttgcccgctgctctcctctctcctaatttatcttcttaaaatatgtttgcagttggcttatagcctgtattgcacctgctcttatatacttcgcttattcgggtgtccccttgtcgaatttgcctttggtgctagtcaccacacgtgggcgttatatttttaatttcttttatcaggaccgggctgccacgtgtgcgacacgtaagaccaaaactgttccgaagtttgtcaggggtaattcgtccatataaaaagttgagggtgcagtttttgaattgagggggtaatttcaactgccacaatagtttagggggctaatttgggctttttccttaataataccttgatagtagcatcttctcatgacctttatagttccacctccccgtgacatatattgttttgaccaaaataatgcagacctcattgcggctggcattcgccttccaccgtcaacgccagtgatggtgtgctgcatcggcttctccctgaaaaagacactgcaaaggatgactctgccactgcgcaaaggatgactctgccactgggatgccaccgacgaagttcttggcggaattgcatttgatatgtcaattcttttttaaatttgtgatggtggaattgcattctgattttcaaattggaggatattaaaatctagattttcattttttacactagaaattctttttgtatgtgggtaaattaagtgtgccacctataaaaaattgatttttgcaagtgggtctctaaggatgcttgccttcgaaaactgtagatcttctcaagccttcaatcataggcagggtgtgtggccatgtgcaaatcgcgttttgaccacctcgaaaaaaaatcttgtttcgtaatagtgcacttgacttatgtaattatatactttattaattctgagagtcactgacatctagcagaaataatgcagaactacatgctagctagttccagtagtagcttgattgatttcattctcttcttggtggacgtttagggttatggcggtggttggctcctggcgtcgggtagtcattcacctccgcattcgtcgttgccgccaccatgtcctggacggacatttctctccccagtggacgtttagggttatggcgaggattggctcttagcgctggatagtcattcacctccacgtccgtcgccgctgccaccatatccctgcatggacatacacaaagccatgttcagaatcactatcaccaacattactaattgtttcagaatttagccttcagaaagtacatattcattttagaattggtttgtaaaggtggctatgaactgtctacgagattttgtagtaacatgccaacaaattaatttaaatcttacgggaattcagaaattgaaggacatgagaaagattaactacatctgcatagatgtttcgagatgacgggtgttgttgttggctgctcaagtgcacgattcctgcaagaacgcatcgacacgcaaattataattatcaactagtcaaaacacatatcaagaattccaggagatctatgacgacgaagctttacccgacacgggcaccgaggagacgagtagtgggaggagcaataggcaggacatagccaggacggcggcgagatcacgaggcctcatttccattgcgcggcacatgcaggaggtagcaaccgaggcagccaagaatggccgcgagaaaaaagagctcgtggctactacttcgtttcacaatgtaagactttctagtattgtccatattcatatagatgttagtgaatcgagacacatctatatgaatgtgggtaatgctagaaagtcttccattgtgaaacagagggagtatttgttttttttgggtgtgtgtgatctgtgtcggaggagacgatgatgtatggatggatggcactgggatgggtagttgactcgtagtgttgggagaaagctacccatcggacgtccgatgaaaaaaaaacggatggtcaaatattgcagttggccaacaagtcaaacattagttatatatggtgaaacaaaaaaatcagcaactgaaacatttaaatattttatgaaacatggtgaagatgcacgttgaaacaggtcgctgtcacatatgaaacagcaagtattaacggatacatgtgtttttctttcaacaaaatataatcatgcaatatcttgttgtaaagatttaattaaaacgaatacaatggtgcgatcggatcatagattggataaataatttaagagaaaaattattttgaagtttgctaaaatacatgcatgtgtgcatggatgagatggagagaaagtagtagcagttagtttcaaaaaatttatgaaaggaaaaggctatacgtactaactttttcttactaaattcttactaatactgatgtgtcatgctatgagtgcatctagatttttttataacttctatctacttaaatcaaacggttgaaatgattgttagtaaaagtttagtcagaaaaatttagtacgtgtagcattgctctttatgaaacacacggaagacgcacattgaaacatatcactatcacgcatgaaacatttagttttaacggtttgaaacacatgtttttcttttgacataatataattatatgatatcttgttgtaaatatttaattgcaacgaatacaatagtgtgattggttcgtagattggataagtaatttagaagaaaaaatatttaaagagaggaggaaagaatgaaaagaaatagctaggcatacatgttacagtgatagggttcgtccgatccatcaggccgctgatttgcagcatttttagtgtggtagatgaggcgtccgatatttctgtttcgtcggacgtgcgatataaagcgttttccatagtgttgctgtcgctaccttggggagggggggtacttatcaaacgttggatgaatcatttacttatccgcgttcatttgtgatctgtacccctcctctccacctatatttagctacacatcacgagtaatccttatccatttgatcatgtttagtataaaattagctattatatcaaggagttacttatctgtaatgataactcttctcttatgctgggccaccattttattatgttaatacaaatatatcaacgttggattaaggagttacttatttgcattcattagtcatctctacccctcctctccacctatgtttaggttgagtaatctttacccatttgatcatgttagtacaaaataaactgttggatcaaagagtatctgcatttatttgtcgtctcttaacttgagccatttgattatcttagtgcaaaaacatcaaccattggatcaaggagtaacttatcctcattcattaggtatccctacccctcttctatgcctttatatagatacacatcatgagtcatactatgtcatttgatagtataaaattatcaaccactggacaaaggagtagcttatcctcatttatttttagtaatttctagcccttctctccacatttaattagatttacatcatgagtgaatcaaaactaatttgattatgctagtatgaaattatcaaccattggataaatgagttgcatgtctgtatttactagccatctcttatcctaagccatttgattatgttagtctgaaacaatcaaccatttgattaatgagttacttacccgtactcattagtcatctctatccctattctccacctttaacaaatatacatcatgattatgctaagtcaatttatcatgtcagtataaaacaatcaatcgtgatcaaggagttacttatctgcattccttattcgtcccttcctctcctctctaccttcaataaaacctgtagagtaacacctcctcatgacctatatagttgtgacgaatataagcacatgcacgaagccatgtcatgaacaatcctaagccatttgattatgttagtatgaaattatcaaatgttagatcaaggagttacttatctgcattcgttattaatctctacccattctctccacctttaattggctacagttattaacaatcctaacccatttgatcatgttagtttcaaattatcaaccccgtccgctgccacgggaacagccgctgacactgccctaccccgctgtcgacgccactgatgtcgtcttgcaccgagaggggaagggggagggggaatcgctcgcctccgcctccaagaggagcagcatcgccttgtcgcccacctccacctcctcggttgggtaatactgtttttttaaaacctgcatgtgtctttttagtagtgttcacatttaaccagatacacataatgggtagtcctaagccatttgattgtgttagtataaaattatcaactgttatatcaaggtattacttatccacatttattagtcacctcttcctctcctctatgcctttaataaatacctatatggcaccgccacctcatgacctatatagttgtgaccaaaaataatgcagacctcgtcgtggccggcctctgccctccctcgccaacaccaatgatggtgtgttgcgttggcttctcccaaaagaagacgctgaagaggacgactccgacgttgggatgtcgatgatgacgtccttggtggaattgcattgtgaatttgtcaaatctttttaaaatttgttatggtggaattgcatcatgaatttgtgaattggaggatattaggatttggaatttcatctttttacactagaaatccttaggtgagtgacttaagtgtgccgcccgcgaaaatcaatttttttaggcaggtcttttagcgtgcccgccttttaaactcgtcgattttcatgagcctttgagggtaggccacagcgaaaaaaacatgtttcgtagacaatttataaattctaggagttgccaatacatagcagagataatatgaaactacaagcaagctaattggagcaacagcttgattgataaagtatttttgagtcatatctatgaaagtatttttcaacgttaaatgtgcatgcatagctctttagcctcaaacaccattgcaggcaggcaaagaaacacacagctaggatgtacattttgttagaaatagaagctttctttgatcttagtcaattacatcaaaataatacaattgtgcttggagtattctcgatctcggtataactaggatgtacacaaccaagacacacatgaaccagtttaaaagaaagaaagtaaaaaaagtattaaggaccatcaattttaaaactagaccgtcacatatgtttctaggtaaaatactcattgatcacctactccaagtgtagacattctgtaataaccaaatcccagcccagcttatatagtataacctggatgtacatgtgattttacttcgtttagtcttattttcttcattctttgttgcctcagcttcatgacgacaacctgtaatacaacctatttcttgtcctaattaacgctggcacgaatggatatacttaaagcaatcaatgattggttttctcgagtggtacaggatttattcacgcactgttagttactccttgaagcaacaacattctctcagtcaagttatgatcgtgattgacatatgtcgttaggcttagttaaggcttaaccaatgcatgacggctttggaagctactaagatctgccttaaaaaaaacaaattctagctacaaacctctatacgtatatatctagattcgaagttaggattataattttttttacaaagaggataagatattgtacttgatgacatgttggcattgcttcaaccgaatatctgctaggagtaccatgttttacaacaatggcttccatcggatggcctattcagccaaagaaaaaggcaaaatttaaattttcaaacttaattttaacattgattttgtgatattttcaacgtagtttctttttcagcattggcttttacgtcaccgagaacacatatataaaagttttacctacaaattcatttttattctctaataagccgttttggcttattacgaaaaaagccaaacgatgaggcccacagacagtgccacagattatgaaacttttttgggtgttggggcaaagagaagttatactgagttgtatgtatcatccagttcaatataaactataaaaacttagctcataaaaaagacaaacaattcacttatactttaatataagggtgcgttcttttctaagtagctagtggtagattttcggctgcactttttcacgaacgtaagataaaccattggcgcatgattaataggtattagttattacaaacttgaaaaattaatttagttacttctatatacaatttttttttacaaaacatatcatttaatcgtttgagaaacatgctaaaaaattacggtttggggttgatgaaaagaactcagtctaggtacattatcgactttgttgcccatgtcactcttgtttccgtggtcttggctggttgctcccaagtcaaaataatgcagcttaaagaatttgcagatatactttaatctgaagaaaagaaatactttaatttgacaaccggtttcaacgcttcgatgcaaaaactgcgtcatttggctcgtcatcttccaatcttggagatagtactgcacatcaggacattgatcataaagtcaatcacatgacaagttgctcggtaccgggtagtcaatctttttcatgtagaagtatatattacgagaataaaagctatacactttaggaaataaactaaaaatcagaaattaaaaccttcaacctttttagattctcaccagctagctactactcactttatactttgtatgctaagttctagagagcaatttacaatggcaacttactcgttcttcttcgtgaacacacttccagaattactaaacgttgtgtttcatgtaaaagtttctacacaaaaaggcttttctaaaatcaaataattctatttttaagtttataggaaccgattaattatgcattaatagattattttattataagtgccgccagttagctgagccaaaatgctcgttcgaacgggcccttggaatctacagctttcaagcaggtccatactccatagtactatgtggctagtgggctatagtggccagtgccaggagcttaaatccaagcgagagcagccattggcaaaggctaatcaaagcttctaatagtctgctgagggaatcatatgaaccatgtcactgtcggactgtcatctacaacgttaaaataagtgcagtcgtgggtattcgtgtctaacgtttgaccgtctatcttatttaaaaaattatgaaaaattaaaaacaaatagtcatgcttagagtattattcatgttttatcatctaataacaataaaagtaatactcataaaaaaatttcaaataagataaacggttaaacgttggacatgaacagtgtaaaagtgcacttattttgggactgaaggaggaaagagtcctataaaaaccaatctaggattagatgtaatgttttctattacaataaatctggttaaaagcctgtttaaattcattatactagaaaatatctcttattatcttaatttgattttttataggacaaaggaagtatgttgttggagattccattgaaacttcatatgatctcgagctggtctagtgatcttgacctggttagtcacgagtggtcgactgatagttgctgccactgttcatggacagaagaactactgatgagatttctagtactatgttgttttttttctcaaattaattcagtgtgctgctgctgctaaagtctgaaatttattcagttgaccctccacaccgatcactaaacagcacattgatgctgcagtgcagtttggccagtcaccactacagttcaggtcaaaaccacacgcgcacgcacacacaagttctctgcactaacagcagtcatgtcaataatctccatgtgattacaatttacaactcattcctgcattaaatttgactacgtcgactgccagatattttgtcaatggagatatcatccaaattaacaaatgtccaatgctgtcatcgcaagctagtgcagtgtgagttgggcggcacaagcaagcaaacaacgagcagtttagacattctgaagcgtttgcataatgacaagatttgatttcgttgtttgttctcaagtgatgtaagaactagaaaacttttaagattcctctaaagaaaaagagaacttttactatcgctgtgatgattcaacaagatttgacatgcgtaaagttaggtattcctttcgtctcaaaatataaaaaaaattaattgaataggatacgttctagtactacaaatctagagctatttataagatatgtctcatcaaaccaaaatatcttatattttagaacaaagggagtaattagagaaactataagagcatgtacaatagtagactataagccagctataaacatattttaagaagataaaagagaagagataagagcagcgggctacagatttgtagccagctgcagcatggactccaagatacatgtgtgtatgataggtgggatcagacattaattatgtagcacatacttaaagataactatggtatgaattgactattaaattaactatatatgatttggagcccataatcggctatactattaatactattaaacttgctctaatatacagtttaatctggcggtaatgcatgcatgcaagaaaaagtgatgagccatatgtgcgcaggtgattgatttggcgtcggttccaaacacatttaaaagcaagtttaatagtatagctaactactgactcaaaattatctgatatagtcaatttaatagctaattcatataatagttatctataaatatatactatattattaatatttggtctcacatgtcatacacatattgcgttttggagtccatgctgtagctggctataaatttatagctcgctgcttatctctcttctttcatctccttaatatgtgtttatagctagtttataatctgctattgtacctgctctaaaaacatgattgtggggttatgtgtagtataataagcatctgcgtgtgaaagttaaattaaaaaaagtatgatcaatctattggaaattgtgtcgatagccaactattatatgtatgatctcttggtcacctgtaatatgacgtaacgcttttaattgttgacagttatgtattttatacactggacccttttgatttggaggaaaaacatagaaattttaagataacttttatcctatagaaaagatttcaaagaatggctttgaatcaaaggattgaatcatatccaatcctttgaaattcctattgaatagataattctacagagatttttgtagaaaacttagcaagagctcaaaactcttagaaaatttcctttgagtttatctttctcatatgatttttttcctacggtacaatcacatggtatttcctgtattttaaattatttgttttacacttctatttctgttagaataatgggtttttcctattaattcgttttcttgttcctactatttaaattggccctaatctctttttttaaaaggaaaattgactctaatctcttactggcgtactactccgtcccagaaaaataaattatagctacgaacctgggcacatatatgttcaagttcgtaactaggattgttttttagactgagagatagttattcaagttcgtagctaggattaggattgtattttttagatagaggggtagtgctgctgctaatagcattattacgttacccagaaaggttaattattactacgtgctttgatcatgattgttttttgtggcagtaagaaaatttcttgtctttgaattcgagtttagtggatgcatgtctgcatattgcggctattgccgtactactcggctactcctgctttcagatcgatttaatgtttggctgagtataaagtttaaattttggttaaaattagagatgatgtgactgaaaagttatgtgtatatgatagattgatttaatgaaaaatgattaaagtttggatctaaactttaaatctaaacagcctgtacagtggccgtggaccaactgaacgtacggcgacaagtggcatggctcactagaaaaagaaaattcgctgtcagcttcactccggatcggacggccacgcctccagtccacgacttttttgatcgcacgtgttagcttttaaaactactctagctcgggtcgcacgtgtgaatggaagctgtttcgttcttttgacctcatcgattttgtggagcaacagtacacgcacgatggaaaacgcacgtcgtttagcgagcgtgtctattgacaacccattttaagagcgagccacggagcaaagagcgtgttcttaatactctggttgagtttatttgttcacgtttttcacttacttctctcgtttttcatgcgtatgttttttaaattgctaaataatacgtatttaaaaaaattatatacaaaagttgtttaaaaaatatattaattcatttttcataaaagttcagctaatacttaattagtgataagttaataaattacttcattttacgtgcgtgagatgttagttcctaacctcgatcaactaaagaactcaacctaattaatgtttttgatttcgccacgtaatatagctctaccttattacttttaagggattttcttattgtgatttaaaagagttgtgcacttcactgatcggtctgagctgactcaattaatctatcaattctaaggttcggtttaagaaatatactctatgaatgaacactactacagatcaagcgatcgaaatcgatcttcgcctacggttaaacggtccgtgatgcacgcaggtgtttgtaaaaatcagtattgtctcgtgcatctcatccttgttcaaacatcgacatttgaattctaaaaccttaacatgtggctatatatgccaccttataattagtgggtggatgtagtgggagaaatcacaccttaattagtggagtggatgtagtgggagaaatcgcactacatggagatgtttgcgtatatattcttcctatttaagatagagaacgtacgtatagaaactcctcgtgtggcatggcacgtcctaccctgttcttaattgttctctactgaagtgttgcgtgctcatcgtgaatttagctagacactgcacttacatgataaaatgaaatgatttgatcagtctcactcgcatttcattctcacggaggccggccatacgttacggcgagttagtggcattgtcaattcgtttgcaaatgcaatgcgtatccttgtcaattaaattgccgtcttgttgaaaaaacgctgataatgtgtggtgtatgcatgtgctaggctagtataacaatacggcgctgaaaaactgaaagttgtcccagtgagagcgaactgaacattgacggtcaaactatgacctttgtctcgaggagattaaaattacgagaaacagtgggtaagaatatggagaagccaacttttagtttatagtttattttataggttctactagggttggcaacggggcgggacggggcgggtgcgggttggataggaacggccccgcctccgcatccttgagggttcacccggccccggccccggagtgaggaacggggcgaaatcaatccccgcccccggcccctccggggccccgcaccatttccgggtccccgcacccagatacaagcggcgactgctagcagccgaaggaaggaaagaatggtctgggaaacttgcagcagccgggtggaggaagggaataatgatgtggggaacctgcagcagccggagggagaggaacggtcggagaaggaggagaacagcacaggcgccggcagctggagaggtagtgagatacggaaaccccaattttgtggggggggggggggggggggccccccttcngcggatggcaagatggggagacggcgtccgtgagagcaacgatacgggcagcgtgaaagagcgccgaccgccgctacttgatggtgcgggaccaactcgcgaaggcgtgatttgtgaaggtgagaaagcgccaaacgggcgtgcggcgtgtgatgtgttgcgtaatttgtggaatagcgtcaaaagtcaaaactactggaacgagaatagagattggtggcggcggcgacaaactcacgggattgattttacggcccgtttggttggagggagtttttaagaggaattggaattagagggatgaggctattaagtattttgtttggttgggagacatggaaattttggtgggattgggatggggaattaaggaagaaactccctccttttcaatacctgggtaggggcaggtaattgggagggaatttctcctttactttgtctaagcaaatctcagccatccgtttttattaatgagctaatctccaactaaactccctatcagtttctatcacatctaccaaacaagacattgggattaaaaatcaaattcccatcttaatctcatcataaattccctcgtgtaaactcctaatccccttccctcaagttaccaaacaagtcttagggttggcttctctttactgatctgtatatatatatattgggctatatgggcctaaatttgattatgggctgtatgccatattttagatccctatattccggggccccgtgggtcacccgcgggtgagcctgtggccccgcccccacccccgcatagttccggtgccccgtccccgcagccccgcgggttgaaatttcgccccgtccccgtccccgtaggggtgggtacccggcgggtccccgcccccaacgggaaaattgccatccctaggttctacagctacagctttttagaatctgaatgaaaatctagattgtttgagggaggatttgataactagtgcttctagaaaaatcttcagctactaaaagcttccccaaacaggctctatgtccgttctttctagtacttcatagaactagtaatttacccgtgctaatgctacggtgtaataatattttgattaataaattatattattaaatttcatgttagtcaaattacatttctagaatcagtctcaaatgttaatttaagacaaagagcaaaaatatcatattgtctgaaaaaaaataatttaagaccatcaactatatctaggctaaattctttcccacgagtctttaaaaaaagtatgttttcatgaaaataccgtgttgtactgcattgaaagcttttttgttaactttagttatcaaatatttaatttagttttataactaaatttgtaaaaataattcaataaataatttgttttagacgtgggcaagatttttttttactagataggcaccggcgaaaatcccggcatgacgagtgcgcaggtgtggcggtggccggccgtcgacggcgacgcttcatattgaagactactagcaccgtggatgctcgccggccgttttgcccctcagcttgtctgctggcaaagtcgtagactaaacagatggagtagtaaactaaatcacgtctactatttatttttttcctacttaaatattaattaaaattttaagtttgatcgaatctatagaaatgaaatgagtatagctcaactagattacttgtgatggaaacagctcatctgagctcaaatcatagaattgacatatatacttgtatttacggctaattatattttcagtgataggcgacttacccatcgacagataggcactcgtggtgacttcgttaatctcaggatatgccgaccaagtcttctatcgacacccatagtgacttcgtctcatcaacctcaaaatatatcggtctagtcttctattgacgcccgtggtgacttcatcgatctagagatatgctggtccagtcttctggaggtgctcataggagtgggtgtgtgcacgttttgagcgcatgcatttattctgtgtttctcaaaaaatatagtacacgaaacaaatatattatcaaaatatattaaatgttaatgtgtttctagaaaagttatagaaaaatataaaaaaaaattttgacacaaaataaatatattataaaaatatattaaatgttagttttaataaaactaatttggcgttattgaccttgctaacttttttttaataaatttggtcaaagtgaaaacaatttgactacgaaaaaaaagttagtaccaaatatacgcacttcaactcaaatataaacagaccctagtaggaagatgctctctcagatgatgtaataaaaacgaagagctattacaaaatgggaaaaaagatggttaagcatctcgcagaagaaaatgaaaaaaaaaagcctaagcaaagcagattaggatgggccacgggcccacggaccatacgcataggattcaacctgacggcccacatgccgatggatcgggcccatataggcctgttcctaacttccccaatcttaagcccggcccactcgtgagctctcccccgtctcataagaaaccctcgcggagcacacgctgctcccccctctccctcccgcgccgccgccgccgccgccaccgccgcatcgccgctgccgacggctgcgctccgaaggtatcgcgtcgaaatgctcttcgtctcgcctctaccaccgccgcagatagttcttgcagcgtctatgcctctgctgccctttacatttccctcgagcgactagaagaattagggcgggttggtcgttgcggcggtcctaggctagattcgagaagaagaagaagaaatgccggagatccttgagcttgtaaatggggatggtttcttcttcttctctcttatagttgatcttgacacggtgtagtgcggtgtatatacatctgttgctactcctttggaggcaggattccggttttcttgagtatgtgacaccgtggtgattccgtttgatttgatttaccatggctagctgcgcttctttgatagattctggattatttgcctagatgcgtgtgaaagcaccggtactgaggcgctatggccattgtgatggccgtagcagcctattcttttgtgtgctatatgaaccagggaacccgctttgcaggggagatttgtcccatgtttcttctgccagtagtcgcccgacagttcacccctttctggggttctggattacctgtagtgtagtgcgatgtatatacatcggttgctactcctttggaggaaggattccagttttgtggagtatgtagttattctgtttggtctgatttatcatgactagctgcgcttctttgatagattctagatttgttagatgcgagggaaagcaccggtactgaggcgatatagctattgtgatggcgtagtagcctattcttgtgtgtgctatatgaaccagggaacccgctttgcagggaaggtttgtctcatgtttcttctgccagtagtcacccgacagttcacccctttctgggtttctggattcctagtcatggatggtaatccgatgcgcgtatgaactgcaatgtttctggttctcttgagtgctttgagcatttgaggaaccttgtgtgtgtcgcacagtcgcactcaggtgctatggcctttgtgattgcatagtagcctagttgattaatgtgcaagatggaccagggtagtatccttgcagcaggagctaagctaagttgattatgcttctactgcctgtagaatccctacatttttaatagttaaaatttgagatgattaccctgtctgtgtattgtcgatatcttgatgtaggtttttaatgttccatgattacctctgcacaattttgttttctggattctagtcctgattcctttttcttttgatgttggaaatttggcagaattctgtgaggatttaagctgagaagatggtgctgaagtaagttcctgtgtatattttgttgtttcaatatgattgtagattgttttagtgcccttttatcctgtgcatgctctaggctatgtagttttttggttaatggtagtaaaaggttaatagcaatgatttaccaatgagtactatttcatatttggaaggtatttcaactattacttttatttttatcctacaggacagagctttgccgttttagtggccagaagatatatccagggaagggcattcgctttattcgtgctgattcacaggtcaggctgttcatcgaatgattgctttaatgtcaggatatttctctgcttagaaggttgttgtaaacgtattggtatattgtacaggtcttcctttttgcaaactcaaaatgcaagcgctacttccacaaccgcctgaagcctgcaaagcttacctggacagccatgtacaggaagcagcacaagaaggtattgtatctagatttaggcgggcgttttctcacctatatgcacatactctaactggatgacctttaacccttttttttttgttcactgaccgttgctttcttaaatttgttgggttgagccgaatgcttaaaatttgtaatgttgtattgtgcttgaaatgctaagttaattgtttcttaagctatcaaacctggattccagtaaatgtctgtttgtatgattaagtgtgaccgtctacattcaagattgcggttttttttactgtgcaaacatcatgttgattcttcaaataagcgccttgcagtgtttgcgtgcagataaaaatattgtatgtttgggtactttggttatgtctgtgccatgtagttctctttgtcagcttatgctcaattccttgtatatatgtacagttagtcatgctatgtattgcttccgatcagataaattctgtttacaccctttcccaacaatctgcattttaggatatccatgctgaagctgtcaagaagaggcgccgcaccaccaagaagccatactctaggtcaattgttggtgcttcgttggaagtcatccaaaagaagagagctgaaaagcctgaagttcgtgatgctgctagagaagctgctcttcggtatgctctttccctgaatgattgccatttagactggttactggttccaacaaagtatccacccatggaatagaacattgccactctatatgggttacattttgccttcattttcactgcattagcccttacctcatgcggtgcctcttaacttctcaagcagtgttttcgtttgctgcctttgttctgcacagctcactgtatcattgcaacatgatgtttgctacccattcttattggatgtctgctcctagtgaactctctgttcatattcatgcataatcccctattgcatcttgtgtatgcataatcctccgatatacatttcgatgatgctaaaggactaaattcatctgagcttatgcattgtgcagtgagatcaaggaacgcatcaagaagaccaaggatgaaaagaaggcgaagaaggctgaggtaaccaagtcccagaagtcgcagtcgaagggtgccgccccgaggggttccaagggcccgaagattggtggtggtggtggaaagcgctgaagatttcttgatccccaggaaagggtcgcctggttctcgccggctgtctaaatcgtatctcatcaaaagctaccctgtagaacctctgttaaattagcactactgccaaaatgttttaacatcgccactggagataatgtcatgaagtttgaaatgctatgtgggaaaaatgtttttctttggttgtgttactattacgagatttgacttggcttaatgtttctgagcaaagtttgatgctgcttggcattttaatcctcttgtgttttgttcggtaaagagcattggtgttcatgtatcatgatctgaatgctcgttctgaattgacggccctagaaatcccatcgtattatattctctacagaaatataggcttttgaaatcctgttagtagcgttaaaagcgaatttgacttttaaagtttcaccattttttgcgaacgggtagcaggaaagctaaagtacgttcccttcaaacaggctagactttgtagtgtccgagtggatttatttctctttccttatttacttgaaaaaatattcatgtgttgcaacgggtaaatgctattttaattttattattgtttacggtttagttagataaaattcactgtgggaagtcgtttggatatttttttcaggaaatcatgagctacaattaggttcgtatttcatctcatgctagcatgcgagtttttttaaagatttcttatacgactcctattatacttccaaaaggaaaacaatcttaaaatctaactcaaacacgcatctgtatttccaaaaacgaacgaacttaaaacctgactcagatacggatgacgtaccaaaataccagtaaaaacatctttaagttttaatttttataatagtagatatttctctttctttatccaggatttttgctatatgtatgagacttgatttcgtatttgatgtattaagtattgggtatcccatattcagggcattaacagcatgcatcatataagttaattttagggcattaacagtatgcatcttagtataagttaattttttttttttggtcttgcttaaaaaatagtaaatactatctttattccataaaatcaactactgactatgtatttaggttaagatatacaatcaaaaattggtttttatgggatggaagaagcatgttttagacttcagatggaggaagtactccctccattccaaaatatgcaggttcttgaatggatggaacacatcacaatagtacaaatctggatgtcttaagaatttaaatgtctattcaaatttacagtagtaagatgcgtcacatccattctaaaaccctttattttgggatgaaggaagtattacttaacatattactaactgtattacgatggaccatgctactctgcattagagacgttgtaaggcagaggatcaacatgattactataaattatgggagttggcagccatccgatcaagggcataaggcctatatatctcaggccgagtttagctctaaatttaattttttcttcaaacttctaacttttccatcacatcaaaactttcctacacatataaacttctaacttttctatcacatcattccaatttcaaccaaacttccaattttgacgtgaactaaacacatcattactacactaaataaaagtgtgctacaattttcatgttattgtagataccataaatcgacggtattcattacattgatccactgttatactcacatacttcctctatctcataaaaaaccaatttagtactggatgtccagatttgtagataggatgtgtcacatccaatatgttagttttttatggacggagggagtactccctccattaaaaaaaatcaatcttaactataaatatagacacacgtgttcaaattcatagttggaccataattttcatggagaaaatgaacatttggccacgttcaaaacacggtttcgctagaatgccaccccaaaaacacggttcgataaaatgccaatacgaagcgtgcatctgttgtcactttgccattttcaccattttattcatttccaaaaagattttggctcctccgctgggtaataagacggaactgccccttatcaccctacggcgttgatattcttccccatcccctttcttcccccactctctctctccccttcggcatggcggtggtggcagtgcgagcggtgtgtttcgacaaagggagtggcgcagggacgaagcagcttcgagcagagacgcggagctcgctgaagatacatgcgcggggatgagctagagcgccatgaccactgcgagcttggcgcaccctttagcgagctcgagctcgagctctactcgtgtggaggtggaggtcatgggcgatgtttttgtcagtagcgacgacatcgcacggaacctcatcattgactatggctctggcaagatcgcgctcaccgccgcgtgcatccacttccgtatccctagcgctgccctcaactcccccttccaccactgcgtcgcttcggtcctcccaacaattgctttgctgtcactaccaccgaagaagaagccacttccgccgctgtcaccgacggcggttgctaagaggagcccacaaccccctcagcctttcgtgcttcggccagtgcggcggtgtggcccctcctagccaacggagggaggcgcaagaagcagccggcggcggtgagggcgtgaggcctttttttttttttttagaaatgctcgatcccctttcacttgcgagatgaagaaaaggcaagccggaggggtattttcgtctgatcaccacgtgaacagcaaaaaaaacatttcggaaatcatgaaaaggcgaaaatggcaatgcgacgagtagcgcgcgctcgagattagtattatatcgaattacgttttgaggatgacataatagcgaaatccagttttaaagatagctaaacgtttattttctcatttttcatgggacggaaggcgtaaacaataaacctctacaataatgcccaggattcggatctcattggatgtgagaagagagagacagcgagcaaagcgaagtgaactgactgtgaagtgaccgcacttcggctgcattaactgcatcgtctcggctaggctagggctaaacacgtccagagaccaaaacgagtcgactcgtcgtcgtcgtcgacactcgagaggcacctgcactactccactcagctcacacgcaaaacgtccgcttcgtctcgtctccctcctctcaaaccgcctcgtctctcgcgccctcctcctctcctctcctcctctcctctcactcgctcactcgctcgccgacgctgcccgaggcggaggcggcggcggcggcggcgaagaggccgtagcccgcttcgctcggcggatcgcgcgcgcgaaccgggcggtggaggaagggggagggggagggagaggggcggagagcgccatcgccgaccaggtgagcgctttgattcccctccttttccccctctatttctgaccctccggctcgcacgtgtctccccctcccacccaccatctccggtgtggccggccggcagatggtcggcggcgacgacgacggtagtgtagtgctgcgggtacctacgcttccccgaatttaaattttgtaacctaattttggtgttgattttagggttctcaccatagtttatttccaacggttttccctgaggagaaaggagaagacttggaatatacagtacgtaaaacaagctgaacgcctgaactagtacatgattaattagatattaactattttaaatttgaaaaatatattaatataatttcttaaagcaacttttctatagtaaatatttttcaaacacgcactgtttagcagctcgggaaatgcgcgcgcgaaaaacgaaggaacccttctccctatctgccactcttacaaaagaacacagcaaaacatttcattgctaagaacagatataaaagttttacccacaaattattttgagtctattcaacacgctgcattcatttcattagctgcatatatatttgtgtactattgctacaatgatcaacagaattagcagtgctatacgttttgccccctttcgaagtccaaaatttggcgctcttctgcctcccaggaacccctcctcgcttgattgcttcgacaactttaagcagtgatcattggaatataactccactgtgaatggtgcgagatggttactagttttttgtcagtaagagatgcatgattactcctgtcctgcccctgaatcagggttgcattgtaacaacggacatataaacgcaaattgaatttcctagtaaagtgctaaaggcagggatgtgtttgccaatgaattttctttgcaaatggtctagagtttggattttaataatgcgacgagttttgtaattccaacttgaattgatctcgtttttacaaacaagactattgaaaaagttagggatatgctacttatgatttgattaatcaattaatctgggggagctatttaaataatgatgggactaatattgtccagctgtgctctcagcttcaccctactctcatgctgccttgtagatcatgagcacaatggctgacagcgtatttggagaaagggacagcagtaatctcgagattcttcaacgaagtcatatgaacagcaattagttgactaggcaaagcatctttctgagtaaatcacgtcttgttagggtacttcagttgtctttcccagatctcttgtaaaattctttcctcaagtcctgcagatttgcatgctcaaggacaaggacctacacattatgtggtggttcatgcaaaaaagaaaaatcaagtttttctataatatctacacatatactcaacagtttgactgtatacattttttctattatagaataagacagcattggctgcagagggttcaaatgagaaagctgcggtagatgcaaatgaagtttcattgcctctttctaatctaagcaacactcgacaacattctgatagagaaaacaacatgcctggaaaacatggcaacgatggcatgtcaaaagacatgggacgtgctactagattgaagagactgcaaacgccaatcaacttatttgaagatgaatgcgttttctgccattcatttagaacacctcctcaggtgaaccatgatctattaaccagaggttatgttttgaggtcttcttaaccatttctgacactaaaggtcctcacttttcctatttcagtttcatggtccaatggcgcattatcaaaagggaaagcttgtgtccagtgacaatggcagtccatgcccaacagatatcatttatgttcataagaaatgcctggagtggtaagttcctaaatatatttcaactcttgatgcttattcaccacaatttagatttatcatcatgcgcttccaatgcaggtttaagatacaaggatgctggacaatttttatttttatttgttgagatctggacccttgtataattttttagtttaataccttattggtttgctttataagacaaccattccatttgtttaattatgtccaaatattagtcagtatgatatatagttttagtggcatgcaagaattaccattttgattcctatttcaaagtaaattcacatgatatttttttttagccattaaacagcctattcaatgtttgagacgtgctaagtctaaccatacctaataaaaataaccagtggctggagtggtattaaagtgggtagttgaggggtgatggtgcgttctacatccccctccctccatcccccatcataattttgttgtttgcatgatatattcttctgcaaaaagttgatttgtttgcacatgtgtatgtgtagatggttgattgatctcatgtagtaatttttcaattttctagatttggagacaattcttatttttagtatatttagctttacattataaactatatttacttcttccagtgcaacagttggcactagctagttactctcaaaggactatttcttgggtaaattgtttgtctttccctacttttttcttttgcgaagggccccgcaagtattttacgaaggtgataccattgtgaacttggagttggaaataaaacgtgccgcgaaattgaagtgcaaaagatgcaagcttcctggagcagctcttgggtgttattatacaaagtgcaataggagctatcatgttccatgtgcaatgatgactttgaattgccgctgggatgttgtaagctcttgagaatattgtgtaatcgatccttttgtttgtgatattcgtcaccactctaatagtctaatgttctaagctccgagatgctaattttcattttgcaggataacggttgtgttatgtgccctgaacatgcaacgatgccactaccatgtgataagataagctcgccaagaaatgagagtggcaattcttcttccttccctcagaggtttttccatgaataagaaattgttattcaatcttattgctttcttggaaggttatacaaaggctctggtatttgattaatcattgatccttcatttgtatttttctccttgattctgtgttccagccaatcgtcaattgaacaaagcgattccgctgattgcgaatgggaatatcctataatagatcaatggaacacatcaagttctttgtctcaagggtatatgacctttattcacctgccttttgagttactttgtaatcattttatgaattaactaatacggagtaaatacctacaacattctcttttgccttttgttgttccagacaaagttcacccaaagaaggaatttctgctgttcctaaaagggaaatagatcaacttaacacttcatgttctttcttttctgaggggtacacaatcttttctaacctttcttgttagatgtctttaaggttcctgattctttgatcaattgtagtcttgcattccataaatttgtgttgtatttaatcattgcagccaatacttggacaaagaaggaatttccactgacgaatacaggaaagaaaagcaaacagatcacctttacacagaaagagattgcccctcggatctgtgggttttgcttggttcagctttaagtgaatccgagaaggtaggataagtgagaagtagcaaacattactctttttttgtggtgaacaagtatacggacaaacaatgctgaatcctacttcatggataattcaacatagtggatgatttgctacatttatgaagttaactcttccattccagcttttgtggtaaacatgatttatgtttttcaagcaggattccttgcaagagtttgcgtcttggacagatgcaactgtggtcaacgagtggactgaaaatgtgacccatgttatcgttggaaaaagtgctggtagtgcatggagccgatcttatgaggtcctgatggctcgactgtttggaaaatgggttgtcacggttggatgtcagtattgagctatcttctctacagttctctatttcttttaggaccccaatttgagtattctttcctttacgnttatattgttggatataccctaagatccctaaggccattcaaggtttatcataaatctgcagagtattatctattcctaagctgaagtgcttcgccttgctctttttgggattatggattgcttggtaaagtttattccaagtccagaagcttcctttgagttaagatttagccatgactcacgtgcatcaattggtggaaacaagaaaagaagaaatcaagcttctgaaggggtacatatacatcgctggctataagattagacttattttatgtagtgaaaactatcgtaggctgtcacttgtataagcttaggaatttgatttgcaaatctttcccagtaatattttcttacaggcctagctacaactgggtacaacaatgcataaaaatactttttacatatcgctgttcaaagtcaaggtgtatatatctagtgcataactccatatattccacctgctttgtgttgcaacttacgacatttcattctttagagcaaattttctgccgcaacaatctccatgatgataatgcgatgctttcaggcacagaagttgttctcgggactgaacttttgcctcagtgcctacataaaccctgacgacagacaacacatacagagcctgattgcagctgctggagggcagatactggagacaaacggcggctcgcatttgctgcgtgaaaacctggagaaagttgctgtgaagccatgctacttcgtctacgacgggggcgctccaagggatttcacccaaggattgcttgatgatctccctaaggagatggaagagggcagagagtatgctgcctgtggagctcaggtgatcagccatttgagggtgtttgatgccattgcggcttatgatgcacagattctcagccacaaggatcacttcaccccggatgtgtaatggcgcaagctgtgactgtacatggtaaagcatatatccatggctagttgttggcaatttgtaggtgcttttggagcagtgcccttcagatcaaatctttggcactgtaggacagtaatgctgttgtatatatataaaccattcgatgtttactgacacatctggttagcctgatattcacctactaagagcaggtacaatagtggattattagccggttgtaaacattttaatgagataaaagatgagagaagagcagcgggctacagatctgtagccagctgcagcgcgaactctaagacgcaatgtgtgtatgacaggtgggaccatatattaatagtatagcaagcaactattgtataaattggctattagattggctataaatgaattggagttaggtcctctttgtttaggcttataagccagcttataagtcgaaaagtctaagtcaaaacaaacaagtagcttttttttatttggcttttttgaagccataagccactctaacactattaagccaaaagataggttggagaagcttttttggcttttatgagatagatgtatgactccaccactaaacttaggacattaaa

SEQ ID NO: 5296 - DNA, 8514 bp, Oryza sativa
ccctcggggagacagagggaggggtggccatgtcaccctcgggcccgacccccccgagggggtcaggccacgtgggtgaccgcggctgcccaagcttctagtcacgatacccccggtcccatgtcaccgacagtactaaatgggtaaagattggataaagtatatggggtatttgtgaggtattattagaaaacttcgtgtggttttgatggacctgttttatgtgttgaaaatatgaatggttatagggtgtgtttgcaagtgcaggatgggaactcatccctcctgcacgcaaaacggagcggctttttaacacatgattaattaaatattagctaatttttttaaaaaaaatggattaatttgatttttttaagcaactttcatatagaaattttttgcaaaaaacacaccgtttaatagtttaaaaacgtgcgcgcgaaaaacgagggagaggggttgggaacatgggtttgcaaacacaaccatagtattggcgattccttttcgtttgagtaaattttacaaaactacaggtattttgaccaaattatcacaaaactacagatttaaggagttgtatcataaaactacacatttagcatcaaatttatcacaaaactgcagattttaggttaagtatcacaaaaatacatatttaatattgaacttatcacaaaactataacttttggagtttaaatccctagcaccattgttatggtggagctataaacattattactttgtgattaaattggttctaaacctttagttttatgataatttagtaactaaacgtgtagttttgtaacacttcatctttaatatgtagttttgtgctaaatttggtgctaaatgtgtaattttgtgatataattccttaaatatgtagttttgtgatagtttggttataatatctgtagttttatgaaatttactcttttcgttttcactgcaatttggaatgatggaattgactagatccggcattaccgatgggctgccgaacgctgtgatgcggttgatcttgagcgatccgggacgccacaagcaccgatgggttctgggagttcatacggctggtgcagcagtgtgtcaatagcagccgggatgtgcgcccaaccatggtcgccgtcgagaggaggatcgaagacatcctgaactcggttgtcaggtcatccaccaccgggttcatgactgccggaggcgacacacccagcaacgagccaaatcgtgaagataacggaaacgagccaaatcccagcaacgagatcgccagggactagtagtacgtacagcagtggtgatttgtcatataggtgtatatcggctgttttcgcatctcaaggcctcaagcagtgtgtgcaatctggagtagtatataaatatgtaaaatgttcatttcgatatactgtcaaatgcgtgtaaattaaccaatgctaaaacaacacactgtgactaaatttactgagttggatgatgaggatgattatgttgcgtgcacacctgatcaggaggacatataatataggccatttgggccgtcttggacaccaccgtttgatttgtatgaagttgggccgaactatgcaagcccagaggcgctgcctctgtgccacggcccacgggcatcgctggatggtcaagcaggtgatcggtggagcgccaatggcggcggcgagacacacagcgcggcgcgcgcgcgaacgtgcggacgcgcgcgccccggccacggccgccgcgctcgtttcctggcctcccgcgcccgctacaaatggcggccccggcgtcccctcctcactccgaagcttcccggttgacgacctctccggtctcccccctcaccccaccgcaacccgggacgtcttccatggccgacggcgccgccggcccccgctactaaaccaccctacccaccccctccaaactcccacacattacatccttcaaagagagcatcacacacacacacacaccagcctagcgatcacatttccacgatgacgacgacgacgcgagtggcggccgccgccgccggcgtgctgctggtggcggcggcgctggccggcgtggcgcgcggcgaggacccgtacgtgttcttcgagtggaaggtgacgtacggcaccaagaccctcctggacgcgccgcagaaggtgatcctgatcaacggcgagttcccgggcccgcggatcaactgctcgtccaacaacaacatcgtggtgaacgtgttcaaccagctggacgagccgctgctcttcacctggaacgggatgcagcaccgcaagaactcgtggcaggacggcctcgccgggacgcagtgccccatcgcgccgggcaccaactacacgtacaagtggcagcccaaggaccagatcggcagcttcttctacttcccgtcgctggggatgcaccgcgccgccggcggctacggcgggatcagcgtcgtcagccgcctgctcatcccggtcccgttcgacccgccggccgacgaccacatggtgctcatcggcgagctggtacaccaagaaccacgccgccatggccaagatgctcgacgccggcaagagcttcggccgcccgcacggggtggtcatcaacggcaagtccggcaaggccgccgccgacccgcccatgttcaccgtcgaggccggcaagacgtaccggctccgcgtctgcaacgtcggcatcaaggcgtcgctcaacttccgcatccagggccacgacatgaagctggtggagatggagggctcccacacggtgcaggacatgtacgactccctcgacgtccacgtcggccactgcctctccgtcctcgtcgacgccgaccagaagcccggcgactactacgcggtggcgtccacgcggttcatccacgaggccaagtcggtgtcagccgtcatccgctacgccggctcgagcacgccgccgtcgccggccgtgccggagccgccggcgggatgggcgtggtcgatcaaccagtggaggtcgttccggtggaacctgacggcgagcgccgcccgccccaacccgcaggggtcctaccactacggccagatcaacatcacgcgcaccatcaggctcatggtctcccggggccacatcgacggcaagctcaagtacggcttcaatggcgtctcccacgtcgacgccgagacgccgctcaagctcgccgagtacttcaacgtcaccgacggcgtcttcaggtacaaccagatgaccgacgtgccgcccgccgtcaatggccccctccacgtcgtccccaacgtcatcaccgccgagttccgcaccttcatcgagatcatcttcgagaaccccgagaagagcatggactccgtccacctcgacggctacgccttcttcgccgtcgggtacgtacatacatcgccccccattactactacctccattaaccttttattaaagataggcttggccattcattttatttttaaaaaattatataagtatcatctattttattgtaatttgatttatcgtcaagtgtgctttaaacataatttgattttttttatatttgcataaaaaattgaatattatgaatgatgtatatgatctgatactactgttaactaacttactgatgcgcataataataaaattttttaataagacgaatgatataaaaaaagttttttaaattacctccatttataatatacgatgttttttttacttttaacattcgtttataatatatgttttttcacaaacgtttgagttttgaccatttattttatttaaaaataattatgcagttatcatctattttattgtaattttattgtaatttgattattgtcgagtgtactttaaatacgatttgatttttctatatttacataaaatttttaaataagataaatgatggatacgatctgatgctaccgttgactgactgactgatggcgcaggatggggccggggaagtggtcggcggaggagaggaagacgtacaacctgctggacggggtgagccggcactcggtccaggtgtacccgaggtcgtggacggcgatcatgctgacgttcgacaacgccgggatgtggaacgtgaggtccaacatctgggagaggcactacctcggcgagcagctctacatcagcgtcgtctcgccggcgaggtcgctccgggacgagtacaacatgccggagaacgccctccgctgcggcaaggtcgtcggcctgccgctgccgccgtcctacctcccggcctaattcatcgatcgatgcatatatgtactgaacccgatgacattcttctcttgttcttgacattttttgtgatcttttgcttaatctggcgaaataatcaacttaatttgggctcgtgcttattgcatgtccccgcgaaaagaagaacaaaagaggagtggaaactgaaacgtacgtcctatgaagaagctgagcgccgtcgtcgtcagctggatgtaatttcgatatgccctctaaaaaccattgtaatggtggagttatattatacatatgatttcatcgctcacatatatatatatatatatatatatatatatatatatatatatatatactagctactgatgagttaaaaaaaccccatttttttttcaagtgtgattaatttatcattatttgtcagtcgatgtttttttcaatcttacgaattacgtttgaaatcgaatgacctgtagctcaagccctacccatctacacgatgggagtgtttaagatgccggaacatttctgtaatgattagtaaatgatattcgctttatccaaaaagtgttaagcatatttcatatttatagttttgatgtgctaaatttattgtcaacgagaacctaagcaaccatcttaatatataatttattggtttgttacattggggacgagttaattacttcttgattttggtgacaaaaagaaatgtgccttatatttttgttaacaaccaaatttggtaatatcggcatcggaaaagaagattagatcgaagtggagtcgaaggcggagatcgatttgagaacagagcaagaatcggctggagtccagatcggctacgattaggatcggctgggtctgagtcggactaggtaagccgatgcagccgattccgacaatacgacttggtgtatgacatcgggttgaattgaggtgcttcaagataattgccgcacatggatagagtcctgagaaggcaattgtatctattaattaaaatattttatgtaatttccttaaagatatgtttgggtaaaagtctgtcgcaaagacttatggtatcttagattttgttagagataagagtcgtgtccgatatggacatagtttgtaattttcgggtataaatagaccccgaaccccatgtaatcaattaacacacacgttcaatacaatttcggcgcatcgccacccttttgcttttgttttatttcgacgagttcttactttcgggttgagctgcatcggtttcgatcttcaacaagaggtaaaacttgttatgacggcttgcgttctcgggattagtgcttacatctttatgatactctaatcttgtttatgtaattcatcgagttatcatatatcttacataatctctagcaatatcaccatctaacccacaatcggctaacatctgttaacagagggtagccgattaggttagatatcgacgttggtttagattatataagatatctaccactctatgaaacttcagcggcttgattgtctagatattgttcttcttttcatacttaatgctgtatcagttgagtttgatctattaagtcatgcttagaatatcaatctctagcctgccttctggttaccgattagggtagtatcggagtttcagccgatcttatctaatttaactatatttgctctatatgcttcattgacacgttaaatctgccctttatgtcaagatattattgcatccaagtatattaagcttctgtttgttatattctgcttgttttaacatcttaatatagagtcgtatcggagtattagccgatatatgctagatctatccgatcggctatggtacgaacatatatagtcctgttattaatatatatttcgatctaagtgatttatactgtctcggcacggcgaccgatctatcccaatcatttgatttaagtatatatcgatataataattgtatattgctaatatctacagccgatcaagtagatttaattctttattacctatttacaaacgccgatcgatttacatatgacatcggctcaaagataaatgatatgtcatcggcacctagccgatcggctatcgtttatagatttaaccgcggtttctttgtatctatttcttgttgattgcaggatcaaatcaactggcacgctaacacacccgaaggcgagctttggacctgcactggagttaagcagatctcccaggcctcgtgtttttcgtcaacacgcttttggcacgcccggtgggacagattaggagtcagataagcaattttcttcatggccgagaaactaccgccatcaccgtcctcggctagcccaggatttgttaaagaaaaaatccaaaagttatgtttcacggacgttgatgaagggaacattgtgaccatcaatccagaaaagttcacacctgatcaaaagaaagattttgacgcgatgatgcagcaaggtgttcgcaaataaaaccgtagcctccttgttagaccgacatgtcattcttttccccggcttgctgagtacgttaagtactcacccttgccccttataataatctatagagtttgaagatgaagacgtcgacctgacagctgaggagtatctccaggagcaagttgagtatgaagacttctagatgttttgtgcctagccccaagcctcgcctgtggaataagttagttgcctaagttctttgcctagtgcgtagtcgcttagttctccgcgctgttcgcttctgtgccgtcgattttatggttctctgtaatgctgtgttgctcatatgtgggcctgtccatgatggcaacgtttgtaaggactactacccagtgatgtaataaagcaatttactttgattccacatttattctgtgtataccagctagtgtatcctgggactggtactatatcacaggtaatgcataacaccccggtgtgagtttgctgtgtttatggctaacaaatgtcggggcgttacagtgaaatgaaaatttttttatgtcacatcggacgtttgactggatgtcgaaaggggttttcggacacgaatgaaaaaactaatttcataactcgcctggaaaccgcgagatgaatcttttgagcctaattaatccgtcattagtacatgtgaattactgtagcacttatgcctaatcatggtctaattaggttcaaagattcgtctcgcgatttgcatgcaaactgtgcaattattttttctttttatctatatttaatgctccatatatatgtccaaagattcgatatgatgtttttacgaaaagtttttttggaactaaacaggcccaaagaaaacacatgcgatgatagtgagggaaatatatataccttcctcactgcctcgctgacattcgtcgtcgcatctggatcgcgaaagtaggtccacccacgagcagccatagtgttgagttcatcgatgtatctctcccagtcaatggcagaacaatggcaatgcatacgcttgaactcttcatcagtaaagtctgcatatccgttagggccataagggatcgtccttggctctagtgcgttaaccttgtctgcccacagggtggcctccttgaatacttcgtagcggcgagccttctcctcctcagtgctgtatgaacggccatactccttcatcaagtcatggaacctggccttcatggtcgcctcatcgaccttcacctcctgcttcttaatggcttcttggtagtctctcgcctccttagcaaatgcctcatcgtccgggagagtcttcccatgttcgacgtaattgagatagctagaccacaggatcttgccatctttgtccacgaaccctgcctcgattgctgcttccttgctcaggtaaggctccttgccggcgtcctgggcagctggtaacttcttcgtgacttcctccttatcctcctccctagctacaggttatgtacagatagtggtagtggctatggttaagttacatggatcagagctaaatattccctttgtttcatatcataagaccctttaagtttgatcaagtttataaaaaaaatatagtagtatttttaacacaaaataaatatattattaaaatatatttaatgttagatttaatgaaatcaatttgatactttaaatatttctaaatttttctataaactttatcaaacttgttaagtttgactaggaaaaaattactaacaaacaatgagaaatcttggccttttcaggattcagattggatgacatatggtaggcatgtcacaaggtgacatagctcagatctcagccctccaaaacaaatt

SEQ ID NO: 5297 - DNA, 14711 bp, Oryza sativa
cacattcccaaaaccaaaacataaatatagcacaaaaaattgacaaattttatggaatatatgaagtagagcaaccattatacgagtttaattgccataataatacgcaatacccaaatatagcggctccctaatctcctctcataattgccggtgcgtgatgcgggagttggttcgaccagcccaaccgcttcccacccgaacccgacctgccacgtcggaccaagtccaacgcatttccgccccctccacccaatcccgcgccgccacgtgtccccgagtgcgcgagaaatttgtcctaaatcccaccattaccgcggccgctttcacatctcctcctcctcgtaatcatcttctcttctctcttccccggcggcgacgcggcggcgccggtcaaaccactcctcgccggcgaggggagcgcggatcgggctcgggaggaggctaggggtttggctcgctcgctcgctttcggcgtgcagctgaggcggtggacttggcggctgtggcggaggtggggaggtggaggtggaggggagatggaggggttcctgcagaagctgaaggggctggacgcgtaccccaaggtgaacgaggacttctacaagcggacgctctccggcggcgtcgtcacggtcgtcgcctccgtcgtcatgctgctgctgttcgtctccgagacccgtaagtgtgtgtgcgcgaagcagccgccgccgcgcggatgttgtgtgctgttcgcgtactctcccatccgtggccgtaatggctcgatgtggtttggaattcgaggagttggttcttgccaacaagatcaaagtcggatttcgagttgtcgatggggatggggatttagagtaagatttgaattcaatgatgcggtgggcgtgttcctgctgctgctgcatgcttgaatgtttggaatatttccaggggcacctgaccgcgctcttggtaatttctagaagaaggtgcccttttaggtagacaggttttgcggtgtgtcagggtaacgaactaaagatgggcatgttgcgatgggcattgacgctaatggtgatgtatgctgcgcgcgatttttcttttctttttctttttccttttcgggtgtgagattcctgaaaagttcaggaatgcttttggctgagttcctgcgtctctgaggaagataaattagtttatttttttctgctattacttggatttatgtgctgctatcactgttggttcgtgaagggtaagtttttgtgttgttggctctgcatgttggatcatgcgtgcaaaattaggtcgtcacaaggattatgccgttttcaagttaccttttgagtaaagtctgttgttgcaaaggttctgttttatttggccagcatggccttacattactttggagtttggagaacaagaggttacaagttgtcgaatttttatgctctttttgtttggtgcaatttgttagtgtttatttttttaaaaaaattctggtagtgagaaggttctttcataaaatgtttttgcagggtcatatttttattcagcaacagagactaagctagtggttgacacatcaagaggggaaaggctacgagttaatgttagtatttatttgattgttaaactagattcatgtcatatgttgtacttctattgtttctagtataaaatgcatactcttttgtatgctattcacttacaatctgttgggaactaggtgtgaatatttcctgttaacttctaatgctaaaactgttttgcagtttgacgtaacttttccgagtgttccctgcacccttctcagtgttgataccatggatattagtggagagcagcatcatgacattgtacgcacttatgctatatcatcttctaattcttagtatgtgttgatttgtccatcttattattccattgtttgttgtagaggcatgatatagaaaagaggcgattagacgcacatggtaatgtcattgaggctagaaaagaaggcattggtggagcaaaggttggtgatcactgctttagttacactttgaggttgagctcattaataaactaagtgattccccgcgctttgctgcgggaattaccaaacaattctcaatatatatttttcgacaatcaagatagcagtaaaaaggaaaaaaataatgaaacatcagggtttatcggtacttatcatgaaacaaacaaatgatatccgcgctttaatgtgaaacatataacatattataaaaatgatagatagatttgttaaactattgtgcaaatgatgtgaggggtggtgattagatatgcttgcatgttgatttgtagaattaaataaattgcagatgatgttgtatgcttgcatgtcttaaatatgtaataattgctagtgggtgatgatgtgacattgttgcatgttgagctttagacttagtgagctataactttatagaaagtatagatttaaaatatcgaactagagtcgtctgtacaaattattcttggtgacctagtatatttccctacgatgtacagcattgtagttgttggaaaacaagtggaaatttaagtacttaaatatttttattgtcaataccttattttttacatgaggacataacgtgagcatagcatgtataatattacagattagaatataaccgtttgtggactgtccatatgctgaaaacatactccagtatccacttaaaacatttccttcttgctgccttgtatagatagagagtccattgcaaaaacatggaggaagactcagcaaaggtgaagaatactgtggcacgtgttatggtgctgaggaggtatgcacaatcttttctaatgggaatgtattttgtttatacctcttattatttcagctttctgaacttaccttgttctttgttacattctaactccggatggctttctggacttcagtcggatgaacaatgctgtaattcttgtgaagaagttagggaagcatataagaagaaaggatgggcccttacaaatcctgatctgattgaccaggtatattagttattttggcatggtttacctagatatatccattgtttagatttccgttgagttctcttgggcttagtttaagtttggaaaatatatgtatggcaaataatgttgaagattgcaagataattaatatagtctatatagaggtagtatctcttaagaagccactattactggaagtccctgagaaatgattttattcctcagtcccatatctgccttgtttctctccactaaccaattagaacaacaaaaatggcctactcctgacgtagtggcataccgtatagttagatgcctgttgcgcgtatactctagcctttctatactagtatacttgtgtctagtgacaagctagtgtggcacacctctctttcatgcttttgctttgcaaggcagggctcatttatgagtgaaaagagtgaggcgacgtcatttctcctactatttactggaacttccgccctactgatttgttttccttgggcatgacagtgcaccagagaagattttgtggaaagagttaaaactcaacaaggtgaaggttgtaatgtacatggctttttagatgtcagcaaagttgcagggaacttacactttgctccaggcaaaggattttatgagtcaaatataaatgtgcctgagctgtcggcacttgagcatggtttcaacgtaagtaggtccaataaatgttccttttccttaaaagtgtttttattcagtgtttctgatatgtttgtgtataattttaccagatcacacacaaaataaataaactgtcttttgggacagaattccctggtgttgttaatccacttgatgggtacgtccatagctctagctcattgagcatataattatagccttgcacttattctcctagttatatatttcttttttcaatttttatctttgtaccctcatgtcctaacaaatttcatgaacgtcagtgctcagtggacacaaccagcatcagatgggacataccaatacttcataaaagtgagctcttgttatccatgtttacgtgcttacatttgtatcagttgtttctgctacaaaccatcatttgaaaagaaacttactgggttttgcttaaccaggttgttcctacaatttacactgatctaagagggcgcaagattcattccaaccaagttagtgaagtttattgaatcatgtttatactttatattttttttccaagcctagtgatcttattgttacttgcattcacagttctcagtaacagagcattttagagatgggaatattcgccccaaaccccagcctggagtatttttcttctatgatttctcacccataaaggtagtaacaatggagagaaattcgtatgtagtcatgttcatttttctctttttatgattctatcttagcttgctctactcatcttctcaacctgtggatatgtgttgccaagctcatctgttgaatggctggctgtgttggtgtgaccattcttgctgcacatgcagaatgctccaaattcaccatctgttattattcagtactatttaattactttggacacaagagaagtctacaatacctttgtttcacctttatctattctgacactgcaggaccaaactggaatttgtaggctttaggtcatggagagtttctaaagttagttattatactagtcagtagctaaaagaatcagttcattgatgagatatatctgttaggagtatcctagcataaaatttggtattatccttttattatttttattatttgctgaatggctccaaaaatgtctgcatatgcatcgtaacactttgaatacaaaattgacagtgcatgtctatactcattcaaaagcctctagtggtggtggcagggaatttgccaccccactattgctttttgcagtttttacaaattgtcccctgatatttttctaatattgtggaatagttcaatatttggttcaaacaagtgaatagcagataatgaaataaacaaacaattgatactaagatatttgataaaatatatatttttcttacatattatgatattgtttttcttctgcccatagcaaagcttgggcattttgctagtactcaaaagtcaaaacttatacatgtggataacatacagtttcgtatcaatataacgattaactaattctcatattctcttatcagattgaaaggtactccttttaagttttaactctttagttctgtgacccactaaaatcttagttctccaccttatgtttttgcaggtaatatttacagaagaaaatagttccctgctccactatctgacgaacctatgtgctatagtgggaggtattagcattacctctattttattctcaaactgattaatcttttttattctattgtagtgaatgagtgttatctcttcagtcttcactaacaaattcttataattcttatacatttcaccgaaaactccaatgcttatttgacaaagtttataattagtttgttactatttgcctaagtgatgaaccgttgaaggaattggctctgtttatctatgtgcctgtgtataagtaatgtagcaaacctagtatggatgcaagtcactaaacttttgtctgccttgtatcctcaggggttttcaccgtctccggcatcattgactcgttcatatatcacgggcagaaggcactcaagaaaaaaatggagctaggcaagtacagatgatttacctgaaacatggactggccctcatgttccccaagttcccaagttccgtggcttgtaaaggatccattgcttaagacctgaagacgttgctttgctggaaggttttgctaaggccatcagaattgacgatattgcacattagttgatcaaaaactcgtttacatgtaaaaaaagacaatatcatagcgttgggcctgggggagtgctttgatgtctcagtgagactctttttgagtggccaaaactggcgaaatgagatggatagattaaatcaattttaccactgcgtgtgccatctaacactgtttgacgttttctgtatttcttttcaggaagaactagaacttacattttttttgttctttttttttgcttcatctgagtgcattagtagagatataacccatttcttgtaacttcagggtgttcaaagagacaatttgatcattttcgtgtcacgtccttctgccatcgtttgacgcttgcaatttattcaggaagaactagaaattgcagttttgcttctctgtgagcattagtagagatacaaaccatttttaaatagtatatatatattgtggttatttgccaagttgttcgatatacaaaggatttgaatctctaatcaacgagtgagttgacctagttcctattaaactacatacttgatcagatacgtcacgattaattaactatcatgttcttagtttaagtaagaagatagaattagggagtatattacgattaaattattgttaatctgattcaccttgtactttcatcaggtcatatgcacaatccaaatctctagagttcaatggataagaagaacaaatcagaactcgcatcgactgatctgcacatgaaccctcatcagaatggtcaatgaagagattgcgtggccacgaggttacaacataatatttatcatataaagatttcactgcaattggtgaatctttagtaatttgatccataggcgaagtttctcctataatctccagctttcttcatggaactgcagtttgctgctgatatacaggagagtaaaaccaacttaatctaccaaggcaagtgcctgtaaaagaaaaaaaaagatgtcttaaacaaaaagtacattgaatgaagggtaacaaagcaattgtagagtgatgtgagtttgtcttttaggtttgtttttcaggaagctacgaatttagtcctaagataaacttttgatcctttgggagccctttcctaggttgggttaccctacagaatggtctaaattctaggctgtttgaaccaaccttctgctggaaagcagctttctggaagctcaaagatttgcataaataatttttttttcaggaagttcatgcttgctgctttctacatgtactatttggttcaaaatgatatttactttaaaaacaatgcaatgatttgctttgttttatactcaattttaatttacggaaaatcacaaaagaaacaaagggggcaaacggtaaactaaactgcaacccaaaaggacacccaccattctatgatttgacccaagaacatttcagttatagttagctggggacttttttttttcagaattgaaatttaagtgcttctgcatacgcatctgggtaactgggttgttttggcaagaaatttagtggcaatgtggtagctaatttgttaatccaaaattatcatgaacttcatctctactttgtcttgtgactaaccattgctggtcaaagatggaaatacatgcagttccaacttccaagtttcatgtggtcagtagtgaggacttacatggaagaaacctctcaacttccaaagctcaagttgatgtatggtggtgtttggttggaggaactaaagtggggctaaactttagtccctctcacaaaagcataagtctctatggtagggacttatgtttttgtgagagggactaaatttagtccctagttcccaaacaccccctatatttcaccattaatctgcataaactaaatcgcactctgagcataccagatcaatcatacaccagctatttgttttattttcgaagaacctcttaatccatcagtccatacatgcaaatcactattagcaaatttaatagcccatgagaaaaaaaatttgcaacttgaagtgcattaattgtataagtagttaacgcgcaaatgtacaatgtataagtagttaacatgctctagagttgagacagcaaacatggacattatccaaagattccccatactcccaatcgttcttagcttagtattcgaaagtacaaatgccagctaagttcaaatgcaaataatgtagaaggaattactttagaggcccaccttatgagtgaccctatgaaagatctgaaactttaaaatctcttaattattcatagcaagaatgagcaaattgttgctgttgtgtccaataatggatgtcctaagttgacgtcttctgaagccttcttgtaagaactgccagttcctttttttttttttgtgtgtgtgtgtgtgtttctagtttacaagaacctatcatggcccaaatctcatggagataggactggatctatatcttgcccttaacatcaaggattaatcctgaactgtaatttttaacaaggcggtaagatagataaaaatattagagaatatctgcccatgtagccaaaagagataagattggcactaagtatagtgctaatccactggcaaagtcaacttcagaaaagaaacctcacaaatgtaacaggaatcagcatatattaaagtattaaacacaccaaaatgaacacgcaaatcaaaaatataatggcagctgatatcctgcagaaattgtcagcatcagattggtcgttttcatttcacaatcccaaaatgaatgtcatgtacatggaagaagaatctggccgtctctttttcaaggctaacagcaacctccgtgtatggaaacttcttccaaccattttcctggcagcgcaagaataagttgtaaatgaattagtttattttatccataaagtggtaagaacatatatgcggagcattttgagtgcaatgcaacatctctgtctcaacatgcagatccaagaggataaacacaagactcattggcaagaggacactgagaaaaaatggatatctcatatgtatagtatttattgatgttataatagttaagaattgccatttcaggcatcatccttcgcagaaataaaataaagactagtgagtcatagagggacaaaaagagcaaacaatcagcttgcatgatgttagttgcataaaatcatgacatggcattgggagagcaatgagaaagatacactaacttgatatgatttccatataaccaacagaatgtcaccactgtacagagagctaatacaacagagagcaaagcacaacctattacatagaccagaagttaaaagtaactagatgactgcctggaccaacaagctaggtacccagtaacagcacaagatatctagaagccattcatctccagaaggtaagttcgcctcttcatcagcgccttcacagcaaacttgaatggtccatcaaatgctccggagacaaatgcatccgtttccttgcggctagtatgaccgccattgcttccctcgggtgagggcttgatagcgaccaacgttgcaccttgcaacgcaatgccgccaggaagctcaagatatggagcgtatttgagcttcatgttgcatgctggaacctgagtcctgttagaacatgctgaggccgacaactggttctccctaaattccttaagctgctccgctcccatggacaatgtgccctggccatcagcatcggtcagtaccaagcttgtaagagtgggatgatccttgataattgaccgaagaagataatgtctcgttgatgccgcaatcagagagctgattgtccacacgacgcggagtttcaaccctccattggtatagaaggattccggcatgcttccattgtcctccgaatacagctcatgctctgcaccaacaggcttgcggtcgacctgagtacccccaagaatcacacaattctgaagcgtactcccatactccgctcgccatttcaggagaactccctcctcagtccccacatcccccgagggcagctccacccgcagattccggatgtgcgtgaagttccggagcacctgcgccggcgagtgctgcgcgagctgcgggaacagcggccgcccagcaccgttcgggccgcgcatgctgtggaacggcttgatgatcgtgaacagcatcatcttgaggaaatgcgagaggatgttcctcggcttcggcgaggacaggttaagcgcgtcctcagcttcgccgtcgaccgtcacgacgcggtcgatcttgacatagacatcatggacgaggggcacgagcccgtagaaccgcttcgacacggcggagcaccggccgagcgagcgcacatcctcgacattgttgaggatcaccagcacaagcgagtccggcagccggtcgaattggtcggcctccagcaccgggtcggcatggattcgagccattggaaaccacccgaaatggagaaatggatcaaacgccctccccccctcccccccgcgcgaggttgcagagaaatggagcactaatctttgcaacagaaatgccacgaacagaagctgctgctcctcctcgaccttgtcctctccgaatggctcacgcaaccatctgaaacagaacaagaataagcacaccggattaggcgaaaaagatgggagagaattgaatgccgcgcagcatgcataaaaaaaaagaaaagaaaaactcgaaagaaactcaaatcaagaaaccgagaagacgacgaatccaaagagagaacctacctcagacaccgcgccaccaccaaatcaaccgcgagggccaacctttcgccgcccacacgcgtccggatccgacgccgacgagcaaccgtacggtaccgaaatcgcgaaatcgggagaagggtcgcgccgttttctcaccggaatcgagagtccccccctccacgcgcagctcctctccgaccagccggagatgccgaaagagcttcgatcttggaggccggtgggggcgaatcggacgggattagggtttagggagaggggaattggggatgagatgttcttgttcttgcctctccttttctttcgttttcgcgaagaagaagaagagagtttccctgggcgaagtgcttctctttcttctctttttttttttttctcgtcacaccactcgacgcggctctcctttaatatcgtctcgccgccgttaaggtgacggcctccggcgccgtcagttccacgtcagcagtagatgcgaacaagcgttcagtaaatttttcacttaactgcacgttcaccaccatacatgcaacatcctactctcgggacccgaataaatcacagaaataaaaaaaccgaagaagcatgaaaaatatagaattatgttaggaatgcctctttaaaacatatgattgtaaaacaaaagaaaacacaaaaaatgaccgtataaaagacacatgaattttaaggagagacagagactcaaataaaacttttcatgaggttttccctcatgttaaatttcctctaaaagttacatggaatgagacatattctataagaattttatggggttcatttatttgtttcaaatggctatatgggaaaaaaatcctatagaaatacaattcctacatatttccattaggtctccgtctcatacgctcagcccacgaaaaagcacacccacatatgaataatgttcgttgatatcagaatttgaaatcgagtcatgtatccaggacatcaccgttacaccactgatgttttatcactaaatatttatatattgttagcctcatcgtttgtcatatgctaatcatttgtcatatgccggttataacctgtaattgcttattaaaaaatgtgggtaaattttttatatatactatttaaaagttaatgaaaaaaataaattatgataaaataatatccaaaatcaacttaaaactaaaaattaaatttaaagtttaaattttaatagcggtttataagctaaaagacgaactatggagttaggtatgttgttaacaacaaacgagcaactaagatttctattattttccttaaaaagtattattatttcaccctcttcagtaactactttttattatttaaccctgatttttccagtgtgtggctgtgagctttcaccgtttgagagcagcttcagtgctggtgtgtttggatcccagccattgaatgccatagctacagtattttcgccacgctatagtgttttacgaaacgtccgccacactcctgtggcgagccacgccgtggcgtggcattccaagccaccaaccaagcatctctcaacatgattactgcgtaatctgatttttgccaactaaccgccacgtcattgagattgagaacgaaatgtgtacagatgagttaatttggatgaagtggcaaaaggaaggtgacatggcaggcagcatcggcttgattaatcactataaaagggacatgatgttcttagttgttaaggcaattaatttattcacgttggataagatagaaccaccggtccatcaatattggtcacaaatagatacggtatccttgatcagtttatatctcaaatagtttttttttaacaactcacacgaaacggtgcgaagttctattcatagagtagaaaaaaatacaagattacaaccctagaaagtcgtaaccaaaaaaataaaaaaattataccaccacccacatactaactgcgccaaacacagacccaggagaagtctagcaccggaccggccaccactcagcgtgaccgaccgtcgctaggccaacaatggaacacatccgagatcgcccaaaaacatgacccttacaaccaacgcaaagcccgactctacccacatcttcaggatttagggagagggggtgagagagaagatggaacacctctccccctagacccttcgacatggccaacttgtagaaactaggccacctccacaagagaatgagaatctagagcgtgcttgcaccaaaagctcgggtggtttcggcaaggggatgcctagacgacgtctccaaggagaggagcgacggaacaccgccgccgccgtccgtcaaggactcaagagagccgatactaggctttcgctcagcaaccgcccttgaggggtaagatggcactacaacaccctcaagaggggaaatgacactcgagcgtcatcgttatcggtctggccaaggccgggctgggttttcactggccatccaccacctaccaatataccacagatgcaccattgctccactgccaactaaacctccgccgccgcgtgggcacaccgcaccagtgccccccgccggccagtctccacatgcagctacctcactgggctccacctccattggcttcgcctcccgttgcgcatccatcgtgcgccagccgtccttgacgccgccggccacactgcaaggctaccggccgcaacactctaccggcattggccagccacagcccccggccctcgtcgttgccctctgccgcaggcgcggcctcctgcccctccaccgccgtcacggcctccgcacctccatctccagcacctccgcgctgtcgcgcccgccgctgctagccgcaccctccgtcaccgacgccctgttaacagtgaaatttggtaagcccaaatttaccatcggcttagagtcagtatcggcttcaaagttttagaatcagccgatgggagtcaagtcgccgcgatgtcgtgttcttggtggagtcggatcaatcaaatgaatcttatccagaagagaccgagttcaaagagaatgcacatggcaagttatctattaattatgaatagtttgttagtttccttttatctttagaaaagtgtgtttagtgtcctataaggactttatcttttccttctatctttaagaaagttgctttcttgtctgacaaggacttgtatcaacccataggtataaatatgtacacccggggtctatgtaatctatcctcacgatcaatacaattcggtgcatcgccaccttttaccttttctactttattttatcgaccggcaggacttggcacctgacgtggggctacatcgttgttcgatctccggcgaagggataagtccaatgttccgtcggcccaggcaattgtctcatctacatcggcgtcgttcaaggctgcatcagtatattcgacctcttggattgctctggtttggatgatatatttgcctacctatttatcatatgtctatgttaatctagtcttagcatatcaatttagctctatcggctgcttctcgttttagggtttctgccggtatcggctaaatcgcgttgctatattagattagcttagacatctaccacactgaaaactcaatcaacggcttgattgtctagatattatttttcttttcatacttagtgttgcatcagttaagtttgatctactaagtcgtgtttagaactataatctatagcctgcttcttgattgccaataagggtttcatcggggtttcagccggtgagttatctggacgttgcatcggctcataaggattgcatatacatataagttggatttagccgatgacaacaaaggtttcactgtttaatctaatcttgtggatttcatgacatcggacctccagccgatgtgtgctttaaccttcagatcgatgcttatttatcatatcattgctagccgattggtttctactggattatatttctatattatatcatcataagccagttgcctttatatcattatctacattggacatatagccgattgcttaaaccttatcgctatcggatggtatcagcatcggctattatcggctatcggctggaactactccgttggcttgtcagccgatctgctgttttgatctactatttgcatatcttgt

SEQ ID NO: 5298 - DNA, 29116 bp, Oryza sativa
gaggagttggcggaaagggaggattacctgtgtcgactttgatggagatttgcggccgcccatccttgagcgtttactttggtgagaaggttgagaggtgaaaagaccaagaattgcggctaggcataggggttcaaccccttttatggaacaaaaccgcatctatcccttgttgccataggcacataagttcaatcccatatttaccccctaatctctttgacatgtgggcccataacccacatgccattgtgagattaaggggcaaataagaggatatgcaaacttttaggggtgaataaggaatttatcgaaaggggctaagcatacaaaattgagtaaattccttatttgcccttgaaagttgatttcgtccctttttgcccttgcaaaattgccctccaatccattgaccacctttctcaacttcccttctttatttgcctattgatacatcaaaatacatttttgctctagtgaatgcccttctttctcatctttattgttccttttgccaccatggcaacacttaatcctcattttcattatcagttcaccggtgatatcttgtatcccgtcatgtcaaaaaaaatatcttgtatcccacctcttggttggttgtaccctcatcaattggcacctcctcctcacctcctcaatcctgacctaccactccactattggcaacatcttcctccattctcacgcagtcacacagtcacagtttttctgattttctcattaggaaaaatattcttcagcatattcgcagaatgaatgagactcttaaagatatagtcttagctggttacgaactttgtaaggattgtggttttagtaatccttgttgcctcttaatctctactacttagaggtggagtcgtccgtctgccctccccctcatgacgcacagcacgagtcactacctccccaagaaaaccataaaaaacaaatggtaaaaaataccagttgtatcccatgctttaggttagacccacaccccaccatcgtatggtcagttgcaatgaacggacatattactagttaaaagcgactattggctgtcacctggcagtattctcctaaaaaatgcactatctacatgtgtttttaggtatttggttgatttagatggttgtgtatacaacttataaaactgtggatagttatatgttggttttttaactatagatctttagtatatttgtttgacatatgttggaacatgtgatcacattgctcgttatattgcaaataggcactatgtcatgcatggcaaactaatgaactgttgatggaaaaattctagaaaaagtaatagagatccataatgagagtaggtgaattacaaccagtccgaaaacccaaatgagggtgagtgcaagcaagtttaaaagtggtactttagaatatgtgactaaaattcaacctaatttgacaggcgaaaattatacttagtagttgatcactagaaggcaaaacaaaagtgctaatgcttacaaaataatttgaaatgaaagaaatataaaatgaaacaaatacttcctccgtttcatattataagactttctagcattgtccacattcatatatatgttaatgaatatagacatatatgtgtgcctagattcattaacatttatataaatgtgggcaatgctagaaagtcttataacctgaaacggaggtagtaataattaccaacactgaacaaacacaggcctactataactggagactagaactcacaacccatggaagtctaggattaacattttgtgagtagctttataataagctggtgttccaactagcctcaagaggccacgtatttatggaccttccatgtataatcctgaatagtagaattagctatgtgatactaaaccaataacatgtttggatgagcttgagatgcaaactcgaaatttccaaaagtgacttccaaaattaggtggtgggtcagcaagaaacaatgaaatttcatcagaataacacatgctcttttttcactcataggtattgcaacatactgaacaaaaataaggaaaagggactggaaattaccatattaaacgtaagcattcaaacattactctggtggatcaaattttatcaacaataagccacttgtaatttgtagtctcttgtatagatatacacaaatgggtacaaagctcattctttggctatatttagaatgcacattccaaatcctataatgacttgtatcatgtgaaaatcctacaaaactcagttgtcaggcccttactatagttagcacctttatgaaggtaagccacagatataaagttttctttggttagtttgaacaaatcctaccctatattcacactacgaactgagaagaaaatttccacccaataaaaatattttaggttcttctccctcattcaactatacaatgggtctgtttggcacagctccagctccagctccacctcttctggagctggagctcagccaaacagtttcagctccaacaaaaatgggagcggagctgggtggagctctctctcacaaaatgaactagagaggtggagctgggtttaggcagctccataactccactccagacccaactcctggagctaaatttaggagttggagctctaccaaactggcccaatatcagcacatcatctcatgcacacctataatctctcccattgatttcttgatcagatgcattgaccaaatatgaaggctacttgaggaagcaaatctatggtaggtcaccattcttttgtaaccaatttctaacatcaccttggttgcttagttttggggttgatttatttaagtcaaccaagtaaagaaagattttctatgtaattgcttctcccacaggcaccaattttgagcagtaagaacaaaagcatgaccatccatgtgcagataggttttagtttagtgtagttcaaatctcattcattaacgagtacagttacatggtacaactatagggtcggtttactcagttacctaacttgcatgccaataagagtagaaaataatgcagaattcatgtgttgtttcaatcctaaaccgtatttaattggcaaaataaatatagatacgcattactcagcacaaataggaatattattataataattattttgtatattggattaaaaggaaggtccattctggctagactctaggggagttcttaaaaggtaaaaggaccttgaatccattataagacagtaacttaaggcatacaaattaaaaaaaattgtacactggtctgtttgtggtctttttctatcatgagatgatgctaatggaacattaaattagcaagaggaagaaaaagtattgaagaaagcaacctcacattgtttagttggtttagtgtcacttctaacttcccctggaaggtaagaaatatgcagttatgcaccattgtccgaactccaaagccttttctccaagaatcatatagggagcgttcggcaggaggagtttgtgagttagtttgtttcattttccgtgcgcacgcttcccgaactactaacggtgtgttttttgtaaaaattttctatatgaaagttgctttaaaaaatcatattaatctatttttgaagtttaaaatagtttatactcaattaatcatgtactaatagctcacctcgttttgcgtatcttcccaatcttctcttttcccctcctctcaaactcacccatagtctatagtgtatgaactctgaatctcaaacttgtagtacaaaataaatctgcatggttaacacgacatacaaacagataccaatgagttgttaagccactaaaacatacaaacaatgaagatgttagaagcacaattatctttcagtggatatatgtacagctccatacgagaggattcttaattctcttgaggtagctacctgcgaaaaacatcggggttttcaggatccatcagtcaatcccctgaacaagaacgatgatgtcggcttgtcgagaataacagaacaatgcatatccatgttctccgaagattgagctccccagcttggatcaaatcgcagacgctcgcgtccgcagctgagcaggagttcatgaaacctaccaatttactgcaagaaaaaaataatctcaaaccggagcctaactggaattacatacagcatcgaagactacccgatagaccaacagaataatttgagacctgtagaacattctgtggcttgagttcattcaaaatcatcagaataaagccccccaccctatcccattccatcaatccctcccccggggcaaccggaaagggagagaacattctgcagattgggttcattcagatcacccaggctggaaactccaacgccaatggcccaagcatctctctaattcgaatgcaggaaaggccgccgctaaatcaaactcccaactccccccaaaaaagaaaaaaaatccaagcacgatgcacgactggaaactattcccctgggccgggacgaacacgccgtcggctgcgaatcgagatgacacaagatccatccgccggtgagcagcggcgcggccaccgacctaatctgagttttggcgatggcgagaccgagagttagcggcgggaggcgaggatctctctgtcgcggtggagacggggacgaggggtttgtgcttgtgcccttcgtccctgtgaacgaatcttgatgcactccgtgtaaggtggtaaggctctgtttgcgaagcttcaccttatctcgtaaaatctgaagctcttccaaataatcccactttttttttaattctaagaagttagttatagaatatggaaaatgaattagagagctgtttgggaagctttcatcacataatctcccactccctaaaccgtctatattttcacccatattctaagaatctttactcgtagaatctagaaaataaactagaaatctaaaactgaatctaaaaggctggctaccaaccagtagattttcagaatcttaaactactccaaacaaaacctagaaatcggatgctgagaaatctagcttttctaagccggctacatccagctatttcttacaatcttaaactccagacagatcctaaggctaagagaggtgcaaaaaaaaacaccaacctaccgtatgaatatttttgaaatattgagctaagattaacgaagttacgagctggtagctcgctattgataagtacttcctccgttctacaatgtaagtcatcctagcatttaccacattcatattgatattaatgaatctagatagatatatatgtctagatttattaacatcaatataaatatgggaaatgctaaaatgatttacaccgtgaaacggagggagtaccaaactgaaggaatgggctagtaaatcttgaaattaatgaagttaccatgtgactatcaattgataggtctcactaaaagagcgggttcgactagaaaaaacttgattagttaagttacgctcacttaaaaaaaccaaacattttcttgtaatgttaaatttaactagttctaatcatgaagtgtacgacctacatcttatttacggtattgttaaaacagattatttaaatatgttcctagaaaaatctccaactgtttgtaaggtcacttatttttttattttaaaaaatatttctatatagttacatagataatttataacaatactccacttaatataaatatatattaaacatttttttcattttacaagaaccagcccaacttcccaaatggccctcatcaattcgacctgggccactcggacgtttccgatggactcgtcaagcccacactccccccaccgatcagacagtgggcccttcatgggcccacgccacgccctcctccactccgtctgacctgaccatcttccacccagcgttggtctcgtctgcagcctcgccttcacctcggcgggtagatctcgcgggcgcatcgcgtcgcggggcaaattcatcaccttcgtgaggcgcaaaaccctactgcccttgacccctcccgctcccctcagatctccccagggtccaccgatccaaggtgaggcggcttcgtgctcggtcggtgtgtgcgtgacgtgaggtttcttgttcttgattttggtttcttgagttttgaccatggtggatccggcggtgtgtggtggtgtgtggttgcagatggcgagcacgggggggaggtcgatggcgctgtcgctgctgctgttcgcggtgacgctgtcgctgctcgagatgtaccgggggaggttcgcctcgtcggagctcatgaccatcgccggcggattcgtcagctccctcctcttcctcttccttctcacggtgcgttgaatcgtccgctcccaaccctcctcttacgatcttataccccttaataagtttttaagttttgctcgtgatgccgttgtttgtccctctttctttttagctaatttgaagtgatagaatcacatgagtggtaaaattttcgttttattattaatttagacaaaccccgtagcaaatggagttgccaagatgttgtctctcgtagcttttgtcacatttgagtgattcagtctgtaggggataaacaccatagaagaaaacatagttttgctctgtgcagaagtgggtagtaacattgtgcttctctgaattgtaatatccgactaggcgcataagcgagatttcggcttagaggacctggaactagtttattcaggttcagttttccagatatccacagaagaatagcttctgaaatatcatacaccatctaatattaagttcactctctacacaagaagtcaaggatggcttctgaaagagaatagaacatttaattttaagctcacttggtactatgtaggctaagctatctgctagtatttccatgatgctatcataattcttgcaaagggcatgttaagtatggaacctggagcttcgaacttttaaccttttgagccaagataatagaactaaagggggttttggccaaaagcatgctaagccccaagagcatccagcagaactagcagccccaatgtccatactactagtcttatctgatggtcaaagaaagtatccttgaaatggggtacttatcccagctttctgctctgtaacaagagaacagtgcaagcagacccttaggaaggcaacaaaacttagcaaaaacaagcacataagacatagtgagcaggtggtatccacatttgattttcaccttttatggttgtattaaaagatcagtgagttttgcacttttttaactgtttcctctcaacattaatattagtatatgataatttgatatacttttgcagtttattggcaactatcaggaagctaatggagttaaaactggatggggtgcaggtatgtatagtcatacgatctcattcttgctgcttccccctgatttttatttcgactttctttaactgtctctttctttgcagttgttgtcgcggaacttactgcacttattgttgccggcactgtccatcgtgtttgcatcacaacatggtatgttatctttaagacactttactatttctttctacggacatttagaatttttctatatggtcccattaacacatccatagatctgagtgtttgctgtttgctaaataagaaaattcttggattatccagagatggtaatctcagacatactagtggagtatttgcttatgaactgttgctctgtttagatgggaggaaatgaaactaacaatttaggcaaaaacaagatactccactcctttgtttgcaaggagttaaaacttttttcatcctgttgaatgtgatatcattcaagatagtaatgtgtatttcacacaagtattttttacctatcttaagttgtatattgttaacactaatgctattggtaaatatggatttgtcacatgttgtaaaagctgtatttatgcaacaatgtcactggaaacgctatgcaatttgcagattacgctattcagaattatggcatatagaatgggttactagtagttctgttgaacctgtctatataaaatatcaaatcaattgcccttttatagcctattatgcttgcggtctaagtcccgccgctacttggcatttttttaagcaacttgacacattgtggataccctcataaccatgactttggagagttctatgacagtgagaaattgatactttggagagttctttgacagcgataaattcatattattaacctttggtcagtctgtgcacccgttgctgcagtccttgcgaatgtgttaatcaatttttatcaactttggctgcagcttcctgttttctgctggatttctctacgaggttgataagctctctggaatgattctcgcgaagagcgagtctaaagcgaggcggcactaggcttttgtaccatgtcatattttgtagatcaaatcaaaaactaatgttcacacccttcatggaactttcaacccagctagctttttcccccaggcatacgtataccatttgaattatgaattcctctagtgtgtttgcactgatgtcacagttcggcttttatgagttttatctaatgagaatggtgttgactaggtgatttcgatgtctttttgacagtctcctggtgacatcagttcatattttttgcaaagcaatgacacattttggcattttagacgtgccctgttgcaaacgttgaaaacattgtgaagtggtagctgtggttaagatctgaatttgtcaagcatgttgcttaacgttttatctccatcaactctggggttttcttgtttgcaaagcgcggcacgacaatgggaaatgtcaactagggacctctggaattattctatgggacggggtcatgtagtctgctttgagattggtgttgaaatcttccccgtggattatttatttatttatttttaccttttttatttaaaattttagaaataaaccattcaaaacttattttcaaatctaaaactgttggtcacgtggcaagggttttatcaatccagctagattgatttggcgagacaacagcccactttatagccattatgggagacgtagcagagttgttttgtcaagcagtgcgagatgacgtggttagaccaaaaaatttagatttgaaataagttttaggagcatttattttaaaaactacaaaaggttcgaaaataataagaattcacgtccatgcagggcgatgaaagcattacaaagccaaagctgattttaagttttaaaacttttttttagaactaattccgtgtgtttcttcgccgctttcattgtccaacctttccgtgatttagtgcaaaattattcctgagaattaagtaatttttaagaattgaaaaatcagctaagcatgcactcgtttgccgctttttgcatgaatctagtgaaagatcgcgattgacatgaacgtgcggcaatttgaccaaggctctccctttcccagccactctctttcaggtccacaacagtagcacaatgcaaaaaatcacgagcaaatcaaaactcgagataaggcatgacgaccccaattggcaacttgcccttttctgcaaacttcacaccgcgagcctgacgcggttgaagaagtatttattaaccctatttaattagggttaattgtgtccggccgacctatgagcacatgtggagtattaatgaaggtgtttctatgtttcgatccggaagttatttctgctaattttagattgacctaattttaagaggatgaaaggtactcacaacaactaaggtacaaatttaccacaaggattctcgtcgtaatcaagaagacataagagatcctagaatcatatactctctctctctctctctctctctctctctctctctctctctctttctgttctttggacttgatgcatttatcttaaccgtggattacatggacagattaggacagaatccacaacgacgattcctctcctgcattgtcaactatcaactgcacgggcacaaatgtactccctccgtcccattttaagtgcagtcagccatgattttccgtgctcaactttgatcgtccgtcttatttttaaattttttacataagtcacgcataaagtaatattcatgctttatcatctcataacaataaaatactaattataaaaaaaagaataagacggacgattaaaattgagcacggaaactcatggttgtatttaaaatagaataggacagtgggagtacaatccaagacgacgactaacctgcacattaacctaggcaccttcttcctaagatatagatataccagtactagtataataatgttaacaaaaaggaatatcaaaatgtgggttggattaagcctcacgatcccatttcgcgcgcccgacggccaacacacaaaataataagaaatcatgcccgcgatggctacctgacaccaacagccgacctgattgagagagatcaattaataaactgaacaacaggttaaatggttaactaatccaagtcgacactaattactctatattagcgcaggtctttttttctttttcaatagcactgcctccaacttctaatagatgacgccgttaacttttaaacaaatatttgatcattcatcttataaaaaaaatttatacaaatatataaaatataaatcacttaaagtattttgagtgataaaacaacttacaataaaattataactaattaatttttttaaacaaaacgaacggttaaacatgtgataaagagttaacaatgttatcttttaaaaacagaggtactaatattgattaagcataagcaggtcggctctttgaccaaacggcgcgaggaaggagcagaggcgggagggaggatgtctggctgtctgaacgcgtgaggagctcacactctgatcatccatccgcgggtgggttgacctcttcccggcggcgcggcgagagaagggaagacttcaacccggccgcggttggtggcgccatcactccccggcccccgcgcccaccatatacaccgaggcgtcgtcgcctccccgcaccttgcgcggactcttctcctcttcttcctccacctcctcctccacgatctccggtcaagcagagcacaagcgtgtgctagctctcccggtggcttgcctcgccggcgacggcgcggcgcaggatggagccgcgggtgttgatggctcttgcgctggtggtggtggcggcgggcgttccggcggtgttgtgccagaccaacgcccaggacggtgagtgctcttgcctcgccgccggcgatcacctccgtttcttccatagatgattctaaagtcaggcaggatcttcttgcccggagaagaatcgcttggtttttgttgctggtgttgatgatcttcttcttgggcatgcatgcgtgcagctgcggcgctcgaggggctgaagagccaatggacgaactacccgttgagctggaactccggcgacccctgcggcggcggatgggacggcatcatgtgcaccaacggcagggtgacgacgctgtaagttacagccatctccttctcctcctaccaccaatatcatgtgatgggccttcctctgaaatcgtgccatggatgtctctggtttttgcaggaggctgtcaagcgtcagcctgcagggaacactgagcagcagcatcggccagctcggccagctcacgtacctgtaagcaccttcttctatcatcagttcatcacccagcttagcaaaagttcaaaacagcatgattttgcaggctatgaacttgggattttcgaaattttgttcatgcttctgtagcagttcagattgtgaattcaggcaatcaggctaggaacttctgattgaaccagtcaaggggcagattgtcagaacagtttgcttctagtttatgaactctgcttttttttttcttgaggcttagttcagctgaccagttcatgtttaccaatcttaagctttgactatttcggcaatgtgacatggattaggttcatttcttaccaaatgaaagaaacaaagatatgatgccaagttacaatagtaaatagatctggatgaaatatctgaagctttgactattttcgcaatgtgacatggattaggctcatttcttaccaaaagaaagaaacaagatactacacttgaagttaaattatcaatagcaaacgtacctggatgaaatgatccgtgacaaagttctggagtacaactaatttgtctaagaagaaatagtctagtagtagtagctgataacagaaacacttgcagggatctttccttcaacatcaatctcggtggtccgctgccagctgagattgggaaccttggggagcttacgacactgtatgcgccgcactgcccattgttgtcaacactactttttccaatcagaaataccaaactttcttactgatgtgcacaaatgctgtgtaattgtcaggatcttagctggttgcagcttcactggaaacattccaatagcaataggcaacctgcggaaacttgggttcttgtaagtggatatacctggtccacagtttcagatgataaaccctttttttcttttcttttgagtggattgacataatgaattcgtgccattctctatagggccttgaattcaaacaagtttagtggtggaataccgtcttcgattggcgtactcacaaacctcttatggctagacctggctgataatcaactcactggatctgtccccatctcaacatcaacatcaccaggcctggaccaacttgtcaaaacgcagcacttgtaagtaattttaatcttactttatggtattatcaattgagaaatatcagaatatgtaagtacttacaattgattgttttgctccaaacttcaaattgatgaacagccatttcaacaagaaccagttaactggaacgcttactggacttttcaactccaatatgactctcatacacatgtaagggatcgacaaattttcatgtctaatatgaataccgaatagatatatcttgctaacatctctccctatctcgtcagtttgtttgatagcaacaaattctcaggctcaatcccagctgaggttgggactgttagtacactcgaagttctgtaagtatcttgaaagttcacataggtggaactcatccttttattttctccaaaaaaaaaaatggtcatatctttgacttgcttttgtatctttgacagccgattggataggaatggttttacgggagcaatacctgctacaattggcagtttggtcaaactgaatgagctgtaagtgacatctgatcttaaaggaagagttatgacacttgaggcacctctcttgaaaatgttatcttctgcaggaacttagcaaacaacaagctaactggatcagtgccagatctcagcaacatgaccaacttgaatgttgtgtaagaaactaaccacccccatgcctcatcatccaatcatataatttgtctgcataactaaagattccactcttgaattgccagggatttgagcaacaacacatttgatccttcagtggcccccagctggttcacatctttaacatctcttgcttctgtgtgagttatccaaaacttttggaattttaaattttgtgtcgtcttgtgatgacaatttcatactcatctctatatgttttgatcactcagttcaatagtttctggaagtctttctggccaggtcccaaaggggctcttcacattgcccacactgcagcaagtgtaattttctggtaacttacaactcaacatataagctttaaaaaaaagtgtcttatctctgcctattttgtggccaatcggacagtgtgctgagcaacaaccaattcaacgggacacttgaaattacaggcaacatcagcagctcactgcagacagtaaatctcatggacaaccgaatagtttctaccgatactgcaagctacaagaaaactctactgtaagaacctgcaaactcaataagaaccaagaacaccatacaatcttcgtcttctctcctacctttcaccaacattgcctcacttctcatgccatatcctgtctgcagcctggcaggtaatccgttttgcgccgagcaagatcccaacaacagagccttctgcagcaggcagctacagaacgcgagcccatacagtaccagtatggaaaaatgcggctcagctcagtgcagtgatggtcagaacgtgaaccctgcaagctgcggctgtgctttctcatacaacggcaagatggttttcagggcacccttcttcgtcgacttggtgagcagtacgccgttccagctgctggagtcgaccatggcggcaaagctgaacctgctccctggctcggtcgctctctcagacatccacttcaacagtgacaactacctccaagttcaagtgaagctgttcccaacatccggggtgaccttcaacctgtcagaattgacaaggattggttcttctctcagtaaccagatttacaaaccaccagcaaattttggaccttatttcttcattgcagacccatatgcccccttggcaggtacttggatttcactgtgtcgagactcccactttatttgcactgaagtagttttagttttccctttgagaatgcagaggtatcaaaattacagcttaggaaataccacatttcgttatctgagggttggtatcttgaaagttttaattttttacttctaaattgcaattaatgagatgctaaaaggactctgctattttatgtcggagagtttagtatttgcacaaaagtactagtatatagtggtgtgaggattgctcactctgattttgtgtgtgccagttgctcttggtggcaaaaaatccaagatgagcacaggtgccatagctggaattgcagtagccggtggggtccttgttatcgccctcattttcatgtcattgtttgctctccgacagaagagaagggctaaggaactcaaggaaagagcagacccttttggtaaggatctaaaagctcataggtatcatgtcactgcaatgccaccaagcaatttgtcagggacacattaacagctacaagcagcagcatcctactgcatgctactactggaataaactgacaagatcaagaagttctgaaacaactgaacctgttttctgatccaaaattttcagcttcatgggctgctggccagaaggacagtggaggggctccacagctgaagggagcaaggttcttctcctttgacgagctcaagatctgcaccaacaacttctctgacaaccacgagatcgggtcaggaggctacgggaaggtgtacagagggattctcggtgacggaacccgtgtcgccatcaagcgtgcagaccgcaactcaatgcagggcgctgtggagttcaagaacgagatcgagctgctgtccagggtgcaccaccgcaacctggtcagcctcattggcttctgctacgagcaaggtgaacagatgctcgtctacgagtacatctccaatggcacactcagagagaacttgacgggtaaatccacatcccataattaacattgccatgaatctgattacacattttatttcgccatttcgtttgcattgctaaaatgattcttttatcaaatgttaactgaaaaggttttgatttgcaggaagtgggatgtacttggactggaagaagaggctgaggatcgcgcttggctcggccagagggcttgcctacctgcacgagctcgctgacccaccgatcatccaccgcgacatcaagtccaccaacatcctcctcgacaacaacctcaaggccaaggttgccgacttcgggctctccaagctcgtggccgacactgagaagggccatgtctccacccaagtcaagggaacactggtaaattcccctcactatccgctcatgccaatctcctgacagaactgaattttgagcctcacttcagtactcactaataaaaatctactaacatcttgagaaccaatcaaaatcgatatgcttaatttgaaatcaaacttgaagtaaatatggtaactaagcatgtacccattgcacttcaccttactaaccacttctcccaatctcaaaataaatcgataaaattcaccttactaaccacttcttccaatctcatgacaaattgataaaattcaccctactaaccacttctgcaagtctcctgacataactgaacttttaggttcgcttcagtaaaattcgacgaacatcttgaggaccaattgaaatagatatgcttaatttgatctgatagtataaagaaaacaatcaagattgaaacaaatggtaataaaatcgatgggatgtggctagggctacctggacccggagtactacatgacgcagcagctgtcggagaagagcgacgtgtacagcttcggggtggtgatgctggagctggtgagcgggaggcagccgatcgagaaggggcggtacgtggtgcgggaggtgcggctggccatcgacccggccgaccacgaccaccactacggcctccgcgggatcgtcgacccggccatccgcgacgccgcgcgcaccccggtgttccggcggttcgtgcagctggcgatgcggtgcgtcgacgagtcggcggcggcgcgcccggccatgggcgccgtggtgaaggagatcgaggccatgctgcagaacgagcccgacgacgccggcgccggggagggggacagctccgccgacccgtccgccaacgagttcgaccgccaccgcggcggtggcggcccgccggcgcacccctacagcgacgtggagatcagccggggatcgtacgccggcgatggcgcgtcggattacatgccctattttgaggtcaagcccaagtagtcatcattagattgtaaattgatgagggtgttgtttgtttcagtttttttttcctttgttctttctccttttcagcttgtgatgaattgtaaattttgtatgtgttgcgagttgcgacagattaatatatactgctacagattctttcaatttttcactgtaccaggtgcaattatacaaacagatcaattacgatacgaattttatatttggtgtttgaatctcgaagattaagatgaagataaaaattaagtgtttcacgtaaaacgaggtgattataatgtgtgattaattaagttttaattattataaacttgaaaaatagattaatctgatattttagaataactttcatatagaaagtttcagcataaaacgcacagtttagcagtttaaaaagcgtgttatttggattcgaacggcctcttagtaaagagtagattgtattagtagtacgagaacttgcaggtgggtacgatttagtgcaacaactcgaaaaatatgcagaccgatacatgaaattggcactcaagtgtattttggttaaaacgttgttacgtacatatgattcaacatattttgtttgttatattataatcataactactagattattggtcatgaatacaattgaatatgtttaactagtagaatcgctcggaaattatgttacaacaattcttatacacttagttttaacgatcattatatatttcggtttcaaatcgacaggatatttattattataagcaagcaaataaaatacatctagaccattattatttgataatcattatacttattagattattggcaacgactactgttttttttactatgtggcttaaaaggtgtggtgtctaatattattttttttagccagaatgcacatactagccaagttgttacacctaaatgatcattttttaagttgttacactagattgcacccacctatcaagtttatgtatcgtggacacaatttactctctagtaaatttcctaaaacccacctactatggttcaaatttcacaaaattccaactactatgatcctaaagtttcacaaataacactattgataatttgtattctaaagaaaaacattattgatcattttgattttaagctatcacaattattttgactttaagctatcatatattctggttttgtggttaaggaacataaaaaaaatctcactattaagttgagtgacctctgacgaacttattcttacatctatataggacgtcaaagggcccactaggcctcaccaagggtagtggcacgggcagaggacaaatttcataattaaaatgcccaatatggcaaattttgtggttagattaaggactccatcgaattattggcaatgttcaatcattcgaaaaccagcaattttcctcataaaataaagtaatactagtactaacctaatgaagccacgaaccttggttgcatcaatcaagctaacgacctaaatgattcgggcgccttccacacaagaaaaacacacatgtactgatgtacacaacatggagagggaaatggctacaacaacgcgcaagattaataaagcaacatattttgcctctgaaaggacggaaaagaattgaaaatattcattatttctaattttttttaactatatacacggttttagaagaattgtgaaaatatacgcgtcctgcgtgatgaaaacgtggaccgtgtgtttgacgtggcacgaaaatgcaagagcaacgatcgacgcgatcccgcggtgtgggcgcgtggaaccgcgtctgtcccgcatgccggttgagcggcaccgaatgcgggacggcatgcttgcatgcagccacactttcttgctggcggtcgtgcgccactggctcgcgggaccgctcaaccgacttacggtaccgcggcgccggttcgcgggatcgacgcagtcccacactgccgttccgcgtgaccgcctcggtcccgctgcgccgttctgcgcgaccgagcgggcgtcggctcacagcttgattccacaccctcgttctgcgtgaccggtcccgtacccatcattccgcggcaccgctcggcctatcggtcccgcgccgccacgttgcgctttcgttccgctcccgcatttccagcgtgtgggagagatatatttctgtaaatccttctcgcccacgtatataaacgcaaaatgcgaaaaaacaagatattttttcaaatttttttcccgaaaggacgaggttagcttacgaagttagtagtcaacccaaacgctaaccaaccaacacgcggaattttttttttattttttttattaaaagttttacaaaaataatttttcattttgaaaattgacagaagtggtcgcctaccgccctctaggagggcgatttttaaaaatcgccatcccagagggcggcgaaagtgatgtggcagacggccgttcgctctcgggcgacggccgtcaacgaaatttgcaggcggcccccttgccgccctccgctagggcgattttgtactgtgcggggggccgcctgcaaatgggcggcggggggcctggaattttgcaggcggcccccttgccgccctgggggagggcgattttatactgtgctttatatttttgtataaatatcaatagttatcaaatctttttatattgaaaactatacaagattaaaatctccaagactggtaaaatacaattttattattttttagggcctatttggaatgttaccgtacaaatattttgttagtgccaaaatataagcaagttttggcactaccaaatatttggtaaggtaaaattgcatttgatcatatttggtttgctgccaaaatgtaaaattgtagtgaagaatgttctacataatctcaaatctagattacgtattaccaatgaataggcttcaatcgaaatcaaacacaagtactattcaaattaccaaaatattggtagggcatgtttttgatagcaatccaaataggcccttagtcttacgcatacaaaaaatcaccaccataattaaacattgtaatgataagatagataagaagtgccatcgatacacggtacaaatttgtcgatcccgacgaatcaagcatgcggtaacctatcggctccttctaggtcggtcagaatgcattgcattctcgtggtccttcaatcgttgatactctacttgtgtttctgactctgttatcttctggccatgatatgatggagtgacattgtcgatccatcgagtaaatccacccatccttggattgccctgtaaaaatagtaatgttattcagtttgggtagtaattttgtgcaaatcatagcggattttgtaaatggttagacatacaacgaaatcgttgtctacattggggcagacaaaatatctccttcgaaatgtttgttcagcaaaggatgtagccacctgccagcgatctctgcacccacactttggacgctcggaccatttaggtaaccctaatggattgttcctccagtctaagcttgcaatttccacccgacgttcgtactccatccaagcatgaatgaactgtatggtcggttcaggttgcgttatcggcccgccacttgaagtaactctgactgtgtcaatccattgtacgaattgacatttccttacatcctcctatgtacattcattttgggatagttaagttaatgatagtactgaggagtgatgaaaagaatagttgtaattaccacgaaatcatcgtcgacaatgtttggacacacgaaacacctttgtcctcgagttcggtgccttacggaccttatgacctgacaacggtcaccacaacgacactccggacgctcacgccacgtggggagtcctaggggatttacgtgccattctaaagcctcagcagcaattcgacgttcatgctcatccttccgccttaggtagtccgatcttgtttcactacgtgggtaagcacgggttccgtcgttttgtgggttctccatgtctacccactcgatgaagttgcacattggacgatatgtctgcgtaagatgttacaattgtgtacgaagaagttagtttttttatccatttgaacttcgaatagatgaagcatacctgatcaaagttcgcgcattggaagaatctcctgccccgagtttgtatcatgagggaagacttgagtatgcatccatccccacaatcgcacaaaggacggtcacaccatggtggaaaccaaccagcaaaaggatcgcttcgccagttgagacgctcaaggaatggcgcttccattttcgtgtgttgtgtgctagtgggaaagaagatatgaagaggttgccttcagattgtcaattatatagcgtcgttttcactgcaatatatgtgaactcaatgagatacattattcattagatgtgacaagacgatcacgcgtgggcgtgattcactttatgtcaacaggcagcgccgaaagttgatagtgacaactcgagctgccgcttttcatgtgtgctgttgtggactgtgcgcgctactggatctgacactaccgtgaagcgccgaaagtgtgttgtcgtgagcataagttgttctagcaccatatgaatgaaaagaactatgtagacgagacaaacacaagtagtactgcagtagtaatagcaaaagtagtactgctttacaagtttgtaagccaaaagaaacggtcacataaggactgaagaggtagaacactactgacgaggcctcttacccctgtccctcctaccctgcgccctaatgtgcccctgggagtacgtgagtcagtccgggggtacggcacggccaacccgtcctgcctgtacaggtgtgacctctggctgctcctgagtgtgcgcctctggagctcctccaagctgagaggagcctagtacgtcgtggtggtgtgcaccgtgcaagtcgtcgtcgtagaactggctagtaggaccagtcctaccggcgtgagacgaagaggccccagtactgaagatcccggctgcaaatcctgcaggacaaggaccatcagtttcatacaggtatttaatagtattaataaaaagtaaagtaccgtgtgggcgagggatcgacgctccgtgagaggaagagctggcgaacgcgcccgaagaggtggcgaacgcccctgcggagctcgcggaagcgccggtcgtgcctgcgaacgcgctcgaaggcagacgaggtcctgcgatgaggaaacgtgccgttaaaacatggtgacatattcgtgcaaaagctgaaacaaaaatgaactaatctctgggctgaactgtaccgtgcgaaactggtgctgtaggtcgcactgctccgaagctaggggcgctcgaaggcaaacgaggtcctgcgaggatggaacatcaagttacgacggggtgatgttttcgtacaaaaacagaaacaaaacttaagaaacctctgggctgagcagtaccgtgcgaaacaggtaccgtaggtcgaggtcctgctccgacggtaggcgcgcgaggccgtggttgtaccggaccagctggaggtacgacgtccacggcgctgcgacaggagaagacgcgcatgaccgcacgcatcttctcctgcatccggtcgaaggtcaccctctgctcaacgtcagtcaagtgcaaacctctgttcaacctcacttggactgcggtgatatcggcactgatatcccgtgcggcatcagcctatgcaagatggaaataaaaaattcagtagttgtcctatattatgcaagataaatgaaataattgtaagaactaatacaaattcgacgtacccccacgaagtagtctcggtcacggtgcgtgggatacgcgtccgtcacagcggcaacgtgcggctctggggcgtctggagtgaaggtcacacgcgcacgagtgcgaggaaggtaccagcgaaggtagtcacggtagttctcctccgtgtgtgggaagagctcgttgatcacctcctctgtagctaacacccagtcgtcaacgtactgctgtacacgtggagcccaaagtgcgcctgctagctgtccccgtcgagtcaacctgtgaagagaggtaaattatatggctcgatgaagtaattatcataaaaatttagaaatgaacaatccgaactcacgagtggtcggcagggaggacggtcggctgcacgttgcccggaaacacctgcctaagtccgaactgtctcatcacacgctgcgggcagtgaggctcaacgaaaatgtcgaacaccatcggcaggatggtgagccagtaagcctggtcgcgtgtgcacaacgacgaaagtcctagcggtgctctcgcagcgacggcctcttctgtgtacggctcccagatgacgtcgctcggctggagacggtcaaactcgaacacgaagtccgggtaacctcgtctcacctggacgtgagcgtaacgacgctgcaataaacatgatcggaattagacatgttatgtgaagaaaaaaaagaagacgactgataaacttataacgcagcgaagttgcactaaccccacgtcgacaccagtaagtccccatcgtgggaccgtcctctggccactgcgcgctgcgaccaaccccgtagggtgcgctgtccaccactggtcgacctatggcaaacctctcggctgcccaaagctgaagcaacatagggcagctagcgatgatcgctcccgcgtctgtcttcgtgcacgcctcacagaggacatggtacgtggctgctagaacgtgtgagcaaggaaggtgatgaagcttcggcttcatacaactgcaggtacatccaccatccgccttcaagacacattcctgcacggcttgcttgcgatagataccacgcctgctcctatcaacacacattatttcataccgatgcacttgtgtgccttgagcaacaactctatgtctccgtgcctttttgattttatcttccatgtactttatcactacgttgccaaacactatgttgttatcggccatggacggaccaattttcttgtatcgatccctaaagtacgcttgcgtgccgtgaaggatgaattcaacaatagcaaccaatggaagtacccgaactcctcgcattacctagttgtacacctctgccaaattggttgtcattatgccataccgagatctatcggtgtcgaataatagagaccacttctccttacgctcattctcaatccactgagtgaaatttctgatggacgaccctgacctccttctcattgttggtgggtcatcatgtaatgcaccaagaggtatgggaggctcgtcaccttcaacttgtggtctgcgagattgctcatctgtttgcttcattgtcaactcatccaacttgtcccacaactcattaaatttcttctcttggctctgtgcacatagcctcttaaagagctccataagatgcttgttcttgaattgcttgtagaaatttgcacccatgtgacgcatgcactaccgactccgaacatcaggccacttagctggaagtcccttctcatcccaaccgttctgcaagtagtcaatagcccgcaacatacccgcatgacgatcatgtataaggcaaacgttgggcctcatacgcaccactgcaatgtgcactctctctaggaaccagtaccagctttcagtgttctcactctctacaaatgcaaaagccataggtagaacctggttgttcccatcacacccaattgctgtcaatatctgacctcggtatttacctgtcataaaagttccatctatgcatagaacaggtcgacaatgcacaaaagcattgatgcaagcacccaatgagaaaaaggctctttgcagcacactctttgttcgatcatcaaccgatgtaaatgtatgtaggtcatagtaagtattattattcctctgggcaatggtggctaacaaacgaggcaaattatcataagaagcttcaaatgtgccatacctcatctcaataatcttttgtttggctctccaggcctttgcatagcttatagtgtacttgaatttgttctcgatgtgcctaataattgattttggttcaaagccaatgttaccaacaacactgctgtacatctcacttgccacaaaagctgaagtgatgtttcggtgatacttctccaccccttgtaagtagcacttgtgctcggtcacaatgctaactttccaataatcattccatttacccttatatgcatggacacgccacggacaatcttccttcatgcacctcacttcatacacataatttgttgacttgaccaccctaaactctctctgcaaggaaactgcccaatgcttcaccgcctccttcatctcatccttatgagcataccttgcaccgtcaattacctcgttctccttatactcccagggtacatgatcaccctctgatataacaagtccagagaagtcctcatttgcccaatcagtggccattacatcaccttcctcatcggatgatgcgtcgtcgtccgcttcctcattatccgaatcttccctctccatttcatcaacaattataccgactctctccccctcatccgccatgcccatggcctgctcctcccttggttgattttcctcattttgcatcgatggtccaacaacatcccctgcattgataggaccctctacatcttcggtttgcattgaaacatttatatctttctcttgtaccgacacaaatataacgaggggccatgaccgttcaaaagccatttccacataccgtctccaagcagcagtgctgtccatcggcattagttcccaaaaataaccttctgttgcacgactcactacaactgatactgacattgtgtagacttcttggtctattctaaatcctctcaacaaccaactataaattgactgaaatgttctctccgcaggcctatcgatgcccttagatgtcattacaaaatctgacagatcaacaccatctggaccaaatctaatatttccttcaccgtgaactatctgaaatgtgaccttatttgacattgtgcctgatgaaaacaataactgcgttaacctcgcatttctgtactacgccctaagttacattctctacaatattgttctccaaaattctaaaagtaggttacattctccagatcaaactaaactacatcttacaattaacactactgtctatgtctcaattcatactattatattctatgctctggatctacacatatgtgctgtgtgctacagatatgctaaaatatatggaactaaaactaaaacgcaacatatatactcaaacataacatattagtacaaatgcaaaagatgtatgggagcaaacctgtgatgaagtgagcgaaccagcagggcttcgccgctccccttctgctgccctcccctctctctctttcgttttttttggatttttagtgaatataatgaaatttcagagaggggggactgggctttataggggggaggcaaaaatcgccctcccccagggcggcaagggggccgcctgcaaaattccatgccccctcgccgcccatttgcaggcggccccccgcacagtacaaaatcgccctagcggagggcggcaagggggccgcctgcaaatttcgttgacggccgtcgcccgaaagcgaacggccgtctgccacgtcattttcgccgccctctgggatggtgatttttaaaaatcgccctcccagagggcggtaggcgactacttccgtcaattttcaaaatggaaaactatttttgtaaaacttttaataaaaaaaattaaaaataaaaaaaattcccaacacgcgcgtcccccgcggctggttggtgggccggcccagtatatacagcgtcgcgtgggctctcgcaagccgtgggctctctctctctctctagtccgcttcttccctgagttcttcgtcttccccaacctcacgcgctctagcgcgcaatggcgaggacggggcggcgcggggcggcgccgccgttgctgctggcggcgacaacgccgacggggttctgcgagaccaatggagtggacggtgagttgatctctcagcactcactaccggcgaaaagcaaaaactgcttggctctcggctaatccttggagaaatattcttggggcagttgacgcgctgcggggtctgatgcagcaatggaggaactacccgtcgagctggaactccggcgacccctgcggcggcgggtgggacggcgtcatgtgcagcaacgggagggtgacatcgctgtaagagcccagctccttctgctgctaatcaccatatcacgcgagatcattagagttccggtcacatcatgacgaaattttttttataagttagaccttttaaaaatataattttattaagagaccacccggaaaaatattttcaaaactaaaccttttgactatgccaatagcagtggcgtggccaaacagagtggcggcaccaatggtcatggcatggcaagagctgccccatggcgatcgttgctgttgaaatcgtcaaccgggcgccaatgtggcagttttgccacgcccggtacttgccacgcccggtttgctggcgtggcaaactgtttaaatattttaaaggaaagtgtcatggttagtttgtaaagaaaagctgtttaaaagttcatgtgtgggattagtttgtatttaaaaaaatagtacttgacgaagcttggggctcctcaccgggagaccgcacaagcccccctttgccggttcggccgggggcgctaggtgagtttcttcaccctcgatctgtggaatgttcgcgagagagcaaaacgcacgagacacgggcgatgtagacaggttcgggccgctgagaagcgtaataccctactcctgtgttctggtggatctgtgtgtgaaggagttacagagagtcggagagcaagagagttcaggctctagaacccctcttcctctttctctcctctacgagctcaggtattctcagagtcgtctcagagtcctccctccctttttcgttctccatcatcccttttcggtgggcaaggtcctccttttatatctcaaggggataccacatgcaccacttctacctactcttcttttgggtggggacccaccctatcttgaccaaaaacttggctcgcgccttcgcctggaagctaaatcacagcttgtccttgagtgaggcccagcgccgtcactcgcctccacttcgccggaagtagatgcagcgtgggagcacggttgtctgccgatgacgtgaccggcgtcagaccagtcacagaccggtcattcttgtccaccacgcgtcagtttagcatgccgcacatctgcccttcttcatacaatgacttccttgtaatggttgcgatgaagcctggcatgaatctggccgggactgacgtgccaactccaggagttagcacgccggctccggctagggacgagtgcctggaggctctcatcattccgacgggacggggcgaggcgtgtgacaggccgcctgttgccacctaacccgcgatctgaccggtgtcacacactgcgaccggtcacggaccggacgagcgcgcgctgcgctgcattaaatgcggcgtggcgcgctcgtccaagccgcaataaatgcagttaggtgagccccgctgtgctcacctaacccatacacgtggcgccaaaatcacagggggtcggggcgcccctgccctcggggccgaaacgggagcggcccgacccctcggggagacagagggaggggtggccatgtcaccctcgggcccgacccccccgagggggtcaggccacgtgggtgaccgcggctgcccaagcttctagtcacgatacccccggtcccatgtcaccgacagtactaaatgggtaaagattggataaagtatatggggtatttgtgaggtattattagaaaacttcgtgtggttttgatggacctgttttatgtgttgaaaatatgaatggttatagggtgtgtttgcaagtgcaggatgggaactcatccctcctgcacgcaaaacggagcggctttttaacacatgattaattaaatattagctaatttttttaaaaaaaatggattaatttgatttttttaagcaactttcatatagaaattttttgcaaaaaacacaccgtttaatagtttaaaaacgtgcgcgcgaaaaacgagggagaggggttgggaacatgggtttgcaaacacaaccatagtattggcgattccttttcgtttgagtaaattttacaaaactacaggtattttgaccaaattatcacaaaactacagattt

SEQ ID NO: 5299 - DNA, 14912 bp, Oryza sativa
gaatctcagctgttggatttattttggagggctgagatctacgctatatcacctttaacatgcttatcctatgtcaccatctgaatccgctttttcaattcatacctcctgacttgtcagtgttttgcttgaaacacagaattgtggccgccaatccaaccaatgaagccgtggctacaacaacagagccaccaccaacggcgaaacccatctgtatcgcgtaacgagatgagagacatatgagctgcgagtgaacaaaagaaaagattttcgatttgagaaccgggtgagatgagagacgaacggagtggaaagagtgagctgctggcctccccgcccgagtgaggatacccagcgaggactccgcctgcgcacgggggatcccgcgtggcgagaaccccctccggcttcgggtgagaaggtaaccgatggcccggagcgacatggccgcgaccggagaagctccccttcttcctcctcctccgcccgcctccaatctcgcctagtcgccgagattcgattctagggttttctctctcgtgacttcccttcccgatcgacgtacgcacactacagttacggcccagtttgtaaggcccgcatatagatcccagcccaatagggctcaactataatgggcccgttccaatcgaacgagtaccacgcgtgcgtgtgggccctgtcgtcgagaaccaccgtcactacctgcacctgcacgggcccgataataataataaaaaagaaaaaggaaaaaaaaaagagaaaaatccaactaggcggagccattcgccccgcacgaactccgaggcgcacgaccaaatgcgcgccgccgccgccggccgcagcgtccgcctcctctaggagcgacggccaccaccgccgtatgagcctgtagcccggcgccgaggtccgcgagcttttgctttggggggtgggagctaagctttgctcccccctgtgcgtgcgggcgggggggagcggggatgaagggccagggtggcggcgcgggggccccggcgaagaggcggtggaggagcgtggcggccgcggccgccgcgctggcgctgctgttcctctccgtcggcgtgccgctcgccgtgctgctcggcctccaccagcgcttcccgtccagtccgtaaccacccacccctctctcccctgccaaaaccctacttttctcttcagcctctccgctcccagatctgggcttcccgtccggctcgccggctcgcgctcgatctaggggctcatcaactctctctctatgctcccctgactcgattttgtttgtatttgttttgtcttttgatatcacagtgtatttggccgacgagagcgccgtgtcggtgagtgtcaattgagattgaaactaactagtagctcatgcttaagccatttgatttgtttaatccattgctgttaagatttttgcctcatgtttctgttgcacaggtgtttggcggcagcgagggtggtggttgggagccaaatacatcgcaggtagggggtgtgctcatgattgccatttctgggatatttttgttctattacctgaaatgttccaatcacatgggggtgtggttaggtgtatttatcctaattaggtttggtcaatgatgactgatggggtactactgcgggaagagaatttaatctttagatcagtgatgcatttttttttcgcaggaaaatgacaggctgccagtcaacgacacgaacaaatttccgccatcgattgaaaaggtttgcatttgagcccatcggccgcagctgtttcttctctttgttcatgcgtgaaattttatccaagtagagtgcttgttgtgagttgctatcgtgccgattgtggtctcatgggtagtgtttgagtggaattgccttttaatacatggtccatggccccatttttttggaaatgtcagtctgcttttgccatatcatggatcttgtttcacatggccctcttttgcatttctactgcaatcaaggcactgtttctttccttttggcatgtaagaggctcagagctgaatggggttttgaacttactaactgtttgtcactatgtcccaaaaattgcattgcatcatctgaaaatcttgtctatctaccgaaacatgcaatttttttttgcgttacctaattgatttagttgttcgttcacaggactggagcaaaacaaataccggtaattctgatgcagaaagcaatgggaccaacaatcaaccaagtattgacaaaccgattagcaatacctcaatccatccaggtaagcagggcccattctttgaccacttatttagttttaaaattttaaatatcaagttacagctttaattcttcttgtaatgtgcaggccttcctatcaaacaaatcgtgatctttgatgatatatcattactgagtgtaagagctaatatgctttacagttatttttaacatgcccttgtctgttcgtgcagtaaatatatatgctgctttcgcatgaatttctgagcagggcatgtgatatgcaccttgcttttgcaatattttaaagaaacatttcaataatcctttgtaacttgtttgcggacttgcagaattatcatatattacatactttttatttttcacctaatgttgcagaatactgatgctgatcctaaggacaattttgaacaaggtttacctggtgatgagagtataaaatcgtgccaactagaatttggaagctattgtgtttggtctgttgaacacaaggaagtgatgaaagattctgtagtgaagagacttaaagaccagctctttgttgcaagagcttactatccaagcatagcaaaacttgaggggatggaaaaactttcacatgaaatgaagcaaagtatccaagagcatgagcacatgctcagcgaagccatatgtgatgctgatcttcctgcattgtaagtaatcttccagaaatactttctttagttctcatttttaagctatcatctttaatccataaggcactgctaacttcagaaattgatattttaccatacatgaaactgttgggtatttaagcagcctgactttgcaccaaaaatggtctacctactaactgttgtgcttcactgtttgttttttattttcacagattttgatatccactgtcgtctaatatgcacgtatacaagataacttatgcataattgacagcctacagttgattgagcattacctgaatgattccttaggattatctctttcatcacctagcatgttcgtagtccttattattttgtgaaatgtattaacactctgtagtttgatcgaataacattgtattaagctaaaagtgtgatattgggatgaataatttaccaataattgtagcagtaagttctaaatgatgagtggactgatgatctgatggctcaatgtgttatacagattcactttggaacagaaaatttccccataggtttagagtttgctataatgattatttgttttgttatagtgattatttgttatttttgaagccatggagccaatatggcaaagatggagaagacaatagctgcagcaaaatcatgtctgatagaatgcactaattttgagaaaaaactgaggcaattgcttgatatgactgaggatgaagctcattttcatgcaagacaaggtgcatatctttaccggcttggagttcagacattacctaagagcctccactgcctttcaatgagattgacagtagactactttaaatcctttgctgacatggagtactccaatgtgcaaaagcttgaaaatccagttctccggcactatgttattttctctaccaaccttcttgcatcttccatgactgtcaactcgactgtgataaattctgaggtatgatattacttttgttgtgtagaccatgtggtctcttgaaatttctgcatcatgacactcaccagttcttttcagtgtttcaggaatcagcaaatgtggtttttcatcttgttactgatgcacagaacttttatgcatttaagaattggttcattagaaattcttacaaggaagccactatcggtgttctgaattttgaagatttccaagcaacacatttggataataggagagttgaacacttatcaccatatgaggagttccgcatcgcttcccatagcaatgcccgaattccaaatacccaaatgagaactgaatatatttcagtgtttggacactctcttttcttgcttcctgagctgtttagcaatcttaaacgggtgattgttttggaagatgatactatagtccagagagacttgtcacacatatggaatcttgatttgaaaggaaaagtgattggtgctgtacagtcttgtcgagttagattaaggcatctcagaccatacttggttgacttcccatatgatgctagttcatgtatctggatgtctggagtgagtgttattgatctcaataaatggagggagcatgatgtgactgcagttcgtaatcgagtactccaaaaggttagtattgaatagtgatgcttagcagctgtcttttcttctctctttcaagaattgtttttaagaaactactttcgatgttatatttgacataaggcatattcctcatggctatactcttgattttctgtttgtgttcaactgaacttaccctactgtaccgtgatcttcactaataagataaacttgcttgaagccttgaagtttatttaagatatgtattttttttcttgcacgtttggcctgttaagcgaagagctgcaaattcttaactgatacggttgtgcctatgtctcacttttgacagctgcaacatggccctgaagcgtcatggagagctgcggtgttacctgcaggcctgcttgcttttcaaaatctggtccatcctattgaagcacagtggatccagtctggtcttggtcatgactatggagtcaatcatggtgctataaagaaagctggcatattgcactacaacggcaacatgaaaccgtggttagaactcggcatacggcgatacaggaaatattggagaaggtacctgccaagggatgatccattcttgatagattgcaatgtgaatccatgaacaaggcaattttgttagtcctggagtccggaagtccatgttcgacgaacagcaccaccttgtgcgatagcgagagttcactgtatgcgggaaatttgatgagaggagaggggcttcagtgagcaccgcccaaactactgaggatctttcaggatgctgctgagatatgaagtaaaattgatttttttttgcaaactggtcgtctaccgtggtatgttgagtagtagttccatttgttcattgatcaatgtacagtgaggattggacagatgctgattcgtacaccagcatcacaaaatgggtgagggtgttgtagtttaggagagccttttggggcttgtagattcagtagattaggatcatggggcattaacccaaaaaaaatactgcatatattctgtgcccgttctgttgaaaccatgcttggaattcgttgactttgatagtactcatacccttgcaatggtgcaatattcatcatctttctctaaatgaccatcaagatccatagctcatcttatttcctgaagtctttgatgcaactatccaactcaggccgttcttcatttcttggggctgcaattagaggttaaaaaaagactaatggtttttattaaatactaatgtatagtttgattcgggatgatgattggcagtagagtagggggaatttgaattggaagtgattgatatgataagtagtactacaaagtgataaatagtactctcttcttccctaaatataagagattttgattggatgtgacacatcttagtataagaaagttgtccacattcattgtactaggatatgtcacataaccaaaatatcttgtatttagagacggacaaaatatcttgtatttagagacggagggagtgtagtgtaaacattcttctttagatgcactatattatactcagtgcagtaaaaaaattgtatacttgatgtagaattgtggatacaagcatatataaggataaatatacccgagctggcaactgacgagttggcccaggagccacagtagtagtagtacaatacattgcatatgtgactattcctacgtgggcccacttgcaagagaccagtctggctttggcacgcacgggtgattagcttagtgcttaatcaccatgtactttgtgctaatcaaaagggattaaaactagcttcgattaagcacgcgcgtgaggcggggagcaccacgtccacgcggacaccgcgtagagcggcgtgcccttccaccccagccgcaccgtgccgtcgtggtctcccgccaccgtgtagcccagcccgcccggacacgccgcggccaccagctgcgcgcgcccgccgccgccgccgccggcgtgcgcgaacccgtgccgggcgagcacctcccgccagctcccgggcccctcccggccgctgctccgcgccggcccgccgacggcgagcacgttcgcgatctccctgccgagcacgccgtgctccgccagatgcctgctcgcgtcctcgccgtccggccgcgacgcgcccatggcgtcgaacaccgccgagtagtggtgcagcgcggagacgaacctgtccaggaagcgcccgtggccgccgccgccgccgtgtgctctctcctgctccacgagcgtcaccgcgccggctccagccaccgcaccagccgcatggaggcgccgtcgtcgccggccgcgtcgtacatggcgtggcgcagccagtgcacggccaccgcctcccccggcctccttccgggcatgtcggcgaccgcgtcggcgtctcccggtcgcttcgcgacggcgtagaactcgaaaaacatgcacagcttcctcgccagcccggcgagctggttgccggtgtcgtgcagcaccgacgccgacatgccgaagccggtgacgcggatcaccggcgggcctcccggccgcgccgccagtgccgggaggagcgagagccactgcagcgcgccgccggggacgacgtcgaggtcgacaatgtggacgaggcgcttgccgtggaacgcctcgaggatggcctggttgcacgccaggtaggcgagccgcgcgaacggcgcgacgttgtacagcgcccggaacgcggcgttgatggccccgcacgacggcggcggcgccatgggcgccacgacgccgacccacgaccccaccagccgcgccgccatggccctggcgaagtaggccacgagccgctcgccgcacgacgccgcgtacggcgaggccatctgcgacagctcgagcagcgccccgttggcgcccgcgaggttgcccaccgacatcgccgccgcgcactccatcagcagcgcgatcatccgcacgccgtgagcctcctcctcatcctccaccgccacctgttcgacgtcggcccccgccatcgccacgcccgtcctctcctccgccgcgccgccttcctcggagtacacctccttgcacgctcctaactccggccgttgctcgaacgtcccggccgccgccgccgccgccggcggctcgacgaactccggcgagtcgtcctcgccggcgcaaccctcattggcttcaagaaatcggtggtgatgggacaacaaaggctgctgcagtggcaggttgctgctactgctgctgtatagatactggtgatgatcaagaaactgcatcaagcctagagaatcttgcatgtctgaacctcttcccgtcataagttgatttatcaaggatcaatcaatcaagtagggtttctgcatagctgaagatgagtggagcaagagaaagcaatgtgcttatatatactccctccgtctcacaaaaaacaaacctaactggatgtgacatctccagattcattgtactagctagaatacatcacattcagtactaggtttgtattttgtgggacgaaaggagtactttttgtggcaaccagcagaggctgcttgcttgtttattatcaaccgcaatcaaattttaaattttaaaacttaattttagaatattagctgtagctcaaataaaatgtttccattaccttaaaataactatagtgtgtgcaaactccgtagtatccaatacgtaacttaaaatattgaatagggaggatatctagtcctctgtcttttccgaattttttcataactatttatgtactttacaattggaaagagattagagcgccctagttatcatttgagtagtattactaggtcaacctggaagctagtggcagtgtgagagcaatctacacggcaggaatctgcgaaacatcaatctgatgattctttggctgtattcagattggccagtgtaagcttggccggtacaatgagccagcagagctgcatggttttggtaagagtctttggtaattggttaattagctcatagtttcactgaatatttaagcagctaatgatcatcctgatcacatgtgtacatcaatccggtattttccagaaaattcagaggtaaatttattggagcaaagcaattctgcatctctctactagtatccaacaaagctcctgcaataacagttaagctcgacattgacacttcagattacaagattgattgatgaacaagtcattctgatgtgtaatcttgctaaggagagaaaaaaactgggtaggatgttaactcctaagaggtttcagagtactgacatttgacgattgcgatgcgtaattttctttgcttttctcaaggaaaaccgaaaccgagctactagaacccctaagaattaatcgaagtcatcacatttcatgattgtgatgtgtaattgagaaatgagtaagaaaatagctttgaagcagtagcttcttcctaatggcgagctgatagatcacttggtgatcatcgctagttgaggacgagtcgacgaggagctaggctgcgcttgcaggcagcgaatcaatggctggcgatatcatcaaccaatttggccagttagcttgcttaattcttcagctactaattgagtaattggccggactaattggcatcaagcagcagaattccagcatcaatctgccggtgcctccacatgtcaaactcatcgtttcctatgtgctattacacactgaactcatagtagtttgctacatgtttaattgtggtctgttaatttgacctggtattgttacaaggccatgcgaacatatttatatatgtatatatcctgctaattaattcaggctgacaaggccatgcgtagatgtaccgtgctaattaattcaggatatatgcatcatcgatcgatgacaatgtaattaaactacgtatatatactgaagctgatgatgcctaccgcttgcctttgtctgcacttacatggacgcatccaggagatattgcagagacaaacctggcaaacagacgacgatcaggaccaaaatccaagtgattagtgactgattttgcatttcttttagataatactccctccattttaggttataagatgttttgagtcaaagtcaaattgattcaagtttgactaagtttatagaaataaaatagtaatattttcgacccaagataaatttattataaaaatatatttaattattaatttaataaaactaatttggtaatgtaaatttactatatttgtctataaacttagttaaatttaaagcagtttaactttgactaaaggcaaaatatattataacctgaaacagagagattataaatgtattacatcttggcctattccataatacacggtcaatgagtctttaaaagaacaaagaaaaagagtgtgggacatatctactcttaagtaacagattttgtacgcacgagtggttttcaaataatcaattgattgattacagtttagttaatcatcaaacaagcaagctagtaagcatttggcttccagacagcgttgcatctccttttacccaagtcctaatctgtcttgacgcattgacttcggttggcgctggacatggccttgaccatccccttgcagatcttccggaaccagaggaggttcatcgccgacatcgccggcggcaccgccatcatactgtagaaccctagcgggaacaccgtcctcacctgcaaattaatcgaacagccaggaactaatttaacaacagactgtcacaaagctgaaccctgaagagaagacgattggttgattatgattacctggtcgaagtgaaggtacacatgagcgaagaagtatacgaacagtatgacgcgagcaacctgcatacaagaacaagaagatcagtatcacttggagtataagtgaattgttagttttttttcatcattttaatatttgggttgaattggtagttatatgcaactcaataaggtatcgttagtttaaaaaaaaaaactcaataaggtatcggagctacaagtctcaagttcaaatcttgtcggacgcacacttaaataaataattgcagcttccattccatgtctgagcactcaaaaaaattcaggcatgttttgtttttgttgttatttactatcggcttagtcttttatatgaaaattcaattctgttttttttgttgtttacttattggcagtcctttagatgaaaattcaggcgtgttttttgatgaacaaaagatgaattggttggtgcatggaaacatttacaaagagaaattataccagccatccagcaaacagtgccaccccgttgtacaggtaaagcttggagtccttccggcctgcaagatcaaggtacctgcattttcagaaagaatgcatgaataattgtgatctcagacatgaacaagcaagatgattaatgagcaatttgggaaaactgaatgagtattaccatctgaggttcacgaagggtgtggttgcttcagtgatgaggaccatgaggatgtacacgtgtcctttgccactcaacagagcaagagagattgcatacatggacaatccatgatgcaagagctgaacatatcaatacaatcagaatagattgttaacttgtgtcacctcaaattgtagtaaaagaaaaagggacaactcagaacattaacacttacatattcctttcctcctagagaagggaaatgccagaggatcatcaacaaatctgtcaagaagtagcccagggatacctgccaataattaaaatttcagacattttgggacagatatctttctctcttttctccatggtttcctggatgcgtagggctgcaaacttacaccaaacatggcatcagacatccatgattttcgatcaattatgatggcaccatggacgtccttactgaagaggtcagatatcaccagcagataaaaagagactacagcagcaactaatgcgtggaaggtagagaatcccctaaaacatggataaacgagttgtaattactagcatgaagagaagtgaatatgcatcgctactgttagttgatttttagataatactgcaattagtcgataataagaacctgtcaaagatttattgaaaaagacctgtcaaagaaaaagaaagagaaaaacaagcaagctccaattaatcacctgttgttccactcaagtttgtgcaattcattcagtccattataacccttgtagcaccgggagctaacttcacgagttatatcatatacctataagaatggagtagaagctagtcagtgcctcagtggcataatacaaaatataatgcagaatgaattcatcatgtaggctcaggaacaattgatccctcctctttttttccctatgttttcttgttaccatttaccatgcatgtacttctcaagctacctacctagccttttgacaagtaaaaaaaaaatgaaaaaggtaatctggtatatctcttcacatactaatccgtattggtgatggaggaattcacaaattataaaggtaatctggtccttaagcattattgacggcacgattccgttggctacctcctcgactgtgtggtactaaatgctgacataagtagtcttcaaaattgaaaaggagtagtgattcataattcactcatattcagtaaaaaaaagtaataattcattcatatttttaacaccatgtatcacccaagtagcaactccttccattcccgaatattttaaaaaatgttagattctcttatgatggaaaattgtgtgattatatttttcacataaggtaatttgataatataatatattttgaattgttttataaattaattaacggaaaaagattagtcaaagtttgattgtgaatagtgtttggtgacaagtttttgggaacggagggagtatcaaggctagattgcattcaacaaacgtctacgagtccaactaagctgtcactattagttgctttgctctctgcagaagttaggttcagtacttgtaatggctggtctgcatacattgcaagagtttttacagtcgaataatactattcttcctacattaaaaaaagaagaagaagaaaaggtgggacgttccaagcagaaagactgagctatggaagtcaagtgcagattgatggtgatactttgccctttttggatctcaaaagttggatgatagaaatgcataaattaatatcagtactgaggaacatttcacaaattttctttttataacgaaaaaccgaaacctgatttagtagttcgacctctaaaaaggtaaatacaagatgggattgctcatctcactagagaaaatacactttaggcagtttagctttaccgtgaagatgcaaatttgtagcaaaattttagggctattttgtaacgcacgattaaaaaaaaggagaaatagaaaaaacacacatgattgcaaaacaggttgtttgattaggcagtaggagataaaagaaatatagtcaaaggaaattttcaaaaaagttggagctctttttaatttttctaaatctctataatattgtccatttcgtaggatttttttttttaaaaaagattgatttcaaaggccttcataggaatttcttcaatttcttttgtacaatattgaaatcctctaagtatcttatgtttcctctacaaatcaaagtaggacttactgggaatgcactctcgtatctagctaagcaatggaagagatcgatggaacaacttaccgctgcgcacatgaggatcccagcaagaacagaagccggccacacgatctgctcctcgggcccaaacctcacatccatgtccaccgctgccaaatcactctgcccttcgatctcctccttcctcgatctcggcggctggccgttcggtcgagacgatgaaaagctccccaaatcaacagaagccagaggatccaatccttgcagcaagcgtttgcaagtcctcgaagagaggcgccccgggcttaaatgggcagagctcgatcgccatggatgggagtcgtgcgcggcgacggtgaccgagggagacggtggacgacgaagcgagctaaccgattgagtcgtccgcgtacaacaccctctcttcgtttttttttctccttccttcaaaaaatcttctcgcgtcagccgccgtcgcgccggaccgatcgacaacttagacctgactccactgggtcccttgactggtctataatactgttttttttttttttaccaacggctacaacgaatgtcaatgggaaaatatatatatatatatatatatacacacacacacacacatatatatatatatatatatatatatatatatatatatatatatatatatatatatatatatatatatattcgaaatctagaaaactgcctttgaatttaaatatgaacgtctaagatttattcatgtcaccaaacaataaaaattttactcgcaaattcaatcatgagtaaaaatgttgggagtaaaatttttacccttgatgatatggacaaatatcgggccttcattttttaatccaacgatagtttctaggttttcaccacatatataatttgtacttcctccatttcaagttataagtcgttttgactttggttaaagtcaaaatgtttcaagttttatcaaatttgtagaaaaaaagagtaacattttcaacccgaaacaaatttattttgaaaatataatcaattattgatttgatgaaactaatttggtattgtaaatattattatatttatctataaacttagtcaaacttaaagtagtttgactttgaccaaagttaaacgacttatctatactaatataaaaaggaggagttgtacccctccaatcctacatgccaaatcacccggatcaatccctaccgtccgtccgtcatctaatctaatctcatccatccatccggtgaaatcacccagaccgcatctaatccatccatcgtccatcgcccgcgcaatccccgccaccacatcctccccacgctaacagaggcaccgcgcgaacaacacatctgccctatgcgctcactatgctgtcacaccctaatccggcaccgccgtacaacggcacctgacaggagcgtgtcgtaggaataacggcgcgaaccacttcctacgaaaccgcgatctcagtaccagtcccaggacatagtgctggtacccacggtgacaaatatgaatcattgcaaatccttaaaataaatagaggacttatttaccttaacttaggttgcagctcaagacagcctgagaatacaaccgaagacacagacgaggaaacaccagcaacagcagcagcagcggaaccaacggtctaacacccaacaccacaggcgacagctgggaaccaggacgaaaccctaatcttcacttcacttcatctttacttcaaggcggaggaactatatatatttatatagagcaaggtgagtactttcatactcagcaagtcacggggacttaggtgtttaatg

SEQ ID NO: 5300 - DNA, 46607 bp, Oryza sativa
tgtcaatggagatatcatccaaattaacaaatgtccaatgctgtcatcgcaagctagtgcagtgttagttgggcggcacaagcaagcaaacaacgagcagtttagacattctgaagcgtttgcataatgacaagatttgatttcgttgtttgttctcaagtgatgtaagaactagaaaacttttaagattcctctaaagaaaaagagaacttttactatcgctgtgatgattcaacaagatttgacatgcgtaaagttaggtattcctttcgtctcaaaatataaaaaaaattaattgaataggatacgttctagtactacaaatctagagctatttataagatatgtctcatcaaaccaaaatatcttatattttagaacaaagggagtaattagagaaactataagagcatgtacaatagtagactataagccagctataaacatattttaagaagataaaagagaagagataagagcagcgggctacagatttgtagccagctgcagcatggactccaagatacatgtgtgtatgataggtgggatcagacattaattatgtagcacatacttaaagataactatggtatgaattgactattaaattaactatatatgatttggagcccataatcggctatactattaatactattaaacttgctctaatatacagtttaatctggcggtaatgcatgcatgcaagaaaaagtgatgagccatatgtgcgcaggtgattgatttggcgtcggttccaaacacatttaaaagcaagtttaatagtatagctaactactgactcaaaattatctgatatagtcaatttaatagctaattcatataatagttatctataaatatatactatattattaatatttggtctcacatgtcatacacatattgcgttttggagtccatgctgtagctggctataaatttatagctcgctgcttatctctcttctttcatctccttaatatgtgtttatagctagtttataatctgctattgtacctgctctaaaaacatgattgtggggttatgtgtagtataataagcatctgcgtgtgaaagttaaattaaaaaaagtatgatcaatctattggaaattgtgtcgatagccaactattatatgtatgatctcttggtcacctgtaatatgacgtaacgcttttaattgttgacagttatgtattttatacactggacccttttgatttggaggaaaaacatagaaattttaagataacttttatcctatagaaaagatttcaaagaatggctttgaatcaaaggattgaatcatatccaatcctttgaaattcctattgaatagataattctacagagatttttgtagaaaacttagcaagagctcaaaactcttagaaaatttcctttgagtttatctttctcatatgatttttttcctacggtacaatcacatggtatttcctgtattttaaattatttgttttacacttctatttctgttagaataatgggtttttcctattaattcgttttcttgttcctactatttaaattggccctaatctctttttttaaaaagaaaattgactctaatctcttactggcgtactactccgtcccagaaaaataaattatagctacgaacctgggcacatatatgttcaagttcgtaactaggattgttttttagactgagagatagttattcaagttcgtagctaggattaggattgtattttttagatagaggggtagtgctgctgctaatagcattattacgttacccagaaaggttaattattactacgtgctttgatcatgattgttttttgtggcagtaagaaaatttcttgtctttgaattcgagtttagtggatgcatgtctgcatattgcggctattgccgtactactcggctactcctgctttcagatcgatttaatgtttggctgagtataaagtttaaattttggttaaaattagagatgatgtgactgaaaagttatgtgtatatgatagattgatttaatgaaaaatgattaaagtttggatctaaactttaaatctaaacagcctgtacagtggccgtggaccaactgaacgtacggcgacaagtggcatggctcactagaaaaagaaaattcgctgtcagcttcactccggatcggacggccacgcctccagtccacgacttttttgatcgcacgtgttagcttttaaaactactctagctcgggtcgcacgtgtgaatggaagctgtttcgttcttttgacctcatcgattttgtggagcaacagtacacgcacgatggaaaacgcacgtcgtttagcgagcgtgtctattgacaacccattttaagagcgagccacggagcaaagagcgtgttcttaatactctggttgagtttatttgttcacgtttttcacttacttctctcgtttttcatgcgtatgttttttaaattgctaaataatacgtatttaaaaaaattatatacaaaagttgtttaaaaaatatattaattcatttttcataaaagttcagctaatacttaattagtgataagttaataaattacttcattttacgtgcgtgagatgttagttcctaacctcgatcaactaaagaactcaacctaattaatgtttttgatttcgccacgtaatatagctctaccttattacttttaagggattttcttattgtgatttaaaagagttgtgcacttcactgatcggtctgagctgactcaattaatctatcaattctaaggttcggtttaagaaatatactctatgaatgaacactactacagatcaagcgatcgaaatcgatcttcgcctacggttaaacggtccgtgatgcacgcaggtgtttgtaaaaatcagtattgtctcgtgcatctcatccttgttcaaacatcgacatttgaattctaaaaccttaacatgtggctatatatgccaccttataattagtgggtggatgtagtgggagaaatcacaccttaattagtggagtggatgtagtgggagaaatcgcactacatggagatgtttgcgtatatattcttcctatttaagatagagaacgtacgtatagaaactcctcgtgtggcatggcacgtcctaccctgttcttaattgttctctactgaagtgttgcgtgctcatcgtgaatttagctagacactgcacttacatgataaaatgaaatgatttgatcagtctcactcgcatttcattctcacggaggccggccatacgttacggcgagttagtggcattgtcaattcgtttgcaaatgcaatgcgtatccttgtcaattaaattgccgtcttgttgaaaaaacgctgataatgtgtggtgtatgcatgtgctaggctagtataacaatacggcgctgaaaaactgaaagttgtcccagtgagagcgaactgaacattgacggtcaaactatgacctttgtctcgaggagattaaaattacgagaaacagtgggtaagaatatggagaagccaacttttagtttatagtttattttataggttctactagggttggcaacggggcgggacggggcgggtgcgggttggataggaacggccccgcctccgcatccttgagggttcacccggccccggccccggagtgaggaacggggcgaaatcaatccccgcccccggcccctccggggccccgcaccatttccgggtccccgcacccagatacaagcggcgactgctagcagccgaaggaaggaaagaatggtctgggaaacttgcagcagccgggtggaggaagggaataatgatgtggggaacctgcagcagccggagggagaggaacggtcggagaaggaggagaacagcacaggcgccggcagctggagaggtaggagaacgacatggggcgtcggcggatggcaggatggggagacggcgtccgtgagagcaacgatacgggcagcgtggaagagcgccgaccgccgctacttgatggtgcgggaccaactcgcgaggcgtgatttgtggaggtgaggaagcgccaaagcggcgtgcggcgtgtgatgtgttgcgtgatttgtgggatagcgtcaaaagtcaaaactactggaacgagaatagagattggtggcggcggcgacaaactcacgggattgattttacggcccgtttggttggagggagtttttaagaggaattgggattagagggatgaggctattaagtattttgtttggttgggagacatgggaattttggtgggattgggatggggaattgaggaagaaactccctccttttcaatacctgggtaggggcaggtaattgggagggaatttctcctttactttgtctaagcaaatctcagccatccgtttttattaatgagctaatctccaactaaactccctatcagtttctatcacatctaccaaacaagacattgggattaaaaatcaaattcccatcttaatctcatcataaattccctcgtgtaaactcctaatccccttccctcaagttaccaaacaagtcttagggttggcttctctttactgatctgtatatatatatattgggctatatgggcctaaatttgattatgggctgtatgccatattttagatccctatattccggggccccgtgggtcacccgcgggtgagcctgtggccccgcccccacccccgcatagttccggtgccccgtccccgcagccccgcgggttgaaatttcgccccgtccccgtccccgtaggggtgggtacccggcgggtccccgcccccaacgggaaaattgccatccctaggttctacagctacagctttttagaatctgaatgaaaatctagattgtttgagggaggatttgataactagtgcttctagaaaaatcttcagctactaaaagcttccccaaacaggctctatgtccgttctttctagtacttcatagaactagtaatttacccgtgctaatgctacggtgtaataatattttgattaataaattatattattaaatttcatgttagtcaaattacatttctagaatcagtctcaaatgttaatttaagacaaagagcaaaaatatcatattgtctgaaaaaaaataatttaagaccatcaactatatctaggctaaattctttcccacgagtctttaaaaaaagtatgttttcatgaaaataccgtgttgtactgcattgaaagcttttttgttaactttagttatcaaatatttaatttagttttataactaaatttgtaaaaataattcaataaataatttgttttagacgtgggcaagatttttttttactagataggcaccggcgaaaatcccggcatgacgagtgcgcaggtgtggcggtggccggccgtcgacggcgacgcttcatattgaagactactagcaccgtggatgctcgccggccgttttgcccctcagcttgtctgctggcaaagtcgtagactaaacagatggagtagtaaactaaatcacgtctactatttatttttttcctacttaaatattaattaaaattttaagtttgatcgaatctatagaaatgaaatgagtatagctcaactagattacttgtgatggaaacagctcatctgagctcaaatcatagaattgacatatatacttgtatttacggctaattatattttcagtgataggcgacttacccatcgacagataggcactcgtggtgacttcgttaatctcaggatatgccgaccaagtcttctatcgacacccatagtgacttcgtctcatcaacctcaaaatatatcggtctagtcttctattgacgcccgtggtgacttcatcgatctagagatatgctggtccagtcttctggaggtgctcataggagtgggtgtgtgcacgttttgagcgcatgcatttattctgtgtttctcaaaaaatatagtacacgaaacaaatatattatcaaaatatattaaatgttaatgtgtttctagaaaagttatagaaaaatataaaaaaaaattttgacacaaaataaatatattataaaaatatattaaatgttagttttaataaaactaatttggcgttattgaccttgctaacttttttttaataaatttggtcaaagtgaaaacaatttgactacgaaaaaaaagttagtaccaaatatacgcacttcaactcaaatataaacagaccctagtaggaagatgctctctcagatgatgtaataaaaacgaagagctattacaaaatggggaaaaaagatggttaagcatctcgcagaagaaaatgaaaaaaaaaagcctaagcaaagcagattaggatgggccacgggcccacggaccatacgcataggattcaacctgacggcccacatgccgatggatcgggcccatataggcctgttcctaacttccccaatcttaagcccggcccactcgtgagctctcccccgtctcataagaaaccctcgcggagcacacgctgctcccccctctccctcccgcgccgccgccgccgccgccaccgccgcatcgccgctgccgacggctgcgctccgaaggtatcgcgtcgaaatgctcttcgtctcgcctctaccaccgccgcagatagttcttgcagcgtctatgcctctgctgccctttacatttccctcgagcgactagaagaattagggcgggttggtcgttgcggcggtcctaggctagattcgagaagaagaagaagaaatgccggagatccttgagcttgtaaatggggatggtttcttcttcttctctcttatagttgatcttgacacggtgtagtgcggtgtatatacatctgttgctactcctttggaggcaggattccggttttcttgagtatgtgacaccgtggtgattccgtttgatttgatttaccatggctagctgcgcttctttgatagattctggattatttgcctagatgcgtgtgaaagcaccggtactgaggcgctatggccattgtgatggccgtagcagcctattcttttgtgtgctatatgaaccagggaacccgctttgcaggggagatttgtcccatgtttcttctgccagtagtcgcccgacagttcacccctttctggggttctggattcctagtcatggatggtaatccgatgcgcgtatgaactgcaatgtttctggttctcttgagtgctttgagcatttgaggaaccttgtgtgtgtcgcacagtcgcactcaggtgctatggcctttgtgattgcatagtagcctagttgattaatgtgcaagatggaccagggtagtatccttgcagcaggagctaagctaagttgattatgcttctactgcctgtagaatccctacatttttaatagttaaaatttgagatgattaccctgtctgtgtattgtcgatatcttgatgtaggtttttaatgttccatgattacctctgcacaattttgttttctggattctagtcctgattcctttttcttttgatgttggaaatttggcagaattctgtgaggatttaagctgagaagatggtgctgaagtaagttcctgtgtatattttgttgtttcaatatgattgtagattgttttagtgcccttttatcctgtgcatgctctaggctatgtagttttttggttaatggtagtaaaaggttaatagcaatgatttaccaatgagtactatttcatatttggaaggtatttcaactattacttttatttttatcctacaggacagagctttgccgttttagtggccagaagatatatccagggaagggcattcgctttattcgtgctgattcacaggtcaggctgttcatcgaatgattgctttaatgtcaggatatttctctgcttagaaggttgttgtaaacgtattggtatattgtacaggtcttcctttttgcaaactcaaaatgcaagcgctacttccacaaccgcctgaagcctgcaaagcttacctggacagccatgtacaggaagcagcacaagaaggtattgtatctagatttaggcgggcgttttctcacctatatgcacatactctaactggatgacctttaacccttttttttttgttcactgaccgttgctttcttaaatttgttgggttgagccgaatgcttaaaatttgtaatgttgtattgtgcttgaaatgctaagttaattgtttcttaagctatcaaacctggattccagtaaatgtctgtttgtatgattaagtgtgaccgtctacattcaagattgcggttttttttactgtgcaaacatcatgttgattcttcaaataagcgccttgcagtgtttgcgtgcagataaaaatattgtatgtttgggtactttggttatgtctgtgccatgtagttctctttgtcagcttatgctcaattccttgtatatatgtacagttagtcatgctatgtattgcttccgatcagataaattctgtttacaccctttcccaattttctgttttttaggatatccatgctgaagctgtcaagaagaggcgccgcaccaccaagaagccatactctaggtcaattgttggtgcttcgttggaagtcatccaaaagaagagagctgaaaagcctgaagttcgtgatgctgctagagaagctgctcttcggtatgctctttccctgaatgattgccatttagactggttactggttccaacaaagtatccacccatggaatagaacattgccactctatatgggttacattttgccttcattttcactgcattagcccttacctcatgcggtgcctcttaacttctcaagcagtgttttcgtttgctgcctttgttctgcacagctcactgtatcattgcaacatgatgtttgctacccattcttattggatgtttgctcctagtgaactctctgttcatattcatgcataatcccctattgcatattgtgtatgcataatcctccgatatacatttcgatgatgctaaaggattaaattcatttgagcttatgcattgtgcagtgagatcaaggaacgcatcaagaagaccaaggatgaaaagaaggcgaagaaggctgaggtaaccaagtcccagaagtcgcagtcgaagggtgccgccccgaggggttccaagggcccgaagattggtggtggtggtggaaagcgctgaagatttcttgatccccaggaaagggtcgcctggttctcgccggctgtctaaatcgtatctcatcaaaagctaccctgtagaacctctgttaaattagcactactgccaaaatgttttaacatcgccactggagataatgtcatgaagtttgaaatgctatgtgggaaaaatgtttttctttggttgtgtaactattacgagatttgacttggcttaatgtttctgagcaaagtttgatgctgcttggcattttaatcctcttgtgttttgttcggtaaagagcattggtgttcatgtatcatgatctgaatgctcgttctgaattgacggccctagaaatcccatcgtattatattctctacagaaatataggcttttgaaatcctgttagtagcgttaaaagcgaatttgacttttaaagtttcaccattttttgcgaacgggtagcaggaaagctaaagtacgttcccttcaaacaggctagactttgtagtgtccgagtggtatttatttctctttccttatttacttgaaaaaatattcatgtgttgcaacgggtaaatgctattttaattttattattgtttacggtttagttagataaaattcactgtgggaagtcgtttggatatttttttcaggaaatcatgagctacaattaggttcgtatttcatctcatgctagcatgcgagtttttttaaagatttcttatacgactcctattatacttccaaaaggaaaacaatcttaaaatctaactcaaacacgcatctgtatttccaaaaacgaacgaacttaaaacctgactcagatacggatgacgtaccaaaataccagtaaaaacatctttaagttttaatttttataatagtagatatttctctttctttatccaggatttttgctatatgtatgagacttgatttcgtatttgatgtattaagtattgggtatcccatattcagggcattaacagcatgcatcatataagttaattttagggcattaacagtatgcatcttagtataagttaattttttttctttggtcttgcttaaaaaatagtaaatactctcttcatcccataaaatcaactactgactatgtatctaggtcaagatacacaatcaaaaattggtttttatgggatggaagaagcatgttttagacttcagatggaggaagtactccctccattccaaaatatgcaggttcttgaatggatggaacacatcacaatagtacaaatctggatgtcttaagaatttaaatgtctattcaaatttacagtagtaagatgcgtcacatccattctaaaaccctttattttgggatgaaggaagtattacttaacatattactaactgtattacgatggaccatgctactctgcattagagacgttgtaaggcagaggatcaacatgattactataaattatgggagttggcagccatccgatcaagggcataaggcctatatatctcaggccgagtttagctctaaatttaattttttcttcaaacttctaacttttccatcacatcaaaactttcctacacatataaacttctaacttttctatcacatcattccaatttcaaccaaacttccaattttgacgtgaactaaacacatcattactacactaaataaaagtgtgctacaattttcatgttattgtagataccataaatcgacggtattcattacattgatccactgttatactcacatacttcctctatctcataaaaaaccaatttagtactggatgtccagatttgtagataggatgtgtcacatccaatatgttagttttttatggacggagggagtactccctccattaaaaaaaatcaatcttaactataaatatagacacacgtgttcaaattcatagttggaccataattttcatggagaaaatgaacatttggccacgttcaaaacacggtttcgctagaatgccaccccaaaaacacggttcgataaaatgccaatacgaagcgtgcatctgttgtcactttgccattttcaccattttattcatttccaaaaagattttggctcctccgctgggtaataagacggaactgccccttatcaccctacggcgttgatattcttccccatcccctttcttcccccactctctctctccccttcggcatggcggtggtggcagtgcgagcggtgtgtttcgacaaagggagtggcgcagggacgaagcagcttcgagcagagacgcggagctcgctgaagatacatgcgcggggatgagctagagcgccatgaccactgcgagcttggcgcaccctttagcgagctcgagctcgagctctactcgtgtggaggtggaggtcatgggcgatgtttttgtcagtagcgacgacatcgcacggaacctcatcattgactatggctctggcaagatcgcgctcaccgccgcgtgcatccacttccgtatccctagcgctgccctcaactcccccttccaccactgcgtcgcttcggtcctcccaacaattgctttgctgtcactaccaccgaagaagaagccacttccgccgctgtcaccgacggcggttgctaagaggagcccacaaccccctcagcctttcgtgcttcggccagtgcggcggtgtggcccctcctagccaacggagggaggcgcaagaagcagccggcggcggtgagggcgtgaggcctttttttttttttttagaaatgctcgatcccctttcacttgcgagatgaagaaaaggcaagccggaggggtattttcgtctgatcaccacgtgaacagcaaaaaaaacatttcggaaatcatgaaaaggcgaaaatggcaatgcgacgagtagcgcgcgctcgagattagtattatatcgaattacgttttgaggatgacataatagcgaaatccagttttaaagatagctaaacgtttattttctcatttttcatgggacggaaggcgtaaacaataaacctctacaataatgcccaggattcggatctcattggatgtgagaagagagagacagcgagcaaagcgaagtgaactgactgtgaagtgaccgcacttcggctgcattaactgcatcgtctcggctaggctagggctaaacacgtccagagaccaaaacgagtcgactcgtcgtcgtcgtcgacactcgagaggcacctgcactactccactcagctcacacgcaaaacgtccgcttcgtctcgtctccctcctctcaaaccgcctcgtctctcgcgccctcctcctctcctgtactactctcctatcactcgctcactcgctcgccgacgctgcccgaggcggaagcggcggcggcggcggctaagaggccgtagcccgcttcgctcggcggatcgcgcgcgcgaaccgggcggtggaggaagggggagggggagggagaggggcggagagcgccatcgccgaccaggtgagcgctttgattcccctccttttccccctctatttctgaccctccggctcgcacgtgtctccccctcccacccaccatctccggtgtggccggccggcagatggtcggcggcgacgacgacggtagtgtagtgctgcgggtacctacgcttccccgaatttaaattttgtaacctaattttggtgttgattttagggttctcaccatagtttatttccaacggttttccctgaggagaaaggagaagacttggaatatacagtacgtaaaacaagctgaacgcctgaactagtacatgattaattagatattaactattttaaatttgaaaaatatattaatataatttcttaaagcaacttttctatagtaaatatttttcaaacacgcactgtttagcagctcgggaaatgcgcgcgcgaaaaacgaaggaacccttctccctatctgccactcttacaaaagaacacagcaaaacatttcattgctaagaacagatataaaagttttacccacaaattattttgagtctattcaacacgctgcattcatttcattagctgcatatatatttgtgtactattgctacaatgatcaacagaattagcagtgctatacgttttgccccctttcgaagtccaaaatttggcgctcttctgcctcccaggaacccctcctcgcttgattgcttcgacaactttaagcagtgatcattggaatataactccactgtgaatggtgcgagatggttactagttttttgtcagtaagagatgcatgattactcctgtcctgcccctgaatcagggttgcattgtaacaacggacatataaacgcaaattgaatttcctagtaaagtgctaaaggcagggatgtgtttgccaatgaattttctttgcaaatggtctagagtttggattttaataatgcgacgagttttgtaattccaacttgaattgatctcgtttttacaaacaagactattgaaaaagttagggatatgctacttatgatttgattaatcaattaatctgggggagctatttaaataatgatgggactaatattgtccagctgctgctctcagcttcaccctactctcatgctgccttgtagatcatgagcacaatggctgacagcgtatttggagaaagggacagcagtaatctcgagattcttcaacgaagtcatatgaacagcaattagttgactaggcaaagcatctttctgagtaaatcacgtcttgttagggtacttcagttgtctttcccagatctcttgtaaaattctttccctcagtcctgcagatttgcatgctcaaggacaaggacctacacattatgtggtggttcatgcaaaaaagaaaaatcaagtttttctataatatctacacatatactcaacagtttgactgtatacattttttctattatagaataagacagcattggctgcagagggttcaaatgagaaagctgcggtagatgcaaatgaagtttcattgcctctttctaatctaagcaacactcgacaacattctgatagagaaaacaacatgcctggaaaacatggcaacgatggcatgtcaaaagacatgggacgtgctactagattgaagagactgcaaacgccaatcaacttatttgaagatgaatgcgttttctgccattcatttagaacacctcctcaggtgaaccatgatctattaaccagaggttatgttttgaggtcttcttaaccatttctgacactaaaggtcctcacttttcctatttcagtttcatggtccaatggcgcattatcaaaagggaaagcttgtgtccagtgacaatggcagtccatgcccaacagatatcatttatgttcataagaaatgcctggagtggtaagttcctaaatatatttcaactcttgatgcttattcaccacaatttagatttatcatcatgcgcttccaatgcaggtttaagatacaaggatgctggacaatttttatttttatttgttgagatctggacccttgtataattttttagtttaataccttattggtttgctttataagacaaccattccatttgtttaattatgtccaaatattagtcagtatgatatatagttttagtggcatgcaagaattaccattttgattcctatttcaaagtaaattcacatgatatttttttttagccattaaacagcctattcaatgtttgagacgtgctaagtctaaccatacctaataaaaataaccagtggctggagtggtattaaagtgggtagttgaggggtgatggtgcgttctacatccccctccctccatcccccatcataattttgttgtttgcatgatatattcttctgcaaaaagttgatttgtttgcacatgtgtatgtgtagatggttgattgatctcatgtagtaatttttcaattttctagatttggagacaattcttatttttagtatatttagctttacattataaactatatttacttcttccagtgcaacagttggcactagctagttactctcaaaggactatttcttgggtaaattgtttgtctttccctacttttttcttttgcgaagggccccgcaagtattttacgaaggtgataccattgtgaacttggagttggaaataaaacgtgccgcgaaattgaagtgcaaaagatgcaagcttcctggagcagctcttgggtgttattatacaaagtgcaataggagctatcatgttccatgtgcaatgatgactttgaattgccgctgggatgttgtaagctcttgagaatattgtgtaatcgatccttttgtttgtgatattcgtcaccactctaatagtctaatgttctaagctccgagatgctaattttcattttgcaggataacggttgtgttatgtgccctgaacatgcaacgatgccactaccatgtgataagataagctcgccaagaaatgagagtggcaattcttcttccttccctcagaggtttttccatgaataagaaattgttattcaatcttattgctttcttggaaggttatacaaaggctctggtatttgattaatcattgatccttcatttgtatttttctccttgattctgtgttccagccaatcgtcaattgaacaaagcgattccgctgattgcgaatgggaatatcctataatagatcaatggaacacatcaagttctttgtctcaagggtatatgacctttattcacctgccttttgagttactttgtaatcattttatgaattagctaatacggagtaaatacctacaacattctcttttgccttttgttgttccagacaaagttcagccaaagaaggaatttctgctgttcctaaaagggaaatagatcaacttaacacttcatgttcttcctttcctgaggggtacacaatctttcctaacctttcttgttagatgtctttaaggttcctgattctttgatcaattgtagtcttgcattccataaatttgtgttgtatttaatcattgcagccaatacttggacaaagaaggaatttccactgacgaatacaggaaagaaaagcaaacagatcacctttacacagaaagagattgcccctcggatctgtgggttttgcttggttcagctttaagtgaatccgagaaggtaggataagtgagaagtagcaaacattactctttttttgtggtgaacaagtatacggacaaacaatgctgaatcctacttcatggataattcaacatagtggatgatttgctacatttatgaagttaactcttccattccagcttttgtggtaaacatgatttatgtttttcaagcaggattccttgcaagagtttgcgtcttggacagatgcaactgtggtcaacgagtggactgaaaatgtgacccatgttatcgttggaaaaagtgctggtagtgcatggagccgatcttatgaggtcctgatggctctactgtttgggaaatgggttgtcacggttggatgtcagtattgagctatcttctctacagttctctatttcttttaggaccccaatttgagtattctttcctttacgtttatattgtttgatatacctaagtatccctaaggccattcaaggtttatcataaatctgcagagtattatctattcctaagctgaagtgcttcgccttgctcttttagggattatggattgcttggtaaagtttattccaagtccagaagcttcctttgagttaagatttagccatgactcacgtgcatcaattggtggaaacaagaaaagaagaaatcaagcttctgaaggggtacatatacatcgctggctataagattagacttattttatgtagtgaaaactatcgtaggctgtcacttgtataagcttaggaatttgatttgcaaatctttcccagtaatattttcttacaggcctagctacaactgggtacaacaatgcataaaaatactttttacatatcgctgttcaaagtcaaggtgtatatatctagtgcataactccatatattccacctgctttgtgttgcaacttacgacatttcattctttagagcaaattttctgccgcaacaatctccatgatgataatgcgatgctttcaggcacagaagttgttctcgggactgaacttttgcctcagtgcctacataaaccctgacgacagacaacacatacagagcctgattgcagctgctggagggcagatactggagacaaacggcggctcgcatttgctgcgtgaaaacctggagaaagttgctgtgaagccatgctacttcgtctacgacgggggcgctccaagggatttcacccaaggattgcttgatgatctccctaaggagatggaagagggcagagagtatgctgcctgtggagctcaggtgatcagccatttgagggtgtttgatgccattgcggcttatgatgcacagattctcagccacaaggatcacttcaccccggatgtgtaatggcgcaagctgtgactgtacatggtaaagcatatatccatggctagttgttggcaatttgtaggtgcttttggagcagtgcccttcagatcaaatctttggcactgtaggacagtaatgctgttgtatatatataaaccattcgatgtttactgacacatctggttagcctgatattcacctactaagagcaggtacaatagtggattattagccggttgtaaacattttaatgagataaaagatgagagaagagcagcgggctacagatctgtagccagctgcagcgcgaactctaagacgcaatgtgtgtatgacaggtgggaccatatattaatagtatagcaagcaactattgtataaattggctattagattggctataaatgaattggagttaggtcctctttgtttaggcttataagccagcttataagtcgaaaagtctaagtcaaaacaaacaagtagcttttttttatttggcttttttgaagccataagccactctaacactattaagccaaaagataggttggagaagcttttttggcttttatgagatagatgtatgactccaccactaaacttaggacattaaatccactgtcttataaatcatataagccaataagctgacttaaaagtctaggccaataagcctaagcctaaacaaagagggccttagtagtgggctgtactattgtaacaccctgaaaattcgaccaataaaatcaaaactctaaaaatacggattttcaaaaactttttaaacaaattgcattatgccgattttattcacctatttcattggattttgatttcggagttcgttgatcgcgaataaagaataattaattaggaataaaccctaaaattaaactggcaaaataaataattaaaatataatttaaaataaagattaagtgaggttggtaataaataaaaatattatcgcgaccatattagtatcaattaaatttaagtgcgatggaataagaattaactttaattaaattcaagtaatttatataaaaataaaatatgtgtaatgttaatctagggcgaatcttttggttagagcaacacaaatattgagtaaacttgatttgtgcaaaagttagaatttatagggcgagatttaaatagaaaatagactaaattagggttaataaggatctagccctattcattgcctacaaggtgcttgatgtaatcctagcctagccggccccgagccccgcgccgccgacgccgtcgcgtcgccatcgccgcgcgctgtcccatcgccgcctgccgccgcgcgccgtcgccatcgccgctgccgcgccgcgcgccgtcccgtcgcgccgtcgcgtcatgtaacatactgaaaatttgctattttctaaatatgcatcatgccgattcttatgttcttaataacttcctaaacctaagaaattataattagagggacctcctaaaactaacctgtataaaatccctctttggtatttaaaatctttcgtggttttattctaaaaattgatcttgttaaatcgaggtattctctttgatttgattttgtatcttaaaccttctttcgaccaaaatttcctttctttaaatttagtttaaaaatcctttttacttttatgaatcatggtccaagaaatcctccaactatacctttgaacctaaacccaagcaattccaatttcattggaattaattgtcgacccatcctttaaaattctcgatccaaattatttctttaaatctagccgccgatttaatttccgtggcttgatttccttctcagcacgagaataatattattatgaacaattgctcctgtgctaagagaatagactttatccctccacccgaaatccaaaacctcatttagcccatatctaattctttaaattccatgccatatattttgggctaaaattctatttactctactcccgtcgcctcgcgccacgcgcttgccgcctcgcgccccgcgccgctgccgcgccgcgtcgccgtcgcgtcgcctgtcgccgtcgcgtcgcctgttgccgtcgcgccgagccccgtgccaagccgcgccgagccccgcgccgcgccacccacccgtcgcgtcgctgctgccgcctgccgcgccgcgcgcccgtcgccgtagccgcctcaagccccacgcgccgcgccgtcgcgtcgccattagggccggccacctctccccgcgccctataaatcccctccccggtcgccatttcaccccgcaccaccccacctcctcttcccccattttcccctctttcctctccaccgcgccgccgtcttcgtgccgccgcaccaccgccctcggtgccgccgcaccgcgtggagtgccgcgccgtgcgtcgcccgccttgcgccgccgccgcccctccccttgttcggtcgccgccgccgccccgggtaggcagtgagccgagagagagaggaagggagaagccgggagggagagaaaaagaaagaaagaaagaaaagaaaaaaaagaattgaaaagaagaaaaaggaaaaataaatagaaaattagggagagattaaggaggtttggaaaattaaataattggggttagttgtaggtttcttttagttgtagaatcacaaaattttatataattatagaatattttggtaatctctatacaaaatcaattcgtggtagaaatttagatttatttaagagctaaataattatgttgaattattaggaatgtacttctaaatcacaaaaaaaaagacttaggatgaatgaacttaaaattggaatgaagtggttttgcaaactttgtagtcgatatagaaagatcgattcgcgttcgacttttatttaagtttatttggatttcatttgaattctaattgaattcaaatcaattcttcgcacgtacttttagacccgagggagttgcggatccgagcgaggatcaagacccgcaggactacgagcaatgcaagtcatcactattctttgaacatgttgatcccaattgcgaaattattttgtttacaaataaaattgcatgcaatgatgaacatcctacttgtgattatgccatgccttgattattgtttaccccttatgccttcgtaaccatgtttacgtatgagtccctagtcaattatgacaattgcttagaaatgctattctagaatcatgcatactcatatttatcaaatgctatattcttgggcaattatctttgggaaggtaattgagatgcggcatgtggagacatgagcgccacattgccatgatgttgatgacatgatttgtgaaaggagaaataaaattaaacaactgttttcgactggggcggacggaggatttgggtggtgtccggaaaaggctagtgccgtccccggtcaattaagaaccgagccatgaagttaagcatgaaacgaccccccgtacaactgcatttctcatatgggtatagacctagcgaatagatagctgagcggaggcgacgtgcgggtgcggtgcctcgccgtggcgaagctgagcgtcaccgttagctcgccggccgacggcacggcgaccaccgtcgccaccgcggcggcctgagcagtagcggtatcggcggccagcatcagcttcggaggaagcgggatggactcctcgtggatgacaatcccgtcgccgccgccgtcaccgtcgccggcgatggcgcggtagacggcagccacgctctggaagcagctcgcgcaggagtcgcccaggaacacctcgacggcggcctcgacgccgctcttgatgaacatgtagtccatgtccagcgagcagattgggccctcgatgcgtgacctcagcaatctgccggcgctgcaggtgatcgtcctgtcgacgaactctttgcacgcgtcgaccagcacgtcgtcggcgtcagcgtcggcgccgtcgccggcggtgttcttcagcttcaggtcgaactcgagcaacacatgctcgaacgcggagatgccgcgcagtggagatgacagctccagtgcaggagagctctgaattattccaaacaaatcaatttttttaaaaaaatcgaacgtgtttgaatttcctaaaatttgttcaaattcagccaagatagatcctgttcaaactcaaaatttaacattgtcactcaccagtgtcacttcctgggcgttgtcccgtgtccggttgaacacaaagttgggcagcccctccatgtcgtcgcgggcggcgacgatcccatagacgagcagccgccgcccatcaccgccgctgccggcgccggcggcgaggctgagcgagcagagctgcagcatgttgtcggcttcgtagtcccagcgggggtgaggggtggtgaacctggagcggggcagcgatgtcggcgccgtctcgtgcatccggtactcggagtgccacgagaggccgaagaagccgtcgcggtgggaggagccctcgaggacgaaggtcggggtgtagcgccgctcgccggccggcagctcggcgttcagcttctcggtgagctcgtagccatctgtgtaagggtatcgttttatcgtggctcctcctgcaagacaagaaatgttcatatactccatttgtcctaaaatataagtatttttggactctggtacagtctccgagatgctactttgactaacaatatctataaaagttattttaaattaaaagagttgcacattatgatagtatgtttaataataaatctagtaacatcaattttacatgattgatctttttttattattttactattaatggtcaaagttaaaaatgcttatatgttggaaacggagggagtatgtggcaagtgttttaaatttgagggaatataatcttgtttgtttaaacatcatataaatagttggtaaatctttttataaaaaaacgacaacattaataatgtatatataaaatactctatataaaatcaagttaaaacttaaatcacccatctaggaataaaagaatcaaatcaaagtgctctggatttatctttttttaattctcaatatgtaaatcgaatttgaattatatttttttggtggtgataaaagttactataatgtacattgctaacaatttttacagctagaggcctcggttgttggtcgttctccaatgccattgtgtaagggctggcatgggttcaagggctttcttgacctgcgtgagaaggttttattctacacaggatgtacagggtctattttgtctttggtgggtcaagttttttttttaaaaaaaatacaaacattcacattgaatttgaaaaaaaagaaaaagttacacgaggagatatccttcgagggtttagaatcctgtcccaatatttgacttgcatattatgaacaagaaatttatactttggtgctgcttgcaatggaggcacttacgaatctcatattgaccaatccgatattcagctaagtgtttattcaggccttgcagctgattatcttcttcctcctcttctgctgattcttcgtggtgatcatcgtcgtcgtcgtcggatcggaatagccaggccgggatgagagccttgttggacggcttcttcttcgtcgtcacattgcagcagtcgcaggtgcagcttgagcggccggggacggtcagccatggctgcctcgtccggtccagcttcatcaccggcaccatccggtcgatctccgccatgtcgaactcggcgtcgcggttgcgccgccgtcgccgacgacccatcgatcggcgcctcggtgatcgatcggaaagcaagcagaagcgaaaggcgaataatatgggattaattcggatccggccttccaaaggcgatcgatcgcttcttccgtttgcctaaaaccgagagggactccgattctttgcaattctggttgcgaattcctaagaagccacggctcatgattagttgtagacttaaacttgtaataactacagtacacttgctagttactagtagttactacaccgcaatatttgtacattagttacttcatttatatcgtacaaaaagaaacacaaacagctcaggatcaatatacaggcattcctatacaccataggagactttgtagctcggagtgaaagtaggtgattgaatggcttgagaaacggctggcaaattggaaggcaaacttttattacttagagggcgactgacactaatcaatttagtgattatcagcctatcaatatatatgatgttcttttttgaaatacataaaggagtgatcaataaaattgattattttcaatcaaggttcttttggcaagaggatggacacaaaaggaaataccgactagcaaggtgagacatcatcgtaaagatcaagggggttgggaattcaagatcttgaaattaagaacaagattctctttagtaagtagttgtataagctactcactatagatggtgtgtggcaataaatgctaaggaaaaaatatttggagtcacagccttctcattggaaaacaagagagtcacacttttgggctagtctaatgaaggctaagcctgattttcacatatttgactctttcaacatcaaagatggctctcaagtacggttttgagaagataaatagttagggaatgcctatttaatagaacaatacccatgtctttataatgttgttaggcataaacatgcaactatttcagaaattttccatactagtctgctaagcttttcttagcgcagggaccttactggctctaagttagtggcgtgtaatcaccttctctcacacatcgctaatattatatttctcacaaccaagatgagtttaaatggaatctaaccactgatgacagattttcggttaaatctctatatcttgtgttggtgcataccgatgttcccaatataaattaaagaatttggaagattaaagccccataaagattaaagattaagatcttcttatggtacttatatcagggagtagttttaataaaagataatctgattaaaaggaatgggagaggaacttgttctttttgtcgtaaagatgaaactattaatcatttattctttgattatcttgcgcggtttggtctttaatccaatctgcttcgaatattagtttacctaatagtataactcatatgtttgggcatttcataagaagacaactacacaatttgaggcatttggtcttatttggggcaactgccactatttgatctatttggctttgcaaaaatgatgtgggttttgaaatgaaaaacatatcttctctgttataggttatattttttttactacatataggctctactcatgggctattctccagaaggtcaatttgttgggtaccatcactgcggcttgccaataattggagttagtggccatggagttttctaccctagcacatgggtggagttctaggctacggttagagagttcctaaagtttttcggttgtcttggatgatgatattatcttttgtttctttcttgttggctgggtgcactctttgggtgcatacgccagagatgctctcggaataattttatattatttactgagataataaaacttccattataaaaaacaatatacaatggcgaatagtgacagctaccgagagccacacctctccgcggaaaccacatgggtggcttctcattggatcatcctaagatgttggaagacattagcaggcaaggcaaccgattgatgaatgatatgggagcggtgagagagtagccccgacagcagaactctcctgctgtgcatgtcaatcctgcaaacgtgatatagttgggggtcattttatgtcctgagcggcttaggctgttcactttagtgccattttcaaccttaccaaatttcggtaaagttgccaaaaaatggctacatttagtttgctgccaaattttgataactatataagaaatcctgccaaaattttggcatagttaataaaattttggcattgccaaaatgacattgccaaaattttgtaaggttttttttggcaacaaagtaaacaggccctaagaagtagagaacaacaccatcttcccgcagcctcacgaagggccacgtgagcaccatccggggcaaccgtgacgtcttgtagtcctcctacgcccataagctcctcatgtcgagcgtgtctcaagtctcatcagctgatttgtccagagtccatatggccaccgtcgcgttggctgcttcggtggcggcgtggcacggtgacgatggcatgtcttcttcttctttcgttgtggcagcggcaacagcgatgcgggcggtgttaacggaaacgagtttgatgaagttgtccaagatgcctaggtgtggtgcatctccatacatccaagcttctcggatttgaaggtgtggagaagtaggtactacggggcagacgcggatctgacatagggccccgctaagggatctcagccctcactactggcgttaggaatgtgggagccccacctgagctcttctacaactatttgctccacatatatagaaaatggaggtttaaattttatctaatttattcagccccacctgcttttttttttttggatccgctactgtccgggtggaggctgacgtacctgagatcgacgggtggtggtgagccgcctccgtcgccggtgaagacgatggcggtgtcgcagcacatgaagccctgcgagagatccgcccagaatgtgttgccgtcgaacgagaagatggtgtccgtgcagaagaatcctcttgtgtgtccactgttcgctccgccacaggcatccgcggcgtgcagcttgcaggagaaggtgatcaccttggtccagcggcggccggcatgacatgatggtgttcatcttgatcctcagcagagcctcgtcggccgcgccgaaggcgaggccggagaggaggtcgtcgccggcgccggcgccgaggcgcgcgtagagcgtcaggccatccacaaccaccagcgcctggccgatcgagctcgccgcagccgaaggcgtccatgcgcgagcactcgattcataccactagcacgcgagccaaacccaatacggcaacttttacctgaccaccaccatcggcatcggcgatgtgtcgtccttgtcagatcgttaccactagccagttgtctgttgcttgaatcatactttcttcgtccaaaaaaactcaacctaaaaaggatgtagaaggaaatggctagattcatgcccagattgagtttttttttggacggagagagtaagttcacaacatggcaaaattttacctgaccaaaaattatcaaagtaataataaaaaaaaaaacaggacaggagctgattcaagatccaaaatgtcggtgcctgataagtttaaacgacatatctggtacggtacaggtaaaaacaggtttaaacattcaaaacattcagtcatcacaagaccgaaacataattaaaacggggttcaactttgtttcaaaacttaaaaatgggtttaactgattgcagccaacgaattatgaaccgcggtatttcgcagctaccacaaacgccggccatcgcaggagctccgatccccagaaccagcatgcataccctgttcagaggaaattaatgtagtttaggccaccaagtaagttaatctgaacttactatagaactaaacaagttcttgcagaatcattttgtgagagttaactgtaccttaataataccaacaattgatccaagccatgaaactctaatcttcaacacggagaacctactgcaatggctgcaaatgcaaacttacatcagaaaagggaattatggcactttttttaatcataattatgacactattttgacattgtgcacaaaaaaaacgtctattgggactcccaaatctgaccttgtttattcttacactaccattttgggtggcaggattttgggtggcaggaagaaggggaggaagggcaggtatcttctcgatatcgtcataacggagaataaagttgtcctgcaaccaactttcagatatattttcttctgctatcggaaaaagctgaaaatatctgtcagaatttctttcggacgtttaccttaggaattgcatcccaaatgttggcatcaaaaagatagcagagtccttgttcataagttgtagttttgacgagaggggtcgtattaggagctcttttaacccactgacgcagctctttgtggtaaacccacccgtatttgcatctgaagaaatggaagcaacaatctgagctatctggcataccaggccatcgttttactgaaaatgacaggcaaatgagaaaacaatatagaactgtggttttgtgcttacatttcattcgcggcatataactgagctgcatcctgtggcatactgcacaaaagacagtcaaataatgcatagcctactaacacaggaattcactgttgattgaactaagtacctgtagaagatgtagaatagtgtcatgaggtgaaacctcagaaaatgcaacgcctgcagaggaagataaatcgtaatgtcagatacaacaagattaatgctaacctaaacattccctcacaaaaagaaaaaagaaggtaactcgaaaattgagggccttacttgcaggggtggaggctgcatagaagagtagcaatccggaatttcataagaatactcttctttaactggctcacttgaccaaggagagccaaatgtcttgtaaagattatctgaagagttcatatccaaccctagtgttgtcaaatcaatccctaaagcaagagatgccggtccctcctctttcaacttcattaccctcagtagtccatgtaagccatatggatcatatggatccggtgcggtatcagttctctgagaagacttgggactctgaaccttgtgagactctggtgcggtatcggttctctgagaaggcttgggactctgaaccttgtaagactctggtgtggtatcagttctctgagaagacttgggactctgaaccttgtgagactctgggccggaagatgactgcagcctaactgacttctgagcctgtggttcatgattttgctggataacttgttcacgaggcctcggatttaaaggcaaccttggagaatttactggctttggtccaacattttcaggcccagtattttgaacctaataaacacaatcagtatggtcagtccatatttgaaaagctcagcaggcacctgctaccaattattttgtaggattcttacttactattccccataaagaaaaggtacatgaacaaaaaagagtcgtgttcaccaatggtggtgttttcaatcttgactatctggtcatgaggtaaaagaaatcataatacaggtaacttaccgaattagctgtctgcttatgttgtttacggggtggacaactgctgcccgtgttaaagccagatgatttgcccatctgtagaatcacatgtaacggaaatttaaggaaaaggagataaaactgttgttggaattacaatttttatttttttagaaaaaaactcacaggataatgttgtgcttgcataatatttgcattcttaggaagatgatccttgcgatgcaactccataccttacattcagagcatgaggtaatgttcaaacaaagtaccaagacataataaaaacctatagcatgaggtacttggcaaggaactgtctgaataacatatagaattaaataatgaaacaaaaagtagagtaagagtaccttccaatcttggtaaagctgggaagtcctcattatggattctaaattcctggttttgctgaacagcattaataccaaatgcttgttgtcttagaggtccttcatttgttataaaggagaaaagttagttaactaatattatcattcagaatatttagtttgcatgtcagcattaccatataacccctgaatatttccagcagaattaggtcgcccaactaattgaggaaaatcattgatgtcaaatagagaattttcaccaaagttaccatcatgtcgcattcctggagaaccagacgaactgcttcctgcctgcaattggttcttagatagtgttcctccaggtgctgaactagagcttccaagcatattcatagccggcaatcctggtaaataaacaatttgaaacaaaactgcccttttatatataagaaatgagaacgttcacattcttactaaacacagtaagttctgcacacgttttagttgcttcgtttgattgataaatgtaatagaataagcacattaacaagatggatgagatgtcagtacagaataaataacagctagcagaactatggcaaattgcctcaacagaatggtgtacttctttaataatggacccaattaacacttccattccccagatcaggtaccggtcaaatatgtgcttccttattcttttttgctccagatgactagtgtacttcataggcttaatactcagtccttttttttatatggcgttggctagttcaaaattgaaccaaccaatgtcatataaaaaaatagggagtatgtgatttttaatattatttattttagatcatttcattatcaaatcagaaagaaagacaaattgagaacatatgcgcgtgcatttatacaaggggtttatatgtttagtatataccttgttgatgagtaccacccatttggtttgatcctcggatattaagagccccacttccagacaaattcacaggggatgcaacagtaggcatagacattccggcagagcttatggttctcccaatgttgcccccacccgcaacgctagccacataagttattcgcgggccaaaattcccacaaactggagcagctgccaatccaagagcagaattgtggttaccatctttagtcaagtacgaggaggaagcttgtattgaaccatcaattgcactcatgttaccagtaaaaacaggacttcccccaacatgcatacctcctcggttgctgagagcaggatacccgacctacaaaaaggatgaaagaaaatgtgagctggattagaagagcttcataaacagactcgagcttaggagaggaaaaaagaacctgataaatggatgcttgaagactatttggaggaaaccaagcaccagaaatactacccctaggtggttgaaccccaagggatgaactaccagtcattgaggaaccccttggtgctagtgaacctgacatgtttctaagattgagattcccatatacaacccttccaagtttttcgtgagagttagttttagaaaaacatcactttctaacatgcacaaacggactagcaaaataaacaactgtaatgtcactaaccaggatgacgaaaacctgaaactgatccagattgaccagaaaaggtcggtgtcaacggctttcctgttgagactggaaggtttgatctggcaccactactgcttgactgaaaaagtaacaagacataagttaacctataattgtgacattttaatatgcatttgtgccaaaacaaaataataggatcaaattttaattataatatagacttaaataataaatcatagctagtattcaaagctgcttttcactactctaaagagcactaataacaacaagaaaaaagtgtccttcaacagcatgattcataacactttgttttgatttcagacatagtttaaggtccttgtgaaatagaggaactaaacaaagagaaggtaagttacaagaatacagtatccagaaggatacacaaaccaccaataaagtataaacaggctcgtgagtctgctaatctggactgcaatgatttattgaaataagatataaacacgtaaaaaaattatgatagtaaggatgagggccttctgaaaacaactaaacaaggatgagagcacacattcagcgatcctgacattttgatgatgatcaaagaacaaacaggccaagagcaagtcaacaatattctaccaattccataacaccatttatcagatctagagttcaagataagacaataccctgtataggcaatcctccaaaatgcaggctatttttcaaggaacaaaagggaaaggattgatgtattattgaacagacgatgtgcaatggatgcaatgcaggatccaaaacctgtttaaaacataatcataagaagatgtaaccactctacttgggatctcatgccgcagaggcttgttttgcttcgcctgtttacctatctcatccaactgccatgtaagcttggcctgtaatatttcctccaaggtatatatataaatctctctagggttcttccaaatcccctcaaccaaattacccacaaccgccgctgccgcggacagtgtctccatgctcaactattccaagattccattgtttgccgcctgctcaagccaccctagcgcacgacacccagccggtccctcaacgcactgcctgctagctctgcccttggttccttcctcccaggcgtcggcaggtagcagctatccatggcatcagcggacggtgcagcatgcgctgactatggaggcaaccagacaaccaagcaaggtgtgaccaaccaccaggactccatccgcgcatcctttaatcctcccgatgatgattgtctctctcatattctctcgattccccttttgccttttcagattaggaccatcatgttgtcagatctagaaatctaaaatggagtattggttttcgttcatgtttaccagtaactaggcctctagttgcatgtgcttgccagtaattgttcagcttgtacatcaagcgattagcatcctcatgctaacatgtgggatttttttttgttctatttcaatgttctctttccaatccgctgaacttttgaaaccatatcgttaagctatctggcggacacataggcatgcctgcgagcacacagcgtccacaagctacagttatgggctgagttcttcacccctcatagagtaacgggcacgcctgtggacaacaaactcgcgggcgtgggcatgggtagccaatacccgtgcccgtcacacccaattgccatccctaaccctaaccctagatctatgcgttttaccgctagattagtattcaattgcttttccacggggaatcctaaatacttgtcaacgtagaccactcccgaataaatggaaaattgaggtcttacctagtatagtacatacttgccgactatctctacctaccaaacctcatgcgtaccaaccaaatcacaacaacaattaccaaaatcagtcgttgaggagttggcggaaagggaggattacctgtgtcgactttgatggagatttgcggccgcccatccttgagcgtttactttggtgagaaggttgagaggtgaaaagaccaagaattgcggctaggcataggggttcaaccccttttatggaacaaaaccgcatctatcccttgttgccataggcacataagttcaatcccatatttaccccctaatctctttgacatgtgggcccataacccacatgccattgtgagattaaggggcaaataagaggatatgcaaacttttaggggtgaataaggaatttatcgaaaggggctaagcatacaaaattgagtaaattccttatttgcccttgaaagttgatttcgtccctttttgcccttgcaaaattgccctccaatccattgaccacctttctcaacttcccttctttatttgcctattgatacatcaaaatacatttttgctctagtgaatgcccttctttctcatctttattgttccttttgccaccatggcaacacttaatcctcattttcattatcagttcaccggtgatatcttgtatcccgtcatgtcaaaaaaaatatcttgtatcccacctcttggttggttgtaccctcatcaattggcacctcctcctcacctcctcaatcctgacctaccactccactattggcaacatcttcctccattctcacgcagtcacacagtcacagtttttctgattttctcattaggaaaaatattcttcagcatattcgcagaatgaatgagactcttaaagatatagtcttagctggttacgaactttgtaaggattgtggttttagtaatccttgttgcctcttaatctctactacttagaggtggagtcgtccgtctgccctccccctcatgacgcacagcacgagtcactacctccccaagaaaaccataaaaaacaaatggtaaaaaataccagttgtatcccatgctttaggttagacccacaccccaccatcgtatggtcagttgcaatgaacggacatattactagttaaaagcgactattggctgtcacctggcagtattctcctaaaaaatgcactatctacatgtgtttttaggtatttggttgatttagatggttgtgtatacaacttataaaactgtggatagttatatgttggttttttaactatagatctttagtatatttgtttgacatatgttggaacatgtgatcacattgctcgttatattgcaaataggcactatgtcatgcatggcaaactaatgaactgttgatggaaaaattctagaaaaagtaatagagatccataatgagagtaggtgaattacaaccagtccgaaaacccaaatgagggtgagtgcaagcaagtttaaaagtggtactttagaatatgtgactaaaattcaacctaatttgacaggcgaaaattatacttagtagttgatcactagaaggcaaaacaaaagtgctaatgcttacaaaataatttgaaatgaaagaaatataaaatgaaacaaatacttcctccgtttcatattataagactttctagcattgtccacattcatatatatgttaatgaatatagacatatatgtgtgcctagattcattaacatttatataaatgtgggcaatgctagaaagtcttataacctgaaacggaggtagtaataattaccaacactgaacaaacacaggcctactataactggagactagaactcacaacccatggaagtctaggattaacattttgtgagtagctttataataagctggtgttccaactagcctcaagaggccacgtatttatggaccttccatgtataatcctgaatagtagaattagctatgtgatactaaaccaataacatgtttggatgagcttgagatgcaaactcgaaatttccaaaagtgacttccaaaattaggtggtgggtcagcaagaaacaatgaaatttcatcagaataacacatgctcttttttcactcataggtattgcaacatactgaacaaaaataaggaaaagggactggaaattaccatattaaacgtaagcattcaaacattactctggtggatcaaattttatcaacaataagccacttgtaatttgtagtctcttgtatagatatacacaaatgggtacaaagctcattctttggctatatttagaatgcacattccaaatcctataatgacttgtatcatgtgaaaatcctacaaaactcagttgtcaggcccttactatagttagcacctttatgaaggtaagccacagatataaagttttctttggttagtttgaacaaatcctaccctatattcacactacgaactgagaagaaaatttccacccaataaaaatattttaggttcttctccctcattcaactatacaatgggtctgtttggcacagctccagctccagctccacctcttctggagctggagctcagccaaacagtttcagctccaacaaaaatgggagcggagctgggtggagctctctctcacaaaatgaactagagaggtggagctgggtttaggcagctccataactccactccagacccaactcctggagctaaatttaggagttggagctctaccaaactggcccaatatcagcacatcatctcatgcacacctataatctctcccattgatttcttgatcagatgcattgaccaaatatgaaggctacttgaggaagcaaatctatggtaggtcaccattcttttgtaaccaatttctaacatcaccttggttgcttagttttggggttgatttatttaagtcaaccaagtaaagaaagattttctatgtaattgcttctcccacaggcaccaattttgagcagtaagaacaaaagcatgaccatccatgtgcagataggttttagtttagtgtagttcaaatctcattcattaacgagtacagttacatggtacaactatagggtcggtttactcagttacctaacttgcatgccaataagagtagaaaataatgcagaattcatgtgttgtttcaatcctaaaccgtatttaattggcaaaataaatatagatacgcattactcagcacaaataggaatattattataataattattttgtatattggattaaaaggaaggtccattctggctagactctaggggagttcttaaaaggtaaaaggaccttgaatccattataagacagtaacttaaggcatacaaattaaaaaaaattgtacactggtctgtttgtggtctttttctatcatgagatgatgctaatggaacattaaattagcaagaggaagaaaaagtattgaagaaagcaacctcacattgtttagttggtttagtgtcacttctaacttcccctggaaggtaagaaatatgcagttatgcaccattgtccgaactccaaagccttttctccaagaatcatatagggagcgttcggcaggaggagtttgtgagttagtttgtttcattttccgtgcgcacgcttcccgaactactaacggtgtgttttttgtaaaaattttctatatgaaagttgctttaaaaaatcatattaatctatttttgaagtttaaaatagtttatactcaattaatcatgtactaatagctcacctcgttttgcgtatcttcccaatcttctcttttcccctcctctcaaactcacccatagtctatagtgtatgaactctgaatctcaaacttgtagtacaaaataaatctgcatggttaacacgacatacaaacagataccaatgagttgttaagccactaaaacatacaaacaatgaagatgttagaagcacaattatctttcagtggatatatgtacagctccatacgagaggattcttaattctcttgaggtagctacctgcgaaaaacatcggggttttcaggatccatcagtcaatcccctgaacaagaacgatgatgtcggcttgtcgagaataacagaacaatgcatatccatgttctccgaagattgagctccccagcttggatcaaatcgcagacgctcgcgtccgcagctgagcaggagttcatgaaacctaccaatttactgcaagaaaaaaataatctcaaaccggagcctaactggaattacatacagcatcgaagactacccgatagaccaacagaataatttgagacctgtagaacattctgtggcttgagttcattcaaaatcatcagaataaagccccccaccctatcccattccatcaatccctcccccggggcaaccggaaagggagagaacattctgcagattgggttcattcagatcacccaggctggaaactccaacgccaatggcccaagcatctctctaattcgaatgcaggaaaggccgccgctaaatcaaactcccaactccccccaaaaaagaaaaaaaatccaagcacgatgcacgactggaaactattcccctgggccgggacgaacacgccgtcggctgcgaatcgagatgacacaagatccatccgccggtgagcagcggcgcggccaccgacctaatctgagttttggcgatggcgagaccgagagttagcggcgggaggcgaggatctctctgtcgcggtggagacggggacgaggggtttgtgcttgtgcccttcgtccctgtgaacgaatcttgatgcactccgtgtaaggtggtaaggctctgtttgcgaagcttcaccttatctcgtaaaatctgaagctcttccaaataatcccactttttttttaattctaagaagttagttatagaatatggaaaatgaattagagagctgtttgggaagctttcatcacataatctcccactccctaaaccgtctatattttcacccatattctaagaatctttactcgtagaatctagaaaataaactagaaatctaaaactgaatctaaaaggctggctaccaaccagtagattttcagaatcttaaactactccaaacaaaacctagaaatcggatgctgagaaatctagcttttctaagccggctacatccagctatttcttacaatcttaaactccagacagatcctaaggctaagagaggtgcaaaaaaaaacaccaacctaccgtatgaatatttttgaaatattgagctaagattaacgaagttacgagctggtagctcgctattgataagtacttcctccgttctacaatgtaagtcatcctagcatttaccacattcatattgatattaatgaatctagatagatatatatgtctagatttattaacatcaatataaatatgggaaatgctaaaatgatttacaccgtgaaacggagggagtaccaaactgaaggaatgggctagtaaatcttgaaattaatgaagttaccatgtgactatcaattgataggtctcactaaaagagcgggttcgactagaaaaaacttgattagttaagttacgctcacttaaaaaaaccaaacattttcttgtaatgttaaatttaactagttctaatcatgaagtgtacgacctacatcttatttacggtattgttaaaacagattatttaaatatgttcctagaaaaatctccaactgtttgtaaggtcacttatttttttattttaaaaaatatttctatatagttacatagataatttataacaatactccacttaatataaatatatattaaacatttttttcattttacaagaaccagcccaacttcccaaatggccctcatcaattcgacctgggccactcggacgtttccgatggactcgtcaagcccacactccccccaccgatcagacagtgggcccttcatgggcccacgccacgccctcctccactccgtctgacctgaccatcttccacccagcgttggtctcgtctgcagcctcgccttcacctcggcgggtagatctcgcgggcgcatcgcgtcgcggggcaaattcatcaccttcgtgaggcgcaaaaccctactgcccttgacccctcccgctcccctcagatctccccagggtccaccgatccaaggtgaggcggcttcgtgctcggtcggtgtgtgcgtgacgtgaggtttcttgttcttgattttggtttcttgagttttgaccatggtggatccggcggtgtgtggtggtgtgtggttgcagatggcgagcacgggggggaggtcgatggcgctgtcgctgctgctgttcgcggtgacgctgtcgctgctcgagatgtaccgggggaggttcgcctcgtcggagctcatgaccatcgccggcggattcgtcagctccctcctcttcctcttccttctcacggtgcgttgaatcgtccgctcccaaccctcctcttacgatcttataccccttaataagtttttaagttttgctcgtgatgccgttgtttgtccctctttctttttagctaatttgaagtgatagaatcacatgagtggtaaaattttcgttttattattaatttagacaaaccccgtagcaaatggagttgccaagatgttgtctctcgtagcttttgtcacatttgagtgattcagtctgtaggggataaacaccatagaagaaaacatagttttgctctgtgcagaagtgggtagtaacattgtgcttctctgaattgtaatatccgactaggcgcataagcgagatttcggcttagaggacctggaactagtttattcaggttcagttttccagatatccacagaagaatagcttctgaaatatcatacaccatctaatattaagttcactctctacacaagaagtcaaggatggcttctgaaagagaatagaacatttaattttaagctcacttggtactatgtaggctaagctatctgctagtatttccatgatgctatcataattcttgcaaagggcatgttaagtatggaacctggagcttcgaacttttaaccttttgagccaagataatagaactaaagggggttttggccaaaagcatgctaagccccaagagcatccagcagaactagcagccccaatgtccatactactagtcttatctgatggtcaaagaaagtatccttgaaatggggtacttatcccagctttctgctctgtaacaagagaacagtgcaagcagacccttaggaaggcaacaaaacttagcaaaaacaagcacataagacatagtgagcaggtggtatccacatttgattttcaccttttatggttgtattaaaagatcagtgagttttgcacttttttaactgtttcctctcaacattaatattagtatatgataatttgatatacttttgcagtttattggcaactatcaggaagctaatggagttaaaactggatggggtgcaggtatgtatagtcatacgatctcattcttgctgcttccccctgatttttatttcgactttctttaactgtctctttctttgcagttgttgtcgcggaacttactgcacttattgttgccggcactgtccatcgtgtttgcatcacaacatggtatgttatctttaagacactttactatttctttctacggacatttagaatttttctatatggtcccattaacacatccatagatctgagtgtttgctgtttgctaaataagaaaattcttggattatccagagatggtaatctcagacatactagtggagtatttgcttatgaactgttgctctgtttagatgggaggaaatgaaactaacaatttaggcaaaaacaagatactccactcctttgtttgcaaggagttaaaacttttttcatcctgttgaatgtgatatcattcaagatagtaatgtgtatttcacacaagtattttttacctatcttaagttgtatattgttaacactaatgctattggtaaatatggatttgtcacatgttgtaaaagctgtatttatgcaacaatgtcactggaaacgctatgcaatttgcagattacgctattcagaattatggcatatagaatgggttactagtagttctgttgaacctgtctatataaaatatcaaatcaattgcccttttatagcctattatgcttgcggtctaagtcccgccgctacttggcatttttttaagcaacttgacacattgtggataccctcataaccatgactttggagagttctatgacagtgagaaattgatactttggagagttctttgacagtgataaattcatattattaacctttggtcagtctgtgcacccgttgctgcagtccttgcgaatgtgttaatcaatttttatcaactttggctgcagcttcctgttttctgctggatttctctacgaggttgataagctctctggaatgattctcgcgaagagcgagtctaaagcgaggcggcactaggcttttgtaccatgtcatattttgtagatcaaatcaaaaactaatgttcacacccttcatggaactttcaacccagctagctttttcccccaggcatacgtataccatttgaattatgaattcctctagtgtgtttgcactgatgtcacagttcggcttttatgagttttatctaatgagaatggtgttgactaggtgatttcgatgtctttttgacagtctcctggtgacatcagttcatattttttgcaaagcaatgacacattttggcattttagacgtgccctgttgcaaacgttgaaaacattgtgaagtggtagctgtggttaagatctgaatttgtcaagcatgttgcttaacgttttatctccatcaactctggggttttcttgtttgcaaagcgcggcacgacaatgggaaatgtcaactagggacctctggaattattctatgggacggggtcatgtagtctgctttgagattggtgttgaaatcttccccgtggattatttatttatttatttttaccttttttatttaaaattttagaaataaaccattcaaaacttattttcaaatctaaaactgttggtcacgtggcaagggttttatcaatccagctagattgatttggcgagacaacagcccactttatagccattatgggagacgtagcagagttgttttgtcaagcagtgcgagatgacgtggttagaccaaaaaatttagatttgaaataagttttaggagcatttattttaaaaactacaaaaggttcgaaaataataagaattcacgtccatgcagggcgatgaaagcattacaaagccaaagctgattttaagttttaaaacttttttttagaactaattccgtgtgtttcttcgccgctttcattgtccaacctttccgtgatttagtgcaaaattattcctgagaattaagtaatttttaagaattgaaaaatcagctaagcatgcactcgtttgccgctttttgcatgaatctagtgaaagatcgcgattgacatgaacgtgcggcaatttgaccaaggctctccctttcccagccactctctttcaggtccacaacagtagcacaatgcaaaaaatcacgagcaaatcaaaactcgagataaggcatgacgaccccaattggcaacttgcccttttctgcaaacttcacaccgcgagcctgacgcggttgaagaagtatttattaaccctatttaattagggttaattgtgtccggccgacctatgagcacatgtggagtattaatgaaggtgtttctatgtttcgatccggaagttatttctgctaattttagattgacctaattttaagaggatgaaaggtactcacaacaactaaggtacaaatttaccacaaggattctcgtcgtaatcaagaagacataagagatcctagaatcatatactctctctctctctctctctctctctctctctctctctctctctttctgttctttgtacttgatgcatttatcttaaccgtggattacatggacagattaggacagaatccacaacgacgattcctctcctgcattgtcaactatcaactgcacgggcacaaatgtactccctccgtcccattttaagtgcagtcagccatgattttccgtgctcaactttgatcgtccgtcttatttttaaattttttacataagtcacgcataaagtaatattcatgctttatcatctcataacaataaaatactaattataaaaaaaagaataagacggacgattaaaattgagcacggaaactcatggttgtatttaaaatagaataggacagtgggagtacaatccaagacgacgactaacctgcacattaacctaggcaccttcttcctaagatatagatataccagtactagtataataatgttaacaaaaaggaatatcaaaatgtgggttggattaagcctcacgatcccatttcgcgcgcccgacggccaacacacaaaataataagaaatcatgcccgcgatggctacctgacaccaacagccgacctgattgagagagatcaattaataaactgaacaacaggttaaatggttaactaatccaagtcgacactaattactctatattagcgcaggtctttttttctttttcaatagcactgcctccaacttctaatagatgacgccgttaacttttaaacaaatatttgatcattcatcttataaaaaaaatttatacaaatatataaaatataaatcacttaaagtattttgagtgataaaacaacttacaataaaattataactaattaatttttttaaacaaaacgaacggttaaacatgtgataaagagttaacaatgttatcttttaaaaacagaggtactaatattgattaagcataagcaggtcggctctttgaccaaacggcgcgaggaaggagcagaggcgggagggaggatgtctggctgtctgaacgcgtgaggagctcacactctgatcatccatccgcgggtgggttgacctcttcccggcggcgcggcgagagaagggaagacttcaacccggccgcggttggtggcgccatcactccccggcccccgcgcccaccatatacaccgaggcgtcgtcgcctccccgcaccttgcgcggactcttctcctcttcttcctccacctcctcctccacgatctccggtcaagcagagcacaagcgtgtgctagctctcccggtggcttgcctcgccggcgacggcgcggcgcaggatggagccgcgggtgttgatggctcttgcgctggtggtggtggcggcgggcgtgccggcggtgttgtgccagaccaacgcccaggacggtgagtgctcttgcctcgccgccggcgatcacctccgtttcttccatagatgattctaaagtcaggcaggatcttcttgcccggagaagaatcgcttggtttttgttgctggtgttgatgatcttcttcttgggcatgcatgcgtgcagctgcggcgctcgaggggctgaagagccaatggacgaactacccgttgagctggaactccggcgacccctgcggcggcggatgggacggcatcatgtgcaccaacggcagggtgacgacgctgtaagttacagccatctccttctcctcctaccaccaatatcatgtgatgggccttcctctgaaatcgtgccatggatgtctctggtttttgcaggaggctgtcaagcgtcagcctgcagggaacactgagcagcagcatcggccagctcggccagctcacgtacctgtaagcaccttcttctatcatcagttcatcacccagcttagcaaaagttcaaaacagcatgattttgcaggctatgaacttgggattttcgaaattttgttcatgcttctgtagcagttcagattgtgaattcaggcaatcaggctaggaacttctgattgaaccagtcaaggggcagattgtcagaacagtttgcttctagtttatgaactctgcttttttttttcttgaggcttagttcagctgaccagttcatgtttaccaatcttaagctttgactatttcggcaatgtgacatggattaggttcatttcttaccaaatgaaagaaacaaagatatgatgccaagttacaatagtaaatagatctggatgaaatatctgaagctttgactattttcgcaatgtgacatggattaggctcatttcttaccaaaagaaagaaacaagatactacacttgaagttaaattatcaatagcaaacgtacctggatgaaatgatccgtgacaaagttctggagtacaactaatttgtctaagaagaaatagtctagtagtagtagctgataacagaaacacttgcagggatctttccttcaacatcaatctcggtggtccgctgccagctgagattgggaaccttggggagcttacgacactgtatgcgccgcactgcccattgttgtcaacactactttttccaatcagaaataccaaactttcttactgatgtgcacaaatgctgtgtaattgtcaggatcttagctggttgcagcttcactggaaacattccaatagcaataggcaacctgcggaaacttgggttcttgtaagtggatatacctggtccacagtttcagatgataaaccctttttttcttttcttttgagtggattgacataatgaattcgtgccattctctatagggccttgaattcaaacaagtttagtggtggaataccgtcttcgattggcgtactcacaaacctcttatggctagacctggctgataatcaactcactggatctgtccccatctcaacatcaacatcaccaggcctggaccaacttgtcaaaacgcagcacttgtaagtaattttaatcttactttatggtattatcaattgagaaatatcagaatatgtaagtacttacaattgattgttttgctccaaacttcaaattgatgaacagccatttcaacaagaaccagttaactggaacgcttactggacttttcaactccaatatgactctcatacacatgtaagggatcgacaaattttcatgtctaatatgaataccgaatagatatatcttgctaacatctctccctatctcgtcagtttgtttgatagcaacaaattctcaggctcaatcccagctgaggttgggactgttagtacactcgaagttctgtaagtatcttgaaagttcacataggtggaactcatccttttattttctccaaaaaaaaaaatggtcatatctttgacttgcttttgtatctttgacagccgattggataggaatggttttacgggagcaatacctgctacaattggcagtttggtcaaactgaatgagctgtaagtgacatctgatcttaaaggaagagttatgacacttgaggcacctctcttgaaaatgttatcttctgcaggaacttagcaaacaacaagctaactggatcagtgccagatctcagcaacatgaccaacttgaatgttgtgtaagaaactaaccacccccatgcctcatcatccaatcatataatttgtctgcataactaaagattccactcttgaattgccagggatttgagcaacaacacatttgatccttcagtggcccccagctggttcacatctttaacatctcttgcttctgtgtgagttatccaaaacttttggaattttaaattttgtgtcgtcttgtgatgacaatttcatactcatctctatatgttttgatcactcagttcaatagtttctggaagtctttctggccaggtcccaaaggggctcttcacattgcccacactgcagcaagtgtaattttctggtaacttacaactcaacatat

SEQ ID NO: 5301 - DNA, 159989 bp, Oryza sativa
ctgcagtcatcttccggcccagagtctcacaaggttcagagtcccaagtcttctcagagaactgatttcactccttagtcttacaaggttcagagtcccaagccttctcagagaaccgataccgcaccagagtctcacaaggttcagagtcccaagtcttctcagagaactgataccgcaccggatccatatgatccatatggcttacatggactactgagggtaatgaagttgaaagaggagggaccggcatctcttgctttagggattgatttgacaacactagggttggatatgaactcttcagataatctttacaagacatttggctctccttggtcaagtgagccagttaaagaagagtattcttatgaaattccggattgctactcttctatgcagcctccacccctgcaagtaaggccctcaattttcgagttaccttcttttttctttttgtgagggaatgtttaggttagcattaatcttgttgtatctgacattacgatttatcttcctctgcaggcgttgcattttctgaggtttcacctcatgacactattctacatcttctacaggtacttagttcaatcaacagtgaattcctgtgttagtaggctatgcattatttgactgtcttttgtgcagtatgccacaggatgcagctcagttatatgccgcgaatgaaatgtaagcacaaaaccacagttctatattgttttctcatttgcctgtcattttcagtaaaacgatggcctggtatgccagatagctcagattgttgcttccatttcttcagatgcaaatacgggtgggtttaccacaaagagctgcgtcagtgggttaaaagagctcctaatacgacccctctcgtcaaaactacaacttatgaacaaggactctgctatctttttgatgccaacatttgggatgcaattcctaaggtaaacgtccgaaagaaattctgacagatattttcagctttttccgatagcagaagaaaatatatctgaaagttggttgcaggacaactttattctccgttatgacgatatcgagaagatacctgcccttcctccccttcttcctgccacccaaaatcctgccacccaaaatggtagtgtaagaataaacaaggtcagatttgggagtcccaatagacgttttttttgtgcacaatgtcaaaatagtgtcataattatgattaaaaaaagtgccataattcccttttctgatgtaagtttgcatttgcagccattgcagtaggttctccgtgttgaagattagagtttcatggcttggatcaattgttggtattattaaggtacagttaactctcacaaaatgattctgcaagaacttgtttagttctatagtaagttcagattaacttacttggtggcctaaactacattaatttcctctgaacagggtatgcatgctggttctggggatcggagctcctgcgatggccggcgtttgtggtagctgcgaaataccgcggttcataattcgttggctgcaatcagttaaacccatttttaagttttgaaacaaagttgaaccccgttttaattatgtttcggtcttgtgatgactgaatgttttgaatgtttaaacctgtttttacctgtaccgtaccagatatgtcgtttaaacttatcaggcaccgacattttggatcttgaatcagctcctgtcctgtttttttttttattattactttgataatttttggtcaggtaaaattttgccatgttgtgaacttactctctccgtccaaaaaaaaactcaatctgggcatgaatctagccatttccttctacatcctttttaggttgagtttttttggacgaagaaagtatgattcaagcaacagacaactggctagtggtaacgatctgacaaggacgacacatcgccgatgccgatggtggtggtcaggtaaaagttgccgtattgggtttggctcgcgtgctagtggtatgaatcgagtgctcgcgcatggacgccttcggctgcggcgagctcgatcggccaggcgctggtggttgtggatggcctgacgctctacgcgcgccttggcgccggcgccggcgacgacctcctctccggcctcgcctttggcgcggccgacgaggctctgctgaggatcaagatgaacaccatcatgtcatgccggccgccgctggaccaaggtgatcaccttcttctgcaagctgcacgccgcggatgcctgtggcggagcgaacagtggacacacaagaggattcttctgcacggacaccatcttctcgttcgacggcaacacattctgggcggatctctcgcagggcttcatgtgctgcgacaccgccatcgtcttcaccggcgacggaggcggctcaccaccacccgtcgatctcaggtacgtcagcctccacccggacagtagcggatccaaaaaaaaaaaagcaggtggggctgaataaattagataaaatttaaacctccattttctatatatgtggagcaaatagttgtagaagagctcaggtggggctcccacattcctaacgccagtagtgagggctgagatcccttagcggggccctatgtcagatccgcgtctgccccgtagtacctacttctccacaccttcaaatccgagaagcttggatgtatggagatgcaccacacctaggcatcttggacaacttcatcaaactcgtttccgttaacaccgcccgcatcgctgttgccgctgccacaacgaaagaagaagaagacatgccatcgtcaccgtgccacgccgccaccgaagcagccaacgcgacggtggccatatggactctggacaaatcagctgatgagacttgagacacgctcgacatgaggagcttatgggcgtaggaggactacaagacgtcacggttgccccggatggtgctcacgtggcccttcgtgaggctgcgggaagatggtgttgttctctacttcttagggcctgtttactttgttgccaaaaaaaaccttacaaaattttggcaatgtcattttggcaatgccaaaattttattaactatgccaaaattttggcaggatttcttatatagttatcaaaatttggcagcaaactaaatgtagccattttttggcaactttaccgaaatttggtaaggttgaaaatggcactaaagtgaacagcctaagccgctcaggacataaaatgacccccaactatatcacgtttgcaggattgacatgcacagcaggagagttctgctgtcggggctactctctcaccgctcccatatcattcatcaatcggttgccttgcctgctaatgtcttccaacatcttaggatgatccaatgagaagccacccatgtggtttccgcggagaggtgtggctctcggtagctgtcactattcgccattgtatattgttttttataatggaagttttattatctcagtaaataatataaaattattccgagagcatctctggcgtatgcacccaaagagtgcacccagccaacaagaaagaaacaaaagataatatcatcatccaagacaaccgaaaaactttaggaactctctaaccgtagcctagaactccacccatgtgctagggtagaaaactccatggccactaactccaattattggcaagccgcagtgatggtacccaacaaattgaccttctggagaatagcccatgagtagagcctatatgtagtaaaaaaaatataacctataacagagaagatatgtttttcatttcaaaacccacatcatttttgcaaagccaaatagatcaaatagtggcagttgccccaaataagaccaaatgcctcaaattgtgtagttgtcttcttatgaaatgcccaaacatatgagttatactattaggtaaactaatattcgaagcagattggattaaagaccaaaccgcgcaagataatcaaagaataaatgattaatagtttcatctttacgacaaaaagaacaagttcctctcccattccttttaatcagattatcttttattaaaactactccctgatataagtaccataagaagatcttaatctttaatctttatggggctttaatcttccaaattctttaatttatattgggaacatcggtatgcaccaacacaagatatagagatttaaccgaaaatctgtcatcagtggttagattccatttaaactcatcttggttgtgagaaatataatattagcgatgtgtgagagaaggtgattacacgccactaacttagagccagtaaggtccctgcgctaagaaaagcttagcagactagtatggaaaatttctgaaatagttgcatgtttatgcctaacaacattataaagacatgggtattgttctattaaataggcattccctaactatttatcttctcaaaaccgtacttgagagccatctttgatgttgaaagagtcaaatatgtgaaaatcaggcttagccttcattagactagcccaaaagtgtgactctcttgttttccaatgagaaggctgtgactccaaatattttttccttagcatttattgccacacaccatctatagtgagtagcttatacaactacttactaaagagaatcttgttcttaatttcaagatcttgaattcccaacccccttgatctttacgatgatgtctcaccttgctagtcggtatttccttttgtgtccatcctcttgccaaaagaaccttgattgaaaataatcaattttattgatcactcctttatgtatttcaaaaaagaacatcatatatattgataggctgataatcactaaattgattagtgtcagtcgccctctaagtaataaaagtttgccttccaatttgccagccgtttctcaagccattcaatcacctactttcactccgagctacaaagtctcctatggtgtataggaatgcctgtatattgatcctgagctgtttgtgtttctttttgtacgatataaatgaagtaactaatgtacaaatattgcggtgtagtaactactagtaactagcaagtgtactgtagttattacaagtttaagtctacaactaatcatgagccgtggcttcttaggaattcgcaaccagaattgcaaagaatcggagtccctctcggttttaggcaaacggaagaagcgatcgatcgcctttggaaggccggatccgaattaatcccatattattcgcctttcgcttctgcttgctttccgatcgatcaccgaggcgccgatcgatgggtcgtcggcgacggcggcgcaaccgcgacgccgagttcgacatggcggagatcgaccggatggtgccggtgatgaagctggaccggacgaggcagccatggctgaccgtccccggccgctcaagctgcacctgcgactgctgcaatgtgacgacgaagaagaagccgtccaacaaggctctcatcccggcctggctattccgatccgacgacgacgacgatgatcaccacgaagaatcagcagaagaggaggaagaagataatcagctgcaaggcctgaataaacacttagctgaatatcggattggtcaatatgagattcgtaagtgcctccattgcaagcagcaccaaagtataaatttcttgttcataatatgcaagtcaaatattgggacaggattctaaaccctcgaaggatatctcctcgtgtaactttttcttttttttcaaattcaatgtgaatgtttgtattttttttaaaaaaaaaacttgacccaccaaagacaaaatagaccctgtacatcctgtgtagaataaaaccttctcacgcaggtcaagaaagcccttgaacccatgccagcccttacacaatggcattggagaacgaccaacaaccgaggcctctagctgtaaaaattgttagcaatgtacattatagtaacttttatcaccaccaaaaaaatataattcaaattcgatttacatattgagaattaaaaaaagataaatccagagcactttgatttgattcttttattcctagatgggtgatttaagttttaacttgattttatatagagtattttatatatacattattaatgttgtcgtttttttataaaaagatttaccaactatttatatgatgtttaaacaaacaagattatattccctcaaatttaaaacacttgccacatactccctccgtttccaacatataagcatttttaactttgaccattaatagtaaaataataaaaaaagatcaatcatgtaaaattgatgttactagatttattattaaacatactatcataatgtgcaactcttttaatttaaaataacttttatagatattggtagtcaaagtagcatctcggagactgtaccagagtccaaaaatacttatattttaggacaaatggagtatatgaacatttcttgtcttgcaggaggagccacgataaaacgatacccttacacagatggctacgagctcaccgagaagctgaacgccgagctgccggccggcgagcggcgctacaccccgaccttcgtcctcgagggctcctcccaccgcgacggcttcttcggcctctcgtggcactccgagtaccggatgcacgagacggcgccgacatcgctgccccgctccaggttcaccacccctcacccccgctgggactacgaagccgacaacatgctgcagctctgctcgctcagcctcgccgccggcgccggcagcggcggtgatgggcggcggctgctcgtctatgggatcgtcgccgcccgcgacgacatggaggggctgcccaactttgtgttcaaccggacacgggacaacgcccaggaagtgacactggtgagtgacaatgttaaattttgagtttgaacaggatctatcttggctgaatttgaacaaattttaggaaattcaaacacgttcgatttttttaaaaaaattgatttgtttggaataattcagagctctcctgcactggagctgtcatctccactgcgcggcatctccgcgttcgagcatgtgttgctcgagttcgacctgaagctgaagaacaccgccggcgacggcgccgacgctgacgccgacgacgtgctggtcgacgcgtgcaaagagttcgtcgacaggacgatcacctgcagcgccggcagattgctgaggtcacgcatcgagggcccaatctgctcgctggacatggactacatgttcatcaagagcggcgtcgaggccgccgtcgaggtgttcctgggcgactcctgcgcgagctgcttccagagcgtggctgccgtctaccgcgccatcgccggcgacggtgacggcggcggcgacgggattgtcatccacgaggagtccatcccgcttcctccgaagctgatgctggccgccgataccgctactgctcaggccgccgcggtggcgacggtggtcgccgtgccgtcggccggcgagctaacggtgacgctcagcttcgccacggcgaggcaccgcacccgcacgtcgcctccgctcagctatctattcgctaggtctatacccatatgagaaatgcagttgtacggggggtcgtttcatgcttaacttcatggctcggttcttaattgaccggggacggcactagccttttccggacaccacccaaatcctccgtccgccccagtcgaaaacagttgtttaattttatttctcctttcacaaatcatgtcatcaacatcatggcaatgtggcgctcatgtctccacatgccgcatctcaattaccttcccaaagataattgcccaagaatatagcatttgataaatatgagtatgcatgattctagaatagcatttctaagcaattgtcataattgactagggactcatacgtaaacatggttacgaaggcataaggggtaaacaataatcaaggcatggcataatcacaagtaggatgttcatcattgcatgcaattttatttgtaaacaaaataatttcgcaattgggatcaacatgttcaaagaatagtgatgacttgcattgctcgtagtcctgcgggtcttgatcctcgctcggatccgcaactccctcgggtctaaaagtacgtgcgaagaattgatttgaattcaattagaattcaaatgaaatccaaataaacttaaataaaagtcgaacgcgaatcgatctttctatatcgactacaaagtttgcaaaaccacttcattccaattttaagttcattcatcctaagtctttttttttgtgatttagaagtacattcctaataattcaacataattatttagctcttaaataaatctaaatttctaccacgaattgattttgtatagagattaccaaaatattctataattatataaaattttgtgattctacaactaaaagaaacctacaactaaccccaattatttaattttccaaacctccttaatctctccctaattttctatttatttttcctttttcttcttttcaattcttttttttcttttctttctttctttctttttctctccctcccggcttctcccttcctctctctctcggctcactgcctacccggggcggcggcggcgaccgaacaaggggaggggcggcggcggcgcaaggcgggcgacgcacggcgcggcactccacgcggtgcggcggcaccgagggcggtggtgcggcggcacgaagacggcggcgcggtggagaggaaagaggggaaaatgggggaagaggaggtggggtggtgcggggtgaaatggcgaccggggaggggatttatagggcgcggggagaggtggccggccctaatggcgacgcgacggcgcggcgcgtggggcttgaggcggctacggcgacgggcgcgcggcgcggcaggcggcagcagcgacgcgacgggtgggtggcgcggcgcggggctcggcgcggcttggcacggggctcggcgcgacggcaacaggcgacgcgacggcgacaggcgacgcgacggcgacgcggcgcggcagcggcgcggggcgcgaggcggcaagcgcgtggcgcgaggcgacgggagtagagtaaatagaattttagcccaaaatatatggcatggaatttaaagaattagatatgggctaaatgaggttttggatttcgggtggagggataaagtctattctcttagcacaggagcaattgttcataataatattattctcgtgctgagaaggaaatcaagccacggaaattaaatcggcggctagatttaaagaaataatttggatcgagaattttaaaggatgggtcgacaattaattccaatgaaattggaattgcttgggtttaggttcaaaggtatagttggaggatttcttggaccatgattcataaaagtaaaaaggatttttaaactaaatttaaagaaaggaaattttggtcgaaagaaggtttaagatacaaaatcaaatcaaagagaatacctcgatttaacaagatcaatttttagaataaaaccacgaaagattttaaataccaaagagggattttatacaggttagttttaggaggtccctctaattataatttcttaggtttaggaagttattaagaacataagaatcggcatgatgcatatttagaaaatagcaaattttcagtatgttacatgacgcgacggcgcgacgggacggcgcgcggcgcggcagcggcgatggcgacggcgcgcggcggcaggcggcgatgggacagcgcgcggcgatggcgacgcgacggcgtcggcggcgcggggctcggggccggctaggctaggattacatcaagcaccttgtaggcaatgaatagggctagatccttattaaccctaatttagtctattttctatttaaatctcgccctataaattctaacttttgcacaaatcaagtttactcaatatttgtgttgctctaaccaaaagattcgccctagattaacattacacatattttatttttatataaattacttgaatttaattaaagttaattcttattccatcgcacttaaatttaattgatactaatatggtcgcgataatatttttatttattaccaacctcacttaatctttattttaaattatattttaattatttattttgccagtttaattttagggtttattcctaattaattattctttattcgcgatcaacgaactccgaaatcaaaatccaatgaaataggtgaataaaatcggcataatgcaatttgtttaaaaagtttttgaaaatccgtatttttagagttttgattttattggtcgaattttcagggtgttacaatagtacagcccactactaaggccctctttgtttaggcttaggcttattggcctagacttttaagtcagcttattggcttatatgatttataagacagtggatttaatgtcctaagtttagtggtggagtcatacatctatctcataaaagccaaaaaagcttctccaacctatcttttggcttaatagtgttagagtggcttatggcttcaaaaaagccaaataaaaaaaagctacttgtttgttttgacttagacttttcgacttataagctggcttataagcctaaataaagaggacctaactccaattcatttatagccaatctaatagccaatttatacaatagttgcttgctatactattaatatatggtcccacctgtcatacacacattgcgtcttagagttcgcgctgcagctggctacagatctgtagcccgctgctcttctctcatcttttatctcattaaaatgtttacaaccggctaataatccactattgtacctgctcttagtaggtgaatatcaggctaaccagatgtgtcagtaaacatcgaatggtttatatatatacaacagcattactgtcctacagtgccaaagatttgatctgaagggcactgctccaaaagcacctacaaattgccaacaactagccatggatatatgctttaccatgtacagtcacagcttgcgccattacacatccggggtgaagtgatccttgtggctgagaatctgtgcatcataagccgcaatggcatcaaacaccctcaaatggctgatcacctgagctccacaggcagcatactctctgccctcttccatctccttagggagatcatcaagcaatccttgggtgaaatcccttggagcgcccccgtcgtagacgaagtagcatggcttcacagcaactttctccaggttttcacgcagcaaatgcgagccgccgtttgtctccagtatctgccctccagcagctgcaatcaggctctgtatgtgttgtctgtcgtcagggtttatgtagacactgaggcaaaagttcagtcccgagaacaactttttgtgcctgaaagcatcgcattatcatcatggagattgttgcggcagaaaatttgctctaaagaatgaaatgtcgtaagttgcaacacaaagcaggtggaatatatggagttatgcactagatatatacaccttgactttgaacagcgatatgtaaaaagtatttttatgcattgttgtacccagttgtagctaggcctgtaagaaaatattactgggaaagatttgcaaatcaaattcctaagcttatacaagtgacagcctacgatagttttcactacataaaataagtctaatcttatagccagcgatgtatatgtaccccttcagaagcttgatttcttcttttcttgtttccaccaattgatgcacgtgagtcatggctaaatcttaactcaaaggaagcttctggacttggaataaactttaccaagcaatccataatccctaaaagagcaaggcgaagcacttcagcttaggaatagataatactctgcagatttatgataaaccttgaatggccttagggatacttaggtatatcaaacaatataaacgtaaaggaaagaatactcaaattggggtcctaaaagaaatagagaactgtagagaagatagctcaatactgacatccaaccgtgacaacccatttcccaaacagtagagccatcaggacctcataagatcggctccatgcactaccagcactttttccaacgataacatgggtcacattttcagtccactcgttgaccacagttgcatctgtccaagacgcaaactcttgcaaggaatcctgcttgaaaaacataaatcatgtttaccacaaaagctggaatggaagagttaacttcataaatgtagcaaatcatccactatgttgaattatccatgaagtaggattcagcattgtttgtccgtatacttgttcaccacaaaaaaagagtaatgtttgctacttctcacttatcctaccttctcggattcacttaaagctgaaccaagcaaaacccacagatccgaggggcaatctctttctgtgtaaaggtgatctgtttgcttttctttcctgtattcgtcagtggaaattccttctttgtccaagtattggctgcaatgattaaatacaacacaaatttatggaatgcaagactacaattgatcaaagaatcaggaaccttaaagacatctaacaagaaaggttaggaaagattgtgtacccctcaggaaaggaagaacatgaagtgttaagttgatctatttcccttttaggaacagcagaaattccttctttggctgaactttgtctggaacaacaaaaggcaaaagagaatgttgtaggtatttactccgtattagctaattcataaaatgattacaaagtaactcaaaaggcaggtgaataaaggtcatatacccttgagacaaagaacttgatgtgttccattgatctattataggatattcccattcgcaatcagcggaatcgctttgttcaattgacgattggctggaacacagaatcaaggagaaaaatacaaatgaaggatcaatgattaatcaaataccagagcctttgtataaccttccaagaaagcaataagattgaataacaatttcttattcatggaaaaacctctgagggaaggaagaagaattgccactctcatttcttggcgagcttatcttatcacatggtagtggcatcgttgcatgttcagggcacataacacaaccgttatcctgcaaaatgaaaattagcatctcggagcttagaacattagactattagagtggtgacgaatatcacaaacaaaaggatcgattacacaatattctcaagagcttacaacatcccagcggcaattcaaagtcatcattgcacatggaacatgatagctcctattgcactttgtataataacacccaagagctgctccaggaagcttgcatcttttgcacttcaatttcgcggcacgttttatttccaactccaagttcacaatggtatcaccttcgtaaaatacttgcggggcccttcgcaaaagaaaaaagtagggaaagacaaacaatttacccaagaaatagtcctttgagagtaactagctagtgccaactgttgcactggaagaagtaaatatagtttataatgtaaagctaaatatactaaaaataagaattgtctccaaatctagaaaattgaaaaattactacatgagatcaatcaaccatctacacatacacatgtgcaaacaaatcaactttttgcagaagaatatatcatgcaaacaacaaaattatgatgggggatggagggagggggatgtagaacgcaccatcacccctcaactacccactttaataccactccagccactggttatttttattaggtatggttagacttagcacgtctcaaacattgaataggctgtttaatggctaaaaaaaaatatcatgtgaatttactttgaaataggaatcaaaatggtaattcttgcatgccactaaaactatatatcatactgactaatatttggacataattaaacaaatggaatggttgtcttataaagcaaaccaataaggtattaaactaaaaaattatacaagggtccagatctcaacaaataaaaataaaaattgtccagcatccttgtatcttaaacctgcattggaagcgcatgatgataaatctaaattgtggtgaataagcatcaagagttgaaatatatttaggaacttaccactccaggcatttcttatgaacataaatgatatctgttgggcatggactgccattgtcactggacacaagctttcccttttgataatgcgccattggaccatgaaactgaaataggaaaagtgaggacctttagtgtcagaaatggttaagaagacctcaaaacataacctctggttaatagatcatggttcacctgaggaggtgttctaaatgaatggcagaaaacgcattcatcttcaaataagttgattggcgtttgcagtctcttcaatctagtagcacgtcccatgtcttttgacatgccatcgttgccatgttttccaggcatgttgttttctctatcagaatgttgtcgagtgttgcttagattagaaagaggcaatgaaacttcatttgcatctaccgcagctttctcatttgaaccctctgcagccaatgctgtcttattctataatagaaaaaatgtatacagtcaaactgttgagtatatgtgtagatattatagaaaaacttgatttttcttttttgcatgaaccaccacataatgtgtaggtccttgtccttgagcatgcaaatctgcaggactgagggaaagaattttacaagagatctgggaaagacaactgaagtaccctaacaagacgtgatttactcagaaagatgctttgcctagtcaactaattgctgttcatatgacttcgttgaagaatctcgagattactgctgtccctttctccaaatacgctgtcagccattgtgctcatgatctacaaggcagcatgagagtagggtgaagctgagagcagcagctggacaatattagtcccatcattatttaaatagctcccccagattaattgattaatcaaatcataagtagcatatccctaactttttcaatagtcttgtttgtaaaaacgagatcaattcaagttggaattacaaaactcgtcgcattattaaaatccaaactctagaccatttgcaaagaaaattcattggcaaacacatccctgcctttagcactttactaggaaattcaatttgcgtttatatgtccgttgttacaatgcaaccctgattcaggggcaggacaggagtaatcatgcatctcttactgacaaaaaactagtaaccatctcgcaccattcacagtggagttatattccaatgatcactgcttaaagttgtcgaagcaatcaagcgaggaggggttcctgggaggcagaagagcgccaaattttggacttcgaaagggggcaaaacgtatagcactgctaattctgttgatcattgtagcaatagtacacaaatatatatgcagctaatgaaatgaatgcagcgtgttgaatagactcaaaataatttgtgggtaaaacttttatatctgttcttagcaatgaaatgttttgctgtgttcttttgtaagagtggcagatagggagaagggttccttcgtttttcgcgcgcgcatttcccgagctgctaaacagtgcgtgtttgaaaaatatttactatagaaaagttgctttaagaaattatattaatatatttttcaaatttaaaatagttaatatctaattaatcatgtactagttcaggcgttcagcttgttttacgtactgtatattccaagtcttctcctttctcctcagggaaaaccgttggaaataaactatggtgagaaccctaaaatcaacaccaaaattaggttacaaaatttaaattcggggaagcgtaggtacccgcagcactacactaccgtcgtcgtcgccgccgaccatctgccggccggccacaccggagatggtgggtgggagggggagacacgtgcgagccggagggtcagaaatagagggggaaaaggaggggaatcaaagcgctcacctggtcggcgatggcgctctccgcccctctccctccccctcccccttcctccaccgcccggttcgcgcgcgcgatccgccgagcgaagcgggctacggcctcttcgccgccgccgccgccgcctccgcctcgggcagcgtcggcgagcgagtgagcgagtgagaggagaggaggagaggagaggaggagggcgcgagagacgaggcggtttgagaggagggagacgagacgaagcggacgttttgcgtgtgagctgagtggagtagtgcaggtgcctctcgagtgtcgacgacgacgacgagtcgactcgttttggtctctggacgtgtttagccctagcctagccgagacgatgcagttaatgcagccgaagtgcggtcacttcacagtcagttcacttcgctttgctcgctgtctctctcttctcacatccaatgagatccgaatcctgggcattattgtagaggtttattgtttacgccttccgtcccatgaaaaatgagaaaataaacgtttagctatctttaaaactggatttcgctattatgtcatcctcaaaacgtaattcgatataatactaatctcgagcgcgcgctactcgtcgcattgccattttcgccttttcatgatttccgaaatgttttttttgctgttcacgtggtgatcagacgaaaatacccctccggcttgccttttcttcatctcgcaagtgaaaggggatcgagcatttctaaaaaaaaaaaaaaaggcctcacgccctcaccgccgccggctgcttcttgcgcctccctccgttggctaggaggggccacaccgccgcactggccgaagcacgaaaggctgagggggttgtgggctcctcttagcaaccgccgtcggtgacagcggcggaagtggcttcttcttcggtggtagtgacagcaaagcaattgttgggaggaccgaagcgacgcagtggtggaagggggagttgagggcagcgctagggatacggaagtggatgcacgcggcggtgagcgcgatcttgccagagccatagtcaatgatgaggttccgtgcgatgtcgtcgctactgacaaaaacatcgcccatgacctccacctccacacgagtagagctcgagctcgagctcgctaaagggtgcgccaagctcgcagtggtcatggcgctctagctcatccccgcgcatgtatcttcagcgagctccgcgtctctgctcgaagctgcttcgtccctgcgccactccctttgtcgaaacacaccgctcgcactgccaccaccgccatgccgaaggggagagagagagtgggggaagaaaggggatggggaagaatatcaacgccgtagggtgataaggggcagttccgtcttattacccagcggaggagccaaaatctttttggaaatgaataaaatggtgaaaatggcaaagtgacaacagatgcacgcttcgtattggcattttatcgaaccgtgtttttggggtggcattctagcgaaaccgtgttttgaacgtggccaaatgttcattttctccatgaaaattatggtccaactatgaatttgaacacgtgtgtctatatttatagttaagattgattttttttaatggagggagtactccctccgtccataaaaaactaacatattggatgtgacacatcctatctacaaatctggacatccagtactaaattggttttttatgagatagaggaagtatgtgagtataacagtggatcaatgtaatgaataccgtcgatttatggtatctacaataacatgaaaattgtagcacacttttatttagtgtagtaatgatgtgtttagttcacgtcaaaattggaagtttggttgaaattggaatgatgtgatagaaaagttagaagtttatatgtgtaggaaagttttgatgtgatggaaaagttagaagtttgaagaaaaaattaaatttagagctaaactcggcctgagatatataggccttatgcccttgatcggatggctgccaactcccataatttatagtaatcatgttgatcctctgccttacaacgtctctaatgcagagtagcatggtccatcgtaatacagttagtaatatgttaagtaatacttccttcatcccaaaataaagggttttagaatggatgtgacgcatcttactactgtaaatttgaatagacatttaaattcttaagacatccagatttgtactattgtgatgtgttccatccattcaagaacctgcatattttggaatggagggagtacttcctccatctgaagtctaaaacatgcttcttccatcccataaaaaccaatttttgattgtgtatcttgacctagatacatagtcagtagttgattttatgggatgaagagagtatttactattttttaagcaagaccaaagaaaaaaaattaacttatactaagatgcatactgttaatgccctaaaattaacttatatgatgcatgctgttaatgccctgaatatgggatacccaatacttaatacatcaaatacgaaatcaagtctcatacatatagcaaaaatcctggataaagaaagagaaatatctactattataaaaattaaaacttaaagatgtttttactggtattttggtacgtcatccgtatctgagtcaggttttaagttcgttcgtttttggaaatacagatgcgtgtttgagttagattttaagattgttttccttttggaagtataataggagtcgtataagaaatctttaaaaaaactcgcatgctagcatgagatgaaatacgaacctaattgtagctcatgatttcctgaaaaaaatatccaaacgacttcccacagtgaattttatctaactaaaccgtaaacaataataaaattaaaatagcatttacccgttgcaacacatgaatattttttcaagtaaataaggaaagagaaataaataccactcggacactacaaagtctagcctgtttgaagggaacgtactttagctttcctgctacccgttcgcaaaaaatggtgaaactttaaaagtcaaattcgcttttaacgctactaacaggatttcaaaagcctatatttctgtagagaatataatacgatgggatttctagggccgtcaattcagaacgagcattcagatcatgatacatgaacaccaatgctctttaccgaacaaaacacaagaggattaaaatgccaagcagcatcaaactttgctcagaaacattaagccaagtcaaatctcgtaatagtaacacaaccaaagaaaaacatttttcccacatagcatttcaaacttcatgacattatctccagtggcgatgttaaaacattttggcagtagtgctaatttaacagaggttctacagggtagcttttgatgagatacgatttagacagccggcgagaaccaggcgaccctttcctggggatcaagaaatcttcagcgctttccaccaccaccaccaatcttcgggcccttggaacccctcggggcggcacccttcgactgcgacttctgggacttggttacctcagccttcttcgccttcttttcatccttggtcttcttgatgcgttccttgatctcactgcacaatgcataagctcagatgaatttagtcctttagcatcatcgaaatgtatatcggaggattatgcatacacaagatgcaataggggattatgcatgaatatgaacagagagttcactaggagcagacatccaataagaatgggtagcaaacatcatgttgcaatgatacagtgagctgtgcagaacaaaggcagcaaacgaaaacactgcttgagaagttaagaggcaccgcatgaggtaagggctaatgcagtgaaaatgaaggcaaaatgtaacccatatagagtggcaatgttctattccatgggtggatactttgttggaaccagtaaccagtctaaatggcaatcattcagggaaagagcataccgaagagcagcttctctagcagcatcacgaacttcaggcttttcagctctcttcttttggatgacttccaacgaagcaccaacaattgacctagagtatggcttcttggtggtgcggcgcctcttcttgacagcttcagcatggatatcctaaaaaacagaaaattgggaaagggtgtaaacagaatttatctgatcggaagcaatacatagcatgactaactgtacatatatacaaggaattgagcataagctgacaaagagaactacatggcacagacataaccaaagtacccaaacatacaatatttttatctgcacgcaaacactgcaaggcgcttatttgaagaatcaacatgatgtttgcacagtaaaaaaaaccgcaatcttgaatgtagacggtcacacttaatcatacaaacagacatttactggaatccaggtttgatagcttaagaaacaattaacttagcatttcaagcacaatacaacattacaaattttaagcattcggctcaacccaacaaatttaagaaagcaacggtcagtgaacaaaaaaaaaagggttaaaggtcatccagttagagtatgtgcatataggtgagaaaacgcccgcctaaatctagatacaataccttcttgtgctgcttcctgtacatggctgtccaggtaagctttgcaggcttcaggcggttgtggaagtagcgcttgcattttgagtttgcaaaaaggaagacctgtacaatataccaatacgtttacaacaaccttctaagcagagaaatatcctgacattaaagcaatcattcgatgaacagcctgacctgtgaatcagcacgaataaagcgaatgcccttccctggatatatcttctggccactaaaacggcaaagctctgtcctgtaggataaaaataaaagtaatagttgaaataccttccaaatatgaaatagtactcattggtaaatcattgctattaaccttttactaccattaaccaaaaaactacatagcctagagcatgcacaggataaaagggcactaaaacaatctacaatcatattgaaacaacaaaatatacacaggaacttacttcagcaccatcttctcagcttaaatcctcacagaattctgccaaatttccaacatcaaaagaaaaaggaatcaggactagaatccagaaaacaaaattgtgcagaggtaatcatggaacattaaaaacctacatcaagatatcgacaatacacagacagggtaatcatctcaaattttaactattaaaaatgtagggattctacaggcagtagaagcataatcaacttagcttagctcctgctgcaaggatactaccctggtccatcttgcacattaatcaactaggctactatgcaatcacaaaggccatagcacctgagtgcgactgtgcgacacacacaaggttcctcaaatgctcaaagcactcaagagaaccagaaacattgcagttcatacgcgcatcggattaccatccatgactaggaatccagaaacccagaaaggggtgaactgtcgggtgactactggcagaagaaacatgagacaaaccttccctgcaaagcgggttccctggttcatatagcacacacaagaataggctactacgccatcacaatagctatatcgcctcagtaccggtgctttccctcgcatctaacaaatctagaatctatcaaagaagcgcagctagtcatgataaatcagaccaaacagaataactacatactccacaaaactggaatccttcctccaaaggagtagcaaccgatgtatatacatcgcactacactacaggtaatccagaaccccagaaaggggtgaactgtcgggcgactactggcagaagaaacatgggacaaatctcccctgcaaagcgggttccctggttcatatagcacacaaaagaataggctgctacggccatcacaatggccatagcgcctcagtaccggtgctttcacacgcatctaggcaaataatccagaatctatcaaagaagcgcagctagccatggtaaatcaaatcaaacggaatcaccacggtgtcacatactcaagaaaaccggaatcctgcctccaaaggagtagcaacagatgtatatacaccgcactacaccgtgtcaagatcaactataagagagaagaagaagaaaccatccccatttacaagctcaaggatctccggcatttcttcttcttcttctcgaatctagcctaggaccgccgcaacgaccaacccgccctaattcttctagtcgctcgagggaaatgtaaagggcagcagaggcatagacgctgcaagaactatctgcggcggtggtagaggcgagacgaagagcatttcgacgcgataccttcggagcgcagccgtcggcagcggcgatgcggcggtggcggcggcggcggcggcgcgggagggagaggggggagcagcgtgtgctccgcgagggtttcttatgagacgggggagagctcacgagtgggccgggcttaagattggggaagttaggaacaggcctatatgggcccgatccatcggcatgtgggccgtcaggttgaatcctatgcgtatggtccgtgggcccgtggcccatcctaatctgctttgcttaggcttttttttttcattttcttctgcgagatgcttaaccatcttttttccccattttgtaatagctcttcgtttttattacatcatctgagagagcatcttcctactagggtctgtttatatttgagttgaagtgcgtatatttggtactaacttttttttcgtagtcaaattgttttcactttgaccaaatttattaaaaaaaagttagcaaggtcaataacgccaaattagttttattaaaactaacatttaatatatttttataatatatttattttgtgtcaaaatttttttttatatttttctataacttttctagaaacacattaacatttaatatattttgataatatatttgtttcgtgtactatattttttgagaaacacagaataaatgcatgcgctcaaaacgtgcacacacccactcctatgagcacctccagaagactggaccagcatatctctagatcgatgaagtcaccacgggcgtcaatagaagactagaccgatatattttgaggttgatgagacgaagtcactatgggtgtcgatagaagacttggtcggcatatcctgagattaacgaagtcaccacgagtgcctatctgtcgatgggtaagtcgcctatcactgaaaatataattagccgtaaatacaagtatatatgtcaattctatgatttgagctcagatgagctgtttccatcacaagtaatctagttgagctatactcatttcatttctatagattcgatcaaacttaaaattttaattaatatttaagtaggaaaaaaataaatagtagacgtgatttagtttactactccatctgtttagtctacgactttgccagcagacaagctgaggggcaaaacggccggcgagcatccacggtgctagtagtcttcaatatgaagcgtcgccgtcgacggccggccaccgccacacctgcgcactcgtcatgccgggattttcgccggtgcctatctagtaaaaaaaaatcttgcccacgtctaaaacaaattatttattgaattatttttacaaatttagttataaaactaaattaaatatttgataactaaagttaacaaaaaagctttcaatgcagtacaacacggtattttcatgaaaacatactttttttaaagactcgtgggaaagaatttagcctagatatagttgatggtcttaaattattttttttcagacaatatgatatttttgctctttgtcttaaattaacatttgagactgattctagaaatgtaatttgactaacatgaaatttaataatataatttattaatcaaaatattattacaccgtagcattagcacgggtaaattactagttctatgaagtactagaaagaacggacatagagcctgtttggggaagcttttagtagctgaagatttttctagaagcactagttatcaaatcctccctcaaacaatctagattttcattcagattctaaaaagctgtagctgtagaacctagggatggcaattttcccgttgggggcggggacccgccgggtacccacccctacggggacggggacggggcgaaatttcaacccgcggggctgcggggacggggcaccggaactatgcgggggtgggggcggggccacaggctcacccgcgggtgacccacggggccccggaatatagggatctaaaatatggcatacagcccataatcaaatttaggcccatatagcccaatatatatatatacagatcagtaaagagaagccaaccctaagacttgtttggtaacttgagggaaggggattaggagtttacacgagggaatttatgatgagattaagatgggaatttgatttttaatcccaatgtcttgtttggtagatgtgatagaaactgatagggagtttagttggagattagctcattaataaaaacggatggctgagatttgcttagacaaagtaaaggagaaattccctcccaattacctgcccctacccaggtattgaaaaggagggagtttcttcctcaattccccatcccaatcccaccaaaattcccatgtctcccaaccaaacaaaatacttaatagcctcatccctctaatcccaattcctcttaaaaactccctccaaccaaacgggccgtaaaatcaatcccgtgagtttgtcgccgccgccaccaatctctattctcgttccagtagttttgacttttgacgctatcccacaaatcacgcaacacatcacacgccgcacgccgctttggcgcttcctcacctccacaaatcacgcctcgcgagttggtcccgcaccatcaagtagcggcggtcggcgctcttccacgctgcccgtatcgttgctctcacggacgccgtctccccatcctgccatccgccgacgccccatgtcgttctcctacctctccagctgccggcgcctgtgctgttctcctccttctccgaccgttcctctccctccggctgctgcaggttccccacatcattattcccttcctccacccggctgctgcaagtttcccagaccattctttccttccttcggctgctagcagtcgccgcttgtatctgggtgcggggacccggaaatggtgcggggccccggaggggccgggggcggggattgatttcgccccgttcctcactccggggccggggccgggtgaaccctcaaggatgcggaggcggggccgttcctatccaacccgcacccgccccgtcccgccccgttgccaaccctagtagaacctataaaataaactataaactaaaagttggcttctccatattcttacccactgtttctcgtaattttaatctcctcgagacaaaggtcatagtttgaccgtcaatgttcagttcgctctcactgggacaactttcagtttttcagcgccgtattgttatactagcctagcacatgcatacaccacacattatcagcgttttttcaacaagacggcaatttaattgacaaggatacgcattgcatttgcaaacgaattgacaatgccactaactcgccgtaacgtatggccggcctccgtgagaatgaaatgcgagtgagactgatcaaatcatttcattttatcatgtaagtgcagtgtctagctaaattcacgatgagcacgcaacacttcagtagagaacaattaagaacagggtaggacgtgccatgccacacgaggagtttctatacgtacgttctctatcttaaataggaagaatatatacgcaaacatctccatgtagtgcgatttctcccactacatccactccactaattaaggtgtgatttctcccactacatccacccactaattataaggtggcatatatagccacatgttaaggttttagaattcaaatgtcgatgtttgaacaaggatgagatgcacgagacaatactgatttttacaaacacctgcgtgcatcacggaccgtttaaccgtaggcgaagatcgatttcgatcgcttgatctgtagtagtgttcattcatagagtatatttcttaaaccgaaccttagaattgatagattaattgagtcagctcagaccgatcagtgaagtgcacaactcttttaaatcacaataagaaaatcccttaaaagtaataaggtagagctatattacgtggcgaaatcaaaaacattaattaggttgagttctttagttgatcgaggttaggaactaacatctcacgcacgtaaaatgaagtaatttattaacttatcactaattaagtattagctgaacttttatgaaaaatgaattaatatattttttaaacaacttttgtatataatttttttaaatacgtattatttagcaatttaaaaaacatacgcatgaaaaacgagagaagtaagtgaaaaacgtgaacaaataaactcaaccagagtattaagaacacgctctttgctccgtggctcgctcttaaaatgggttgtcaatagacacgctcgctaaacgacgtgcgttttccatcgtgcgtgtactgttgctccacaaaatcgatgaggtcaaaagaacgaaacagcttccattcacacgtgcgacccgagctagagtagttttaaaagctaacacgtgcgatcaaaaaagtcgtggactggaggcgtggccgtccgatccggagtgaagctgacagcgaattttctttttctagtgagccatgccacttgtcgccgtacgttcagttggtccacggccactgtacaggctgtttagatttaaagtttagatccaaactttaatcatttttcattaaatcaatctatcatatacacataacttttcagtcacatcatctctaattttaaccaaaatttaaactttatactcagccaaacattaaatcgatctgaaagcaggagtagccgagtagtacggcaatagccgcaatatgcagacatgcatccactaaactcgaattcaaagacaagaaattttcttactgccacaaaaaacaatcatgatcaaagcacgtagtaataattaacctttctgggtaacgtaataatgctattagcagcagcactacccctctatctaaaaaatacaatcctaatcctagctacgaacttgaataactatctctcagtctaaaaaacaatcctagttacgaacttgaacatatatgtgcccaggttcgtagctataatttatttttctgggacggagtagtacgccagtaagagattagagtcaattttccttttaaaaaaagagattagggccaatttaaatagtaggaacaagaaaacgaattaataggaaaaacccattattctaacagaaatagaagtgtaaaacaaataatttaaaatacaggaaataccatgtgattgtaccgtaggaaaaaaatcatatgagaaagataaactcaaaggaaattttctaagagttttgagctcttgctaagttttctacaaaaatctctgtagaattatctattcaataggaatttcaaaggattggatatgattcaatcctttgattcaaagccattctttgaaatcttttctataggataaaagttatcttaaaatttctatgtttttcctccaaatcaaaagggtccagtgtataaaatacataactgtcaacaattaaaagcgttacgtcatattacaggtgaccaagagatcatacatataatagttggctatcgacacaatttccaatagattgatcatactttttttaatttaactttcacacgcagatgcttattatactacacataaccccacaatcatgtttttagagcaggtacaatagcagattataaactagctataaacacatattaaggagatgaaagaagagagataagcagcgagctataaatttatagccagctacagcatggactccaaaacgcaatatgtgtatgacatgtgagaccaaatattaataatatagtatatatttatagataactattatatgaattagctattaaattgactatatcagataattttgagtcagtagttagctatactattaaacttgcttttaaatgtgtttggaaccgacgccaaatcaatcacctgcgcacatatggctcatcactttttcttgcatgcatgcattaccgccagattaaactgtatattagagcaagtttaatagtattaatagtatagccgattatgggctccaaatcatatatagttaatttaatagtcaattcataccatagttatctttaagtatgtgctacataattaatgtctgatcccacctatcatacacacatgtatcttggagtccatgctgcagctggctacaaatctgtagcccgctgctcttatctcttctcttttatcttcttaaaatatgtttatagctggcttatagtctactattgtacatgctcttatagtttctctaattactccctttgttctaaaatataagatattttggtttgatgagacatatcttataaatagctctagatttgtagtactagaacgtatcctattcaattaattttttttatattttgagacgaaaggaatacctaactttacgcatgtcaaatcttgttgaatcatcacagcgatagtaaaagttctctttttctttagaggaatcttaaaagttttctagttcttacatcacttgagaacaaacaacgaaatcaaatcttgtcattatgcaaacgcttcagaatgtctaaactgctcgttgtttgcttgcttgtgccgcccaactcacactgcactagcttgcgatgacagcattggacatttgttaatttggatgatatctccattgacaaaatatctggcagtcgacgtagtcaaatttaatgcaggaatgagttgtaaattgtaatcacatggagattattgacatgactgctgttagtgcagagaacttgtgtgtgcgtgcgcgtgtggttttgacctgaactgtagtggtgactggccaaactgcactgcagcatcaatgtgctgtttagtgatcggtgtggagggtcaactgaataaatttcagactttagcagcagcagcacactgaattaatttgagaaaaaaaacaacatagtactagaaatctcatcagtagttcttctgtccatgaacagtggcagcaactatcagtcgaccactcgtgactaaccaggtcaagatcactagaccagctcgagatcatatgaagtttcaatggaatctccaacaacatacttcctttgtcctataaaaaatcaaattaagataataagagatattttctagtataatgaatttaaacaggcttttaaccagatttattgtaatagaaaacattacatctaatcctagattggtttttataggactctttcctccttcagtcccaaaataagtgcacttttacactgttcatgtccaacgtttaaccgtttatcttatttgaaatttttttatgagtattacttttattgttattagatgataaaacatgaataatactctaagcatgactatttgtttttaatttttcataattttttaaataagatagacggtcaaacgttagacacgaatacccacgactgcacttattttaacgttgtagatgacagtccgacagtgacatggttcatatgattccctcagcagactattagaagctttgattagcctttgccaatggctgctctcgcttggatttaagctcctggcactggccactatagcccactagccacatagtactatggagtatggacctgcttgaaagctgtagattccaagggcccgttcgaacgagcattttggctcagctaactggcggcacttataataaaataatctattaatgcataattaatcggttcctataaacttaaaaatagaattatttgattttagaaaagccttttgtgtagaaaacttttacatgaaacacaacgtttagtaattctggaagtgtgttcacgaagaagaacgagtaagttgccattgtaaattgctctctagaacttagcatacaaagtataaagtgagtagtagctagctggtgagaatctaaaaaggttgaaggttttaatttctgatttttagtttatttcctaaagtgtatagcttttattctcgtaatatatacttctacatgaaaaagattgactacccggtaccgagcaacttgtcatgtgattgactttatgatcaatgtcctgatgtgcagtactatctccaagattggaagatgacgagccaaatgacgcagtttttgcatcgaagcgttgaaaccggttgtcaaattaaagtatttcttttcttcagattaaagtatatctgcaaattctttaagctgcattattttgacttgggagcaaccagccaagaccacggaaacaagagtgacatgggcaacaaagtcgataatgtacctagactgagttcttttcatcaaccccaaaccgtaattttttagcatgtttctcaaacgattaaatgatatgttttgtaaaaaaaaattgtatatagaagtaactaaattaatttttcaagtttgtaataactaatacctattaatcatgcgccaatggtttatcttacgttcgtgaaaaagtgcagccgaaaatctaccactagctacttagaaaagaacgcacccttatattaaagtataagtgaattgtttgtcttttttatgagctaagtttttatagtttatattgaactggatgatacatacaactcagtataacttctctttgccccaacacccaaaaaagtttcataatctgtggcactgtctgtgggcctcatcgtttggcttttttcgtaataagccaaaacggcttattagagaataaaaatgaatttgtaggtaaaacttttatatatgtgttctcggtgacgtaaaagccaatgctgaaaaagaaactacgttgaaaatatcacaaaatcaatgttaaaattaagtttgaaaatttaaattttgcctttttctttggctgaataggccatccgatggaagccattgttgtaaaacatggtactcctagcagatattcggttgaagcaatgccaacatgtcatcaagtacaatatcttatcctctttgtaaaaaaaattataatcctaacttcgaatctagatatatacatatagaggtttgtagctagaatttgttttttttaaggcagatcttagtagcttccaaagccgtcatgcattggttaagccttaactaagcctaacgacatatgtcaatcacgatcataacttgactgagagaatgttgttgcttcaaggagtaactaacagtgcgtgaataaatcctgtaccactcgagaaaaccaatcattgattgctttaagtatatccattcgtgccagcgttaattaggacaagaaataggttgtattacaggttgtcgtcatgaagctgaggcaacaaagaatgaagaaaataagactaaacgaagtaaaatcacatgtacatccaggttatactatataagctgggctgggatttggttattacagaatgtctacacttggagtaggtgatcaatgagtattttacctagaaacatatgtgacggtctagttttaaaattgatggtccttaatactttttttactttctttcttttaaactggttcatgtgtgtcttggttgtgtacatcctagttataccgagatcgagaatactccaagcacaattgtattattttgatgtaatgtgactaagatcaaagaaagcttctatttctaacaaaatgtacatcctagctgtgtgtttctttgcctgcctgcaatggtgtttgaggctaaagagctatgcatgcacatttaacgttgaaaaatactttcatagatatgactcaaaaatactttatcaatcaagctgttgctccaattagcttgcttgtagtttcatattatctctgctatgtattggcaactcctagaatttataaattgtctacgaaacatgtttttttcgctgtggcctaccctcaaaggctcatgaaaatcgacgagtttaaaaggcgggcacgctaaaagacctgcctaaaaaaattgattttcgcgggcggcacacttaagtcactcacctaaggatttctagtgtaaaaagatgaaattccaaatcctaatatcctccaattcacaaattcatgatgcaattccaccataacaaattttaaaaagatttgacaaattcacaatgcaattccaccaaggacgtcatcatcgacatcccaacgtcggagtcgtcctcttcagcgtcttcttttgggagaagccaacgcaacacaccatcattggtgttggcgagggagggcagaggccggccacgacgaggtctgcattatttttggtcacaactatataggtcatgaggtggcggtgccatataggtatttattaaaggcatagaggagaggaagaggtgactaataaatgtggataagtaataccttgatataacagttgataattttatactaacacaatcaaatggcttaggactacccattatgtgtatctggttaaatgtgaacactactaaaaagacacatgcaggttttaaaaaaacagtattacccaaccgaggaggtggaggtgggcgacaaggcgatgctgctcctcttggaggcggaggcgagcgattccccctcccccttcccctctcggtgcaagacgacatcagtggcgtcgacagcggggtagggcagtgtcagcggctgttcccgtggcagcggacggggttgataatttgaaactaacatgatcaaatgggttaggattgttaataactgtagccaattaaaggtggagagaatgggtagagattaataacgaatgcagataagtaactccttgatctaacatttgataatttcatactaacataatcaaatggcttaggattgttcatgacatggcttcgtgcatgtgcttatattcgtcacaactatataggtcatgaggaggtgttactctacaggttttattgaaggtagagaggagaggaagggacgaataaggaatgcagataagtaactccttgatcacgattgattgttttatactgacatgataaattgacttagcataatcatgatgtatatttgttaaaggtggagaatagggatagagatgactaatgagtacgggtaagtaactcattaatcaaatggttgattgtttcagactaacataatcaaatggcttaggataagagatggctagtaaatacagacatgcaactcatttatccaatggttgataatttcatactagcataatcaaattagttttgattcactcatgatgtaaatctaattaaatgtggagagaagggctagaaattactaaaaataaatgaggataagctactcctttgtccagtggttgataattttatactatcaaatgacatagtatgactcatgatgtgtatctatataaaggcatagaagaggggtagggatacctaatgaatgaggataagttactccttgatccaatggttgatgtttttgcactaagataatcaaatggctcaggttaagagacgacaaataaatgcagatactctttgatccaacagtttattttgtactaacatgatcaaatgggtaaagattactcaacctaaacataggtggagaggaggggtagagatgactaatgaatgcaaataagtaactccttaatccaacgttgatatatttgtattaacataataaaatggtggcccagcataagagaagagttatcattacagataagtaactccttgatataatagctaattttatactaaacatgatcaaatggataaggattactcgtgatgtgtagctaaatataggtggagaggaggggtacagatcacaaatgaacgcggataagtaaatgattcatccaacgtttgataagtaccccccctccccaaggtagcgacagcaacactatggaaaacgctttatatcgcacgtccgacgaaacagaaatatcggacgcctcatctaccacactaaaaatgctgcaaatcagcggcctgatggatcggacgaaccctatcactgtaacatgtatgcctagctatttcttttcattctttcctcctctctttaaatattttttcttctaaattacttatccaatctacgaaccaatcacactattgtattcgttgcaattaaatatttacaacaagatatcatataattatattatgtcaaaagaaaaacatgtgtttcaaaccgttaaaactaaatgtttcatgcgtgatagtgatatgtttcaatgtgcgtcttccgtgtgtttcataaagagcaatgctacacgtactaaatttttctgactaaacttttactaacaatcatttcaaccgtttgatttaagtagatagaagttataaaaaaatctagatgcactcatagcatgacacatcagtattagtaagaatttagtaagaaaaagttagtacgtatagccttttcctttcataaattttttgaaactaactgctactactttctctccatctcatccatgcacacatgcatgtattttagcaaacttcaaaataatttttctcttaaattatttatccaatctatgatccgatcgcaccattgtattcgttttaattaaatctttacaacaagatattgcatgattatattttgttgaaagaaaaacacatgtatccgttaatacttgctgtttcatatgtgacagcgacctgtttcaacgtgcatcttcaccatgtttcataaaatatttaaatgtttcagttgctgatttttttgtttcaccatatataacttaatgtttgacttgttggccaactgcaatatttgaccatccgtttttttttcatcggacgtccgatgggtagctttctcccaacactacgagtcaactacccatcccagtgccatccatccatacatcatcgtctcctccgaccacagatcacacacacccaaaaaaaacaaatactccctctgtttcacaatggaagactttctagcattacccacattcatatagatgtgtctcgattcactaacatctatatgaatatggacaatactagaaagtcttacattgtgaaacgaagtagtagccacgagctcttttttctcgcggccattcttggctgcctcggttgctacctcctgcatgtgccgcgcaatggaaatgaggcctcgtgatctcgccgccgtcctggctatgtcctgcctattgctcctcccactactcgtctcctcggtgcccgtgtcgggtaaagcttcgtcgtcatagatctcctggaattcttgatatgtgttttgactagttgataattataatttgcgtgtcgatgcgttcttgcaggaatcgtgcacttgagcagccaacaacaacacccgtcatctcgaaacatctatgcagatgtagttaatctttctcatgtccttcaatttctgaattcccgtaagatttaaattaatttgttggcatgttactacaaaatctcgtagacagttcatagccacctttacaaaccaattctaaaatgaatatgtactttctgaaggctaaattctgaaacaattagtaatgttggtgatagtgattctgaacatggctttgtgtatgtccatgcagggatatggtggcagcggcgacggacgtggaggtgaatgactatccagcgctaagagccaatcctcgccataaccctaaacgtccactggggagagaaatgtccgtccaggacatggtggcggcaacgacgaatgcggaggtgaatgactacccgacgccaggagccaaccaccgccataaccctaaacgtccaccaagaagagaatgaaatcaatcaagctactactggaactagctagcatgtagttctgcattatttctgctagatgtcagtgactctcagaattaataaagtatataattacataagtcaagtgcactattacgaaacaagattttttttcgaggtggtcaaaacgcgatttgcacatggccacacaccctgcctatgattgaaggcttgagaagatctacagttttcgaaggcaagcatcctaagagacccacttgcaaaaatcaattttttataggtggcacacttaatttacccacatacaaaaagaatttctagtgtaaaaaatgaaaatctagattttaatatcctccaatttgaaaatcagaatgcaattccaccatcacaaatttaaaaaagaattgacatatcaaatgcaattccgccaagaacttcgtcggtggcatcccagtggcagagtcatcctttgcgcagtggcagagtcatcctttgcagtgtctttttcagggagaagccgatgcagcacaccatcactggcgttgacggtggaaggcgaatgccagccgcaatgaggtctgcattattttggtcaaaacaatatatgtcacggggaggtggaactataaaggtcatgagaagatgctactatcaaggtattattaaggaaaaagcccaaattagccccctaaactattgtggcagttgaaattaccccctcaattcaaaaactgcaccctcaactttttatatggacgaattacccctgacaaacttcggaacagttttggtcttacgtgtcgcacacgtggcagtccagtcagcataaaaaaattaaaaatatagggcccacatgtggtgactaagagaagaggcaaaattgacaagtgggctcctctatttttttattcttttatgctaactggactgccacatttgtgccacgtaggaccaaaaccactctggagtcgatcagggggtaattcgtccgatatgaaaagttgagggtgaagaatgtctggtttttgaattgagggggtaattcgtaccgccacaatagttcgtggggggctaattcggactttttcctattattaaaggtagagaggagaggaagaaacaactaagaaatacagacaagtaactccttgatctaacagatgattattttatactaacatgatcaaatgacttaggttactcatgatgtgtatatgttaaaggtagagaacagtagaagagatgactaatgagcacatataagtaactccttaatcaaatggttgactgttttatactaacatattcaaatggcttagataagagacgaccggtaaatatagatatgcaactcctctatccaacggttcataatatcatactgacataatcaaatatgtttcgatttacttgtgatgtgtatctaattgaaggtggagagaaggggtagaaattactaaaaattaatgtggataagtaactgccttatccaatgattgatgattttatactaacatgataaaatggcatagtatgattcatgatgtgtatttggataatggtgtcgaggaggggtaaggatgactaatgaatggggataagtatctccttgatccatcggttgatatatttgtattaacataatgaaatggttcggcataagaggcaacttataattacggataagtaactccttgatctaacaactagttttatgctaacatgatcaattggataaggattactcatgatgtgtagctaaatataggtggagaggaggggctaaggagatcacagatgaatgttgataagtaaatgcttcatccaacgtttgataagtaccccaaggcagcggcagcaacactgcgagtccactactcatcccagtgccatcaatccatccatcattgtctcctcctaacacagatcacactacacaaagaacaacaagtagccacgagctcttctttcttgcagccgttcttggctgcctcggttgctacccctgatgcgccgcgtaatggaaatgaggtctcgtgatctcgtcgccgtcttggctatgtccagcctactccttctcccactactcgtctcctcggtgcccatgtcgggtaagcttcgtcgtcattgatctcctggagttcttgatatgtgtttttactatatgctaattataatttgtgccttgattcattcttgcaggaagcctgcacttgagcagccaacagcaacacctgtcgtctccaaacatctctgcagatgtagttaatctttctcaagtcctccaatctctatattcccctaatatttaaatttgccggcctgttaataaaatatcatagacagttcatagctaccttcacaaaccaattctaaaatgaatatgtacgttctggaggctaaatactgaaacaaatagtaatgttgatagtgattctgaacatggctttgtgtatgtccgtgcaggacatggtggcggcgacgacgacggacgtggaggtgaatgactacccagcgccaggagccaatccccgccataaccctaaacgtccaccaggaagagaaatgtccgtccagggcatggtggcggcggcaacgaataatgtggaggtgaatgactacccggcgccgggagccaacccccgccataaccctaaaagtccaccagggagagaaatgtccgtccagggcatggtggcagcggcgacggacgtggaggtgaatgactacccagcgccaggagccaatccccgccataaccctaaacgtccaccagggagagaaatgtccgtccagggcatggtggcggcgacgaccgatgtggaggtgaatgactacctggcgccaggagccaacccccgccataaccctaaacgtccacctgggagagaatgaaatcaatcaagctgctgctggaactagctagcttgtagtttcgcattatctctgctagttgtcagcaactctcataattaataaagtatctaattacataagttgagtgcactactacaaatcaagatttttcgaggtggccaaaatgcaattttgcacattgccagacgccccgtctgcgattgaaggcttgtgaaaatcgacggttttcaaaggtgggcaccctaagagatccgcttgtgaaaattgatttttcacaggcgacatgcttaattcacccacatgcaaaaataatttctagtgtaaaaaaaaagaaaatccagatttgaatatcctctaataagaaaattcacagttcaattccaccatcacaaatttaaaaaacatttggcatgtcaaatgcaattccaaaaagggctttgtcgtcgtatcccagcgtcggagtcatcctctgcagcgtcttcttcagggagaagccgacacagcacaccatcattggcattggcgaggcagggcgaatgccacctgacggagcgtggggctcctcaccgggagaccgcgcaggtccccctttgccggttcggccgggggcgctaagtgaggttcttcgccctcgatctgaggaacgtcagcgagagaggaagtgcacaagacacgagcgacgtagacaggttcgggccgctgagaagcgtaacacccaactcctgtgttctggtggatctgtgtgtgaaggaatacaaagagccagagagcgagagagagttcaggctctagaaccccttcgctagagtcccaacccctctttctcttttttctctttttttcccctcctaggcctgggcctccttttgatctggtcaggggtcaccacatgggcctctagctgtctaagaaaggaaacatgctttttacaatgagggctagtctacagccggaagtgacctctgacaagcagagcacacgcctcctgccccgcttgccagctttcccggtggacgcccatttcaaccttcattcaatggccagcgacttccttgccatgcttgcactgaagcctggaatggatctgaccgggactgacataccaactccaggagttagcacgccggctccggctagggacgagagccaggaagctctcatcattccgacgggacggggcgaggcgtgtgacaggccgcctgttgccacctaacccgcgatctgactggtctgtgaccggtcacacaccgcgaccggtcacggaccggataagcgtgcgctgcgccgcattaaatgcggcgtggcgcgttcgtccatcctgctataaatgcggttaggtgagccccgctgtgctcacctaacccacacacgtggcgccaaaaccacagggggtcggggcgccccagccctcggggccgaaacgggggcgccccagccctcggggccgaaacgggagcggcccgacccctcggggagacagagggaggggtggccacgtcaccctcgggcccgaccccccccccccccgacggggtcaggccacgtgggtgaccgcggctacccaagcctctagtcacgatacccccggccccatgtcaccgacagtagcccccggcgttacgccatggtgatcgcccccctcgagggaagcgctcgggcgtgacgccactccttaggcccggtgacaggtggggccggtccctacaggtgggcagaaacccagcggtcgcaaatcgcgcgcatcggcaagggaaaaccgaccgacaataatgagcggcctctttaagaccgctacattactcgagcagcgcgcgaatcggaacgagccggctcgtttcgcctggagacatgatgatggcgcttttcacggttggcgagcgtagttaatgcgcgcacgatctgccccatctcaaccgccacggccgcacatctgccgcgtgcgccgcaaacgggcgagtggggttagtggaggcgtgggcgcgagaaacgagggggcgaggtagtgggcgcgggaagcgaggagccgggcatagcgttggcaagggtgtaaagacgccgaggaagggattcgtttccttcctctcgctactcttccccttgccttcgccacttgcgctctaactcttcgtttcctgtgccctacccttgccgcactcgctcgctctcaagctcctcctccgccggcgtcatggcacggggctccgcaccgctcgacggtagcgtgctgccgccttcccgcatcgtaagcgagaggcaggccgggctgccgcgccgattcatgccggaatctgccaccggccgggaggtggtcgcgctgggcgagggacgcccggcgccacactacccggggcggtccgtcttcttcctctctttcgcaatggcggggctggtcccgccattctctatttttttcatggatattctggagttttatgatctgcagatggcgcacctcacccccaacgcgataatgacgttggccatcttcgcgcacctgtgcgagatgtttatcggggtgcgcccatctctccgactgttccggtggttcttcaccgtacagccggtgtcgccgccgacggtagtcggtggctgctacttccagccgcgggggcaggtgctgaaccgctacattccctgcgtcctccgcaaaaagtgggacgactggaagagcgattggttctacacccccctcgccgacgaagcgcgcctccgacttccgagccagcccccggcgcaggcctccagctggcgggcggcggtagatctgggagacggctacgacgccgttcttgaccgcctggtgggtctgcgatcccaggggctcacgggggccatggtgttcggcgactaccttcgtcgccggatcgcgccgctccagcggcgcgcccggggcgcctgggagtacaccgggcccgaggactacatgaggacccaccaggggcgcaaatgggactgggaccctgaggacttcaggatggtgatccaacgggtgctgaatctcagctccgtggaggcatccctcatcccccaaggggtcctccccctctgctgcgatccagagcgcgccaagatcctggccataatgcaggtggtcggggcgtcgggggagcgggccccccgaggccacgatggcgcgggcgggagccgcaggggggaacaatctaccccgggagggggtcgtgcttctgggccccttgacgggggcccggggggcagccgccctgccgacgcccgggggaagaggaagcaggagggtacccctcccccatctcctccccgagggggcggggcggtgcgtgccagcagcaggcgcccggagggtgccctgccgacgccacagcccgagggggagcgaaagaagaaacggctccgcaagatgggggggaccgagccatgccgggggaacctcatctcgcccccgaggtggtcgtttagccgacctccccgcaggttcgtccccgcacccaccgcggccgtattcattctcccatctcccaaggcgagttttcactcacccgtttctttttgtcttctggtttttcttctgcctcagcgagatcccgtcgcgccccccccccctccccccccgccattccaagtccagccggtctgaggccgaggagacggcgaccgcggaggcccggaggcgggaagctgaccagcgagaagccgcggaccgcctccgggaagccgaggaggctgcccaagaggccgtccgggttcgccaggctgaggaggccgctcgggaggaggccagactccgccgggccggggagtccgtccgggaggcagaggcggcccgcgcgcgccaggcgacctgccaagcccccgacccgactccgcccgaggcgacgacgacttccgaggctacccacgacgaggccgcgggcgcgccgctcgggcccgacccctcgggcgacgcttgggacaagccagcttcgggggacgccctcgagtccagctcgtcgatcggcgggccgagccgcgcggcacccacaccgaggcggctctcccctctgccttccgctgccccactgagcgcggagcccctcctgcaggccttggccgccgcgaacagcacggtgctggacgggttaagtgcccagatggaggccctgcaggcggagcgggcggagctcgacgcggcgtgggcgcgtgtcgaggaggggcggcgctcggtggaggccatggtggaggcgggccgcaaggcacaccgccggcacgcctcacagctcgaggcccgtcgtagggacctggcggagatcgccagggaggtggaggaggagcgggagactgccctcatcgccaccgccgtgcttgacgaggcgcgggacgacctccgcctccaatacgggagccgggcggcggagctagaggagaagctcgacgccgcccggggagtccttgacgccgccgctgcccgggaacggcgggcggcggagaacgaggcggcgtcccggcagcgcgaagaggcccttgaggctcgcgccacggcactggaggagcgcgcccacgccctggacgtgaaggagagagacctggcggaccgcgaggccgccgttgccacccgggaggcaacactggcggcgcacgaggccgcctgcgccgaagaggagtccggactctgcctccgcgaggacgcgctcaccgagcgggggcaagctctcgaggaggccgaggccgcggcgcagcggctggcggacagcctgttcctccgcgaggcagcgcgggaggagcaggcgcgccgcaatctggaaggcgcccgcgccgagagggccgcactggatcagcgggccgctgagctcgaggcgcgggcaaaggagctggacgcgagagcgcacagcggcggggcggccgcgggccacggcgacctagccgcatgcctcgcagccgctgaacacaccatcgccgagctgcagggcgcgctggactcgtccgccggggaggtcgaggccctccgcatggcgagcgaggtagggcccggcatgcttcgggacgccgtctcccatctagaccgcgccgggcggcaggcggacctctgggcgggcggtacgcgaagtacgccgccaaccaggggggcctcgcccagcgcctctcagagatggccggggccctcgagcggctccccgaggagctcgaggagacgatcaagtcatcctcgagggacctcgcccggggggcggtggagctcgtactggcaagctaccaggccagggaccctgacttctccccatgggcagcgctggaagagttccctcctggaaccgaggacggcgcgcgcgcgcaggtccgggacgccgctgaccacatcgtccacagcttcgagggtacggcccctcggctcgcattcgcgctcgactccgacgaggagggcggtgacgacggtgcggacgacagcgacgacgaggccggcgacccgggcgcgtcggagtgagcccccaggcccccgccaatcttaataacttttccttcttcttccgaggccttcgggcccccttcttgtatagactgatttaatctgcaatcaagtaaagaggaaatttctgcgtcagttctgtttgttgtgtgtatgagacgaggatggtttgtgccgcggtccttctgtgtcttggcttgaacaagggctcgtgcccaggtcccagcctcaaacggcgcgggtcggggctagtgcctggggagatcctcgtgtcgagactggccaggccgggagcgcggtgaccgagggttatggatgacccgattgtgggcctttgccgattcccccccggagttcaccacgccccggggcacggctcggttctgggccccggttggcgattttagccggctcgggccaccgagggcagggtcgagcacgagcgtgctaattcaagccaagattcttcaaaaggaaacgatggcacaaacacagtcctcaggaaatcaaaaatgcttttattgaaatacggaagagaaaaaaggtaagtatatgcatgtggtagcccccggccaaccctgcacgcccgggggggtgcggggttggcccgagcctgagacatgacacccgacccccactaggggtagaagcgacgaaggtgctcgatgttccacgggttaggcagctctgtgccgtcgcccgtggccagccgaacggagcccggccgggggacgccgatcactcgatacggaccctcccacattggtgagagcttgctagtccagcacgcgtttggacgcggcgtaggacgaggtcgtcaacgcagagtgatcgggtccggacgtggcgctgatggtagcgccgcaggctctgctggtagcgcgcggctcggagggccgcgcgccgccttcgctcttccagatagtcgaggtcgtctcgacgaagctaatcttgatcagcctcgcaatacatggtgacccgaggggacctcagggtgagctcagatgggaggaccgcctccgcgccgtagacgaggaagaaaggcgtttccccggttgctcggcttggcgtggttcggttcgcccagagcaccgctggcagttcctcgatccacgagtcgccgtgcttcttgaggatgttgaaggtcttggttttgaggcccttgaggatttccgcgttggcgcgctccacttggccattgcttctggggtgggcgggggaggcgaagcagagcttgatgcccatgtgttcgcagtagtcaccgaagagctcactagtgaactgggtgccgttatccgtaatgatacggttaggcaccccaaaccgagcagtgatgcccctgatgaatttaagcgcggagtgcttatcgatcttgatgaccggataagcctcgggccacttagtgaacttgtcgacagcaacatacagatactcgaacccgcccggggcccgcctgaacggacccaggatatcgagcccccagacagcaaacggccacgaaagaggtatggtctgcagggcctgggccggctgatgggtttgcctggcgtggaactggcacgccctgcaccgccggaccaggtcgaccgcatcgctgagagccgtcggccaatagaaaccctggcgaaaggccttgccaaccaaggtgcgtgaggcggagtgggctccgcactcgccttcatggacatcggcaagaagctcgacgccttgttcccgaggaatgcacttcaggaggactccgttagccgcgcgccgatagagggtcccttccaccagcacgtagcgcttggagatgcgccggacgcgttcactcctttcgcggtcctcgggtagagtctcatctgcgaggtacgcctggatctcagtgatccaagcaatcaatctaggggagctgggagcgctcccctcgggtcccgaggcttggactccgacgggccgtgggggccgttcaggcgcgtccgtctcccctagggggtcgggtcgcgccgacggctgggcaagcctttcttcaaaggcgcccggtggggtctgggctcgcgaggaagcgagccttgagagttcgtcggcgaccgcgttatcccgtctgggcatgtgccaaagctctatcccgtcgaaatggcgctccatacgccgtacctggcgcacgtaagcgtccatctgcgggtcagagcactggtactccttacagacctggttaacgaccaactgggagtcgcctaacaccaggaggcggcggatccccagtccagctgccactctgagtcccgcaaggagtccctcgtactccgccatattgttggtcgcccgaaagtcgaggcggaccaggtatctgaggacgtctccgctcggcgaggtcaacgtgacccccgcacaggcgccctgaagagacagggaaccgtcgaactgcatcacccagtaggcggtgtgaggcagctgcgaggggcccgagctggcctcgggggcggagacgggctcgggagctggggtccactccgccacaaagtcggcgagggcctggctcttgatcgcgtggcgtggttcaaagcgcaaatcgaattcagagagttcgattgcccatctcaccacccgtccagtaccctctcggttatgcaagatttggccgagggggtaagacgtaaccaccgtgacccgatgcgcctggaaataatggcgcaacttcctcgaagccatcagaatagcgtaaagcatcttctgggcctgagggtatcgggtcttggcgtcccggagggcctcactaacgaagtagatgggccgctgcacctttcggcggggccgatcctcttcgccaggggccgcatctccagggcgctcttcgtctgagaggccacgcggggcgcactcggcttctgtgccgacgacctcggggtcagagggcgacaggcgcggccttcccgcagtggccctggggccatcctgggggtcgggggtgcctggcaccgtcggacaagcaggtggagggccagctccggccgtcgggggccttgggccgccgtttggctcgggggcctctcctccctgctctctcccgggtcgagccgatacagggtggggatgcgcggagtgagggttgtcctcgtcgcgctccacgaccaatgccgcgctgaccacctgcggggttgccgccaggtagagtagcaacggctcatctggcttcggggcgaccaggaccgggggagaactgatgtacgccttcaactgagtgaaggcccgctcagcctcctccgtccaggtaaacggcccggagcgtttgaggagcttaaataagggtagtgccttctctcccagcctcgatatgaaccgacttagggcggccatgcagccggtgatgcactgcacatccctaagcttgctggtggggcgcatccgctctatagctcgtatcttctcggggttggcctcgatgcctcgggcagagaccaagaacccgagaagcttgcccgcaggcacgccgaacacgcacttatcggggttcagctttatgcgggcggagcggagactttcgaaagtttccgctagatccgagagtaaggtatcttggttgcgcgacttcacaaccaagtcatcaacataggcctcaacattgcgtcctatctggctactcaaagaaattcgagtagtacgttgaaaagtaggacctgcattctttaacccgaaaggcattgtcgtataacaataagttcctatgggggtaatgaatgcagttttttcctcatcctccctagccatgcgactctgatgataaccagagtatgcatctagaaaacacaaaaggtcgcaccccgcggtggagtcgacaatctgatctatgcgtggcagggggtaagggtccttaggacatgccttgttaaggtcggtgtagtcgatgcacatccgaagcttgccgttcgccttgggaacgacgaccgggttcgccagccactccggatggatgacctctcacggatgaatccggcctccagaagtcgcgccacctcctcgcggatgaaggcttgacgttccggggcctgccgccgcactttctgccggaccggccttgcgcccggccgcacggcgagacggtgctcaatcacctccctggggaccccgggcatgtccgccggtctccaggcgaagacgtcggcgtttgcccgcaggaaggagacgagcgcgtcttcctatttgtcgtccagaagaccaccgattcgtgtggtcttggacgggccatcgcccagggcaacctccttgaccgggacctcgtcgcacgtgaccatccgctgccttggggcggccgggacggaggtgctgagcctctcgtcgccacccgcgggcttggacgccgcggcgaggtggtctgcgcgctgctccatacaagcaagcgcgactttgaggtcgccatggacggtgatggggccaccggggcccgacatcttcatctggagataggcgtagtggaccgccgccatgaacttcaccaacgcgggcctcccaggaccgcgttgtagggcagactgaggtccgccacatcgaagtccacccgctccgtgcggaagttggcggaaccaccgaaggtgaccgggaggtcgatatgacccagcggccaggtgtgccccggcgtcacaccgatgatcggctgggacggccggagcaccatccccggggccttgatggcgtcaaaggctgcgggggaaaggatgttgagggctgcacccccgtctatgaggacacgccccaacttcacattgcaaacggtgggggaaaccaccatcgcgatctgtcctccccgggcaacgcacggcgggtggtcggtctagtcaaaggtgagggcaacctccgaccaccgcacccgccgtgtcgcctcatgggtaggggccgcagccagaagctctcgcttcatggccttgaggctccggcgagaagcgtgagcgcacgctcccccatcgacggtggcgacggtggcctcaggctcctggaaccccaggtcatcgtcgccatcgtcgatgtcctcggcggtggccttctgcttggcctcacctcgccggttgccggcgggagccgccggggtcttgccctcacggcgctcctgtctcttctcctcctcccacttcctcgtccgctcagccaaacttttgaccgcgcggcagtccgcgaggtcgtggagggaggtgttgtgcacggtacaccacttgccggtcgggcgctccctgctgggagcgccggcctccttctttttgtcgctcgcaggcctcccctttcggggggcccgcgaagcgccctcgacggcgaggacatgaccctcgtcgtcggaacgggccgaccccttcttcctcctcctgtcccgccgccctgaccgagcggcggacccgggggcggccggagctgccacaccagaaccggaggagttccaggcccaggcctcctccttgcgagccacacggtccgcgagctcaaaaagctacgcggtggtctggggctccttggaggcgatcttctcgagcatgcggttgtgccgcacgccccccctgaacgcgtagatcaccgcgtgtgcggggatgcacggtatggtgttgcggacttgacagaaccgctgaatgtacgagcgaagagactcatcgtcccttcgctgtaccgcatgcaagtccgcttcttcgcctgggcgcggatatatgccctggaagttcgtggtgaactactggcacaaatcctcccaagagtggaccgacgcgggtggcaagttcattagccaaccccgcgcctgacccttcagggccatggggaagaaattcgccatgaccctgtcgtcacccccggcggcctcgatcccggtcgtgtagatctggagaaactcggcggggttgacgcttccatcgtatttttcggtgatggtgggccggaaccttgggggccaacggacgttccgaaggctcgacagccggcaccgccaaccggggacacggggggccggcccccgtgtccggaccgaagtggcgctccggacgaggaagcgccctccgttgcgtgggcggcgcgacgaacgtcgcgccggcgctcgatatcgaggcgggcatccggccccccacgcacatcttcttgggtcggaggcgttgacgagggaatggcggacgaacggcgggttacggccgccgctcgccgcgccctccgcctcgacgacatggagccggcggcggcagcgccagaggcctcggtggcggaggaccgcccgccggcgcctaggcgctgctgcgccgtcatgaccaagtcggccacgtcatccagccaacgtcgggctggagtctctggatcggggacgacgggcgggtgacgcaggagcgcacccgcagcctggagcgcgccctggggcgtgccgccatcgccgtagacgaggcagcgacgcgccccgtctcgccgtcctcccccgtcgcccgcgggcggcgaagtcacggatcctccgacctccccgagcgcctccccccgcccaagatttcggcgagagggggacggtggggtgcgagcccgacggcgcgggttctgctccccgtcgtcaccgctagcgttcggagagaggctgtgcgccactgcccgtccggccattgggctgagcgggagaagcttggcgcacacgaaagaggacgagggcttagaaagacacgcgcaccccctacctggcgcgccagatgacggagcgtggggctcctcaccgggagaccgcgcaggcccccctttgccggttcggccgggggcgctaagtgaggttcttcgccctcgatctgaggaacgtcagcgagagaggaagtgcacaagacacgggcgacgtagacaggttcgggccgctgagaagcgtaacaccctactcctgtgttctggtggatctgtgtgtgaaggaatacagagagccggagagcgagagagagttcaggctctagaaccccttcgccagagtcccaacccctctttctcttttttctctttttttcccctcctaggcctgggcctccttttgatctggtcaggggtcaccacatgggcctctagctgtctaagaaaggaaacatgctttttacaatgagggctagtctacagccggaagtgacctctgacaagcagagcacacgcctcctgccccgcttgccagctttcccggtggacgcccatttcaaccttcattcaatggccagcgacttccttgccatgcttgcactgaagcctggaatggatctgaccgggactgacataccaactccaggagttagcacgccggctccggctagggacgagagccaggaagctctcatcattccgacgggacggggcgaggcgtgtgacaggccgcctgttgccacctaacccgcgatctgactggtctgtgaccggtcacacaccgcgaccggtcacggaccggataagcgtgcgctgcgccgcattaaatgcggcgtggcgcgttcgtccatcctgctataaatgcggttaggtgagccccgctgtgctcacctaacccacacacgtggcgccaaaaccacagggggtcggggcgccccagccctcggggccgaaacgggggcgccccagccctcggggccgaaacgggagcggcccgacccctcggggagacagagggaggggtggccacgtcaccctcgggcccgaccccccccccccccccccccgagggggtcaggccacgtgggtgaccgcggctacccaagcctctagtcacgatacccccggccccatgtcaccgacaccacccataaagaggtctaaattattttggtcagaactatattggtcacgagaaggtggtattatataggtcatgaggaggtgttaccatatagttattattaaaggtagagaggagaggatgagatgactaagaaatacagataagtaactccttgattattttatactaacatgatcaaatgacaggttactcatgatgtgtattagttaaaggtagataagaggggtagagatgactaatgagtacgaataaataactccttaatcaaatggttgactgttttatactaccataatcgaatggcttaggataagagacgactagtaaatatgtatatgcaactcctctatccaacggttaatcaaatatgtatctaattaaaggtggagagaaggggtagaaattactaaaatgtaatgtggataagtaactcccttatccaatggttgatgattttatactagcatgatcaaatggcttagtatgattcatgatgtgtatttggataaaggcgtcaaggagggatggggatgactaatgaatggggataagtatctccttgatccaacggttgatatatttgtactaacattatcaaatggctcaagataagagatgacttataattgcggagaagtaactccttgacccaacaactaattttatactaacattatcgaaggagcgattctctggcagcggggaagtgtagacccctccccaaaaataaagatccgaccaggagctagttgcgcacgatgctccagaaaacaagtttgtggggcccgagcaccccaccaagcatatgaacacaagatatttatacaggttcaggccactcagaggtgtaatacgctactcatgttctttttgttggtatctatatctggagaaatacaaactttgcctttttcaaaccagacacaagttagcccttttttctagcatgtcccttttctattatagtacaaggaggggctcacggtgctaccattctacatcctttttgcattgtcattcaaccgtcttgtcaatgccgtttggtttccttcaaatgtccccgagaaacctacctaaaaaataagattatagtgccccaggctccaagaataagatgaagtataaaaccatttctctgcttccaaatgtgccaagcaccatataaaaatttctccacaaaatgagatgaagtatatgaagcttttgctgcttgaagcatatctcccaaattgaaattctagtgccagactataaccacctgaagccaacattctttgctgaatgcacattcaaagaagagataaaagaaagtttgtattcctgtcacatagggcacaaattaattcacttcttcctagggcacattcaaagtccctggcctatccccttccacctagggatgaaaatggagcggatagtttccgtccattccaaagaaaaatagggatggcaacggggcggggcagagccgggttgggttgtaacggccccgctcccgctccattgcgggtccacccggcctaggccctgaagtggaggatgggtcgaaattaatccccaccgccggcccccccgaggccccgccactcgaccgggggcccgctgcacctgcaggagaggattcttggaggaggcggctggtggatgcgccgtcgtgtgacaggaggaggaggcgccgccaagcggaggcggcggcagcggtggcgcggcgacgaacaatgacagcgtggcaacgagcagaggcggaggcaagaggcagcgcgacgatgagcagaggcggagtggaaacaacggcgatgagcggaggtggaggtgacgcggtgacagccagccagcggcagctgtggaggatgggtgaggggagtgggagtaggggatgggggattgggagattaggatttaccttttatatgtctcacttactaggccaactgggcttgtattgttggaatggactacattttgagacatatctcatatcccgaggccccatcaggtcacacgcaaccgcgcaggtggtttacaatccctgccccagccccggaaatttgcggggccccgtccccgctcaaccccgggtgaaaatcatccctccccccaacccaccgtggccctatagggtccctggccccaatggggaaattgccacccccagagaaaaatgaatacagataccttccggagcggatagtttggatacatatattttcttccggataagaatacggatattgttaaggttatagataaggcatatcctatgatcttgggttaagctcggcaggacctaccatataccaagggcctgtttgggggagcttaagattctgagaagcagctgctgataagctagctggtgagaatctggagaagctaggaaacccagcttctggcttctagttcattttccaaattttataactacagattttcataatctgggtaaaaactggactgtttgggggagcttctggcaactagagattctaggagaagctgcagctgctagaagctcccccaaacaggccccaagtcttatacgaaatcatgcctcgcatacggaaggtgttccagataaggaagaagaagcagggtttaatattggaaactataaggagtactcagattgtatacattcttgtttccctagttctacatggacaagggaacatttgggtataaatacaagatccctgggaggagaaagtggaggcccaatcatcaatacacgccgccagacacaaacacagagataagcctagatatacccaatctggagccgcagaggctgacaagagggatctagtgttatctctgatctcgccaagttcatgttcgaggaagaagactacctgtcatcgaccatgtgtggagatccacgccatcaagttgacgatggctagataggttagcccaaatattatacttactagaaaaaatgcatgtgtgtcccaaatattcgcatggattttttttaaagaaaatcatgagctgcaattaggagttcaactttcgtctcaagttagcatccaagtttctttataaaaagtttcttatacaatttcttttgtattttcaaaagcgaatgaacttaaaaaccgactcaaacaataataatgcactaaagtactggcaaaagcatctttgatttttataatagtagagaagagatgccacgctattgtctcccatcagtaattttcagtttttatttcttttcacgataacaggaggtgaacagatatatttgctcgttgggatctattaattatacttgactgggctgaaaaagaaacgatgcagcgatgcacaggcaggccatctccatcagtatttccttccaatctaaccaggcgcacacctctcccatcgccacggagtacaagccaagtccatctcgcttgatcgtggcaacagtaaaaccgaatcggagggggcaaatgtgctgcagacgaagcaaaagtgaaacgcatgcgagcgcaggaaaaaaaaagcaacggaagcgtttggattcatgtcggcaatctttgaatcggtgatacccgacgtatcaaagctatagaacatcttttataatactctctccattttttaatatataacgtcgttgactttttcttatatatttgaccattcgttttatttaaaaattttatgcaaatgtataaaatataaatcacacttaaaatactatgagtgataaaacaactcataacaaaataaattataattacgtaattttttaataagataaatggtcaaacatgtgagaaaaagtcaacggcgtcatctattaaaaaacggaggtagtagtagagaagagatatagatagagatagagatagagatagagaagtagaggtagagaagacatagagacaataaatataataaaaaatgaagattagaaaaccaacttaaaaactaatttaaacacggatgaaatactaaaatcccggtgaaaatatcagtagagaagagatagagatatactactatataattcacgttgcaaatctgaaaaacgaagtacgtccatggctgctggacagctcgatcgatcggcacgtaccaagaaaatgtaagactcaaactccaaactgtcgtacatatatacgtgtatgtgacctcatcggcataaacaaattcgacgtccacgacacctcaccgtattcgtatttgatacaaatagttaattaattttcagcgatataaacggaccaaatggttaagcgactaaaaactcactcaaatacggataatgaacaaaaatctcgacaaaaacatctttaaattttataatagtaaagatgtgatacagatatataagagcatcattggcttcagccaacaggagtagagctattacctatcagttaagagatccgaacttgtataaaaattcttttatccatctctttatctcaatatcgtgtatatattggtcccaacgatcatcatactatgtaaatattgtagtcacgacctattccgccgatagatatggtatcggggtttccgacagataaggatattcgatgaccagtgctattcggatatctgctgaagtcgtgagacatacaccatttctttataactctacgaccttcaatctacctttttagattttaatagtagctcatctcttaacactaatacacactattaatattatttaaacttttaaatattttttataaattatactatattttatataaaacaagctaattatatatgatgatatttgtttttattagaagttaaggtggttttcatgttccaagaaaaaaaaaatatttccgtattcgtgtccgatcatattcaatcgttatttgtattcaagataattcatatttattttcgtatccgagctattcgtattcgttttcatatctagcaaaaaaaaatgaaaacaaatatgatatgagcattatccgtctatattcgctccattttcatccctacttccaccaccgccactgcctcttctctcccagcaagtaggacaagcgttcgcaaacggacctggccatgcgaaggtcatcctcatctgaaccttcgctattccattgccatcgccgccacctccattgatctcttcaccggtgaagaagatggccatcacctcccttgtggcagtgcatctaactaacaagcaccttggcgacgcatgtggtcaacaagctcctcggcagttgcacatgtcggggttgcacagagcaaaatagggcggcaggctccctaacggcagatcggattggggtagtggagcatctagtggcatcatccgtagtaggtgggcccttcttctccctagtcattagccatcctccttgtcctctcttccctcacccccagtggttaccattgtcttctttctagcctccaccgcctcctcccagctctaaatcaaggccccacctctcgtagcttagagccatgggctcatccaacacgatcggcgagacgtagcttcaaacacatgattgccctcgtcaaacaagacacatgtgctctctgcaagtcagaagtagctctaaagggacacaacttgactcgagctaaacttgcagctccaacgtggccggttaaagccactcgccacatagacgtgttgcgaaggctctatagccccaccagagtccacgagtcatgaccacacattgcatccgtcaccaccttcttctaattaaagccattcggctaggatggagtacacctttttttttcctcctcataagtcataactagatggagtactactgatgtgaagttgaccttttaagagagagaagaagaacaaaatggaaagagccattgcctgcctagctagcatggtccaactataaaaccccaaggcggcagcagcagccagcaataaacaccatcagtacaccatccatccatccatccatcgtctcatcctaccacagatcacacacacaccaagaacacctagcggcgagctcttcgccctcgcggccgttcttggctttgtctggctcggtttgcttctgcttttgctcctgcatgcgccgcgcaatggagaggaggcctcgtgacctcgtcgccgtcctggctctgtcctgcctcctcctcctcctcccactgctcgtctcctcggtgcccatgtcgagtaagctttcgttgatgggtagctgtttcttgattcttctccctcgagttcttgatctctgtgcttaactgtttcttgattgtgatttgtgtgttgattcgttcttgcttttgcaggaagcctgcacttgagcagccagcagcagcaacacccgccgtctctgaacctctctccagatgtaattaatctttctcatcccctgcaatctctgaattttttccccctccaatttaagtttgtcgactttgttgctgcaaaatcacaaacactattcagaatacgggcagcacagtgctcaaaccagttctgaaacgaagccaaattctgaatcaaactaatagtgttagtgacagcaactctgaccatggcttgtgaccgttcttgcaggagatggcggcggcggcggcggcgagagggctcggcaggaggccggcggcgaggatggacgtggaggtgaacgactaccccgggtcaggacccaacaaccgccatgaccctcccaaaggtcctgggagagcatgaattcagtcaagctgaagctgctgctgctgctgctgctggaacagcttgtagtagtttcatatccctgctagctattagcaaattcacataattaatccagcgtctaattacataagtcgagaggctgtatgtgtgatttggggtgtaattagtagagagcagatagctagcaagttacaactgcagatcgaattgagaaaatattcagggatgaagactgtaaagcttttgctagcttgggcctcctctttgcagcagtagtatagtaagtaaactagtaaattaattaatcagtgattttgtcgacatgcatatgcacatgagcacatcacgttgggatgtcaatataatacaggattaattaatcggttaatcagatattggaagcttcttcctcctctcactgtcgagaccgtcgtgtcgaacgattcaattcaaaatcaagtgatgagtgagtgtttaaaggaaaatatataatctcgtcgcgatcccaagctgatcactgctactgcgactacggccactccaatcagttagcacactgattaacgctgcgtcgatcattggtgtactataatcattgctccctctgactaacctcacgctgcatatgcgtctgccgttttctcgaactagtaatattgttgtttaatttctggaaataacctgttgagatattcccctcggatgccacaacacaggggcatgttttaagaggtactccctcaatcccataatatgagtaactttagagggatataacatatcctaatacaacggatttggatagagagcctatccagattcataacactagaatgtgttatgtctttccaaaatcctatgtgcttccattgtttgctctacaattaagtgaaaaaaaattaatgaagcaaaaaataaaaatttataatagacgaaaaaaatgttttctagtgttttagacaccttttgaaaccgaaaaatcaatgggtaagatagatgtgataatagagatagcaacaaggaagagggaacggagttagaagaccgagggatcatattcttttactcaatctcaaagcaattctagaggttcctttcgaatgtactccctccgtctcaaacaaagtcaaaccctgggtttccgtgttcaactttgactatccgtcttatatgaaatttttttataattcgtattttcattattgttagatgataaaacatgattaatattttatgcgtgacttgtctttttatttttttcataattttttcaaataagacggatggtcaaacattggacacgggaagcagggtttgtctttttttgggacggagggagtagtaaatttacaagagtgattcagacatatttcgaattactacctccgttttttaatagatgacgccgttgactttttcttacatgtttgaccattcgtcttattcaaaaattttatgcaaatgtataagatataaatcacacttaaagtactatgagtgataaaacatctcatagcaaaataaattataattacataatttttttttgaataagacgaatggtcaaacgtgtgagaaaaagtcaacggcgtcatctattaaaaaacggagggagtacatattttgaatatgtaattcggtttagcttttcagtgacatgtaaaataaaataatccaataacatataattaatcaagtattaattgttatacggtttagaaaaaaccttttaaaaaaacacatcattttacggtttagaaaaactaacgaaaaacaagaaagttatcgtctaaagttttagttttagaagcgaacgcagctgaattcaagtaagattgctttagcatttttctattctgaaacaggtcttgccgttaagaggtggctgagatttagcatttcgttgctatatagaatccatttgctgcatttggatgaggaagaatccgcacaacatttgctagcagcgggcaattgcaggagaggctcttaccggcacgcattacgcagtttcgatggagccctttgactttgtttgtacccctatatgcgccgaggaataaatgatcgctagtacgctgacaacaacaatggctgcaacgaaagtgacgtggccagtgcttcatctgacgcgtcccggtagaagaggaagccaggaaggaacacttccggccggttgcagtctcatgcatcatctcagtatgacaccgcgggtggcaactggtgccaggcaaccatggaaaattatgtacgataaatcacttatacagtgaatacctaaaattattattagattaaaaaaataatgaacttttgagatttgttcacgttatccgaagtaataattttactcatggatgtgatgtccacatatgcagtttccgcaaccacgacggtttcatggcactctgttcctcccccaactatgccacaacagctagggcaccgaggcggctcgggagttggtgttgcctagatccggcctctcctcgaccggtactgatgaggagactgatggacatcaggaggccggcgtagtagaggacgtggtggcggtgtgcgatggagtggcacacggtagagttcagacacggaggaggcaatgagggagagccggagagggccagagccactagatctgatgcctcttgggcagttccaatgccctcccgctgtctggatctaaagcctcccgggctgttgcgaacgtggaccgacgatggagatgatgtgcattgggaccagaaacgaggcaacggggtgccgccgagcaagggtcgttgtatccgcagcaggggaagggtggatgcggtgagcaagggcctgcgacggcgtggtgacacggcatgagaggagaggggccttgcggtggctcggagacatggtggatgtgaccctgtggtggcatagcaatattaatgtaggagacagtggtgctcgttgcttcgtgtctacagaaagggtggcgtagacttttggggtgagggggccgcgggaggaggggtgctgcaaaggagccgacgaagggtcatcgatgcagtggagctccttgtccgatgagaaatagcaggtggagtagcatcggtgtggcagagaagggcatatggcagaattcggtttgtggtgcaacgtcgaggttacaacaacaatgagaggtatgttataggcgccttgatgacatttcatgttcgggctgataacggtggtgctctaggcaatgcgatccctcttgagggcgtacgttgttgtgatgcctccttctctctctggcggtatgagtccaagtttgacaagcagcgggacctccttggagacgtcatctaggagatcctgcttttcttgcctgttccatcttcgatcaattcaattttcggcgacatcttggatgttaccatcggatctattcgagagagaagcagaacttctcatctctcgtcccctccctcgacaattctttctacatggtgatggccgagagcccatatgtatcttttattgggctagcggtatccagcctcgcatagcatcgacttgattggtgtccattcctttccctgtgagagtgtataggagttgttagcacacaatggtgctttttttcccctccttgattattgcctcccgcggtggattgatactgttcgttcaacaaaaatttccaaaattcgaaaccaacgtcgattcaacaatccgtgacaatggaaactaatggctaattaagaacagttaccccactattggaacccctatcattaagtgggtacagtacaatgttttgtcacgatagttacgcacgcacagtacgcgtgtcacgggccaccgctcgccggcgcgagcgcatgcagcagcaagcgtgcgcgcgtacaaaaccgccgctgtctggcttgtcgatgggcggcgatcgatcgcccgactttgacacaaagactagattcccctgcgacttccacatcgaaacgacgaaaccacacaccgctacgcactggagaagactaatatccatgtcaatttctgcacgatttcctcgttttgctcttattaattaatcctccgatttcttcatatcatatggttccgtccatagtggtgggcagaactgtggatgtatgtaaggctatcttgttatccaattccatggatatagttagttaattaatcacacgcacgtgcggcagaagccatggacggccgtgtgtgagtacgattcgcctctacccccatgcaaattaatatggattattaccttattttattaatattatgcgtgcttagccagtaaaaaaaagtgttggatgattcgatgcctggagagcaccggattccggaggagccgtgcactccgcgagcggcggcagcagcaacgccggcgcgcgcggagcgcgagtatcatcgtggctgcttcctcccatcgctttccagctcgacgtacgtacgtacgccgcgttggcgacgtggtgtataaaaaaggcatctgctctacgttagatcggatatttgatatttggacactaattaaaagtattaaatatagactaatgataaaatacaatctataatcttagactaatttacgagacaaatctattgagcctaattaatccataattaacctatgtgatgctacagtacacatgtactaattatgaattaattaggcttagaaaatttgtcttgtgaattagcttttatttatgcaattagctttattattagtttacgtttaatacttctaattagtgtcaaacatccgatgtgatatagaataaaatttagtcccagatccgaacatcaccttagctgcggggcctcggcctcctctcgctctcgttgtgttacacatcgtttctgccgttctggctaggggtcgatggggtctccgcgcgcgacgatggtgacggcgccgacgacgagtcgacgtcgatttttctgttgcccgctgcggctgcgagtgctctgtgggcggcagcggccagcgccggggggattcagatcaggtgaagttgtatattgactgcaactttagcagtcgcgtgatccaccacgtacaaaattaatgtaacggccaaacgttaaggcaaccctgcacatcgtcatctacctcagcccaacaccaacacaccaaagccaagaggccagagcatgtcgacacgacggcgctgtgctaccggaccttgcggccggcgcgcgcctgagcatgctgctagctagccgctccttgcccggcgccttaccgccgctctcgctcctcaacatgccaaccccaagcacccgcttgcccgcttccgtcatcaactatatattcatctccccatcaagcagaccttgaacatatgctgatatgcgtgcgtgaagtagaagctcaccattccttaaaaataaaattgaagcagaacacagcctcaattaattagcagcttattaaattcgccttcatcttcgtcatgcatctccatcgatcgatcgatctccaacctcacagatgcattactatctcgattgagagcggacggatccgtagtaagaacccagtgctgcccggattaaggaacatatatattacattcctctttcatttcaccatgcacgggatcctcaagagctgggcaactcattttttagttcaccagcctttccccgaccgccgttcgctggcgcgctactgccggccagatcagcccctttgtgctcaagtggagccatgacgaacctcttttcagtgaacaccgtttgattcaatttggacgctatggatgacgcgactgccaaagttacagtcgatatagagactgcacctgatcccaatccgcggcggggttggatggggatgatgtcgcggtttggtcgctaaagattgctgtcgctgctgttcgccttgtaggcccaggcctgtaaaccagtgttcggcccagtgccagtggcacttcttcttcttgcgaatgggttgggcggccatatgccatgggccaccacacggaccagagagtggagtgccggtacaaatttggtggaataagtccactttgacttcctgataagtgacccgaatctaatccataaccctaaccctaaaaccggatatcttgacccccgaactatttaaatcggtacaatttgattcccttggtgatttttagagaggttttgctgacgtggcgctgacgtagcggtgttgaccagtctatggggttgacatggcgcttaggtggcatttgaattaaagccatatatgcgggacccgttagtcattcacacacataaaaaattgtgggtcccactgacttgtgggccccacatgtcatcctctctctttctttttcctcccctcttcctcccttctctctttctttctcactgtccccttcagccggcggcgggcataggccggagtggtggtggcgggcggcggcgggagctgacgtaggagctagctggagcggcggtccccggagtggaggagtcgacaatggcgaggcagcgctcggtgagatggggtcggcgtcgtggaggaagtcgaccgacgagggttgtctttggccaacgacggccggcgcatggggtcggcgtcgtggaggaagtcgaccgacgagggttgtctttggccaacgacggccggcgcgcgccggcggaccgcagcttcggcctccacctcagtggcggccacctcacggcgccgaggatggcagccaccggggagagatggagctcgccggcgctcctctgctaccactcaaatctgactgaggcatgtgttagattcttaggattgctatgtgagatctaggggttcaactctagcttataggaataatgggtgattgccttggagagtgaacggtagagaaagagagagagagaacccatacctttgccggtcttagagcttgacacagccatggcgatggtgcggtgatgtgagggcgtcggtgaggacgacggtgtcggtgtcagtgatggtggtggcgacacccggcggcgggcttcccctcacttcagcgcttcccagatcggagggacttctagggtttgtggggagtccgtgtgtgcggcgaccaaccttggttcgcgcgcccgccagctccctctctttatatattagcgctgcgtgagaggggcccactgccaatagatcggctggcgcccccgatcagggagcgtaggcggagtggggaatcgttttcccgattccccccaggatcgcaactaatattctcccattcgatctccgcctttcttacttctcttactcaacatttacttctcaatggattgacgcatagagtacgcttcatcatgacagtcaccattgaaccatcagacgcaacgactacaatgcacctctccatctcgaaataaacactaggccctttcttttgtaatccaaggataataggctttcctgtaaaaacccatgcctgccaagtgttctctgaacacactgggcggtaagccttttgcatgcagatctgctaacatttcctttgttcttatatgctcgagactaattgtctgatcctggattttcactttcacaacataaaacttactgtcaatgtgtttggcagcaccacttgacttattgttgtgagtacatcttgaatggcctttgaatgctgtcgaccactttcaactcgggaacaaacttctttaaccattttttgcctgccccgtggcctcataactagctacaaactcggcatacatcgtcgatgatgctacgacggtttgcttggagcttttccacgaaatagccccttttgcgagagtgaatatgtagcatgatgtgaactttttatcatctacatctcctgcaaaatctgcatctgaatacccttctatctctagggaatcagatcttctgtacgttagcatgaggccttttgtgccttgcacaagctttctttaccattcttcagtgacctaatcctgaatttcctttatatctgctaagtatcccggtaacaaatgctaagtcagggcacatacatacttgagcatactgtaagcttccgacagctgaagcatatggaaccgctttcttttgatcgaactcatactggttcctgggacattgaaatttcccaaaactatcgcccttgactatgggagcagatgtaggcttacttgcatgcatagacatgccttttgcgataatcctaaccccttttcttctatctcggtgaatctctattcctagaacaaatgagactttactaagatctttcatatcgaaattcgaggacaaaactttttcgtctccaatcaacatcactactagtgagtaggatgtcattaggacttgctgaatatacacttgctggtcaatggagggtctcgtatgacgttggggttaagttctcatacacacacgtgacttttgccaaccaaagggtttgtatgtttatttctttgttgtggatggcctaagagttaacttttgtcaagcatataagagagcttcacaagttggcaatttgatatctgacacctcaacctaagcatccaactgtgatatttataagggctaaaaacaaagaagcaagagacaaagcggtatggactatgatcaaactaaatacctgtgccactgcaaaagttcaggcaactacactggattcaggcagctgttttctctcaataggataaaatgcacagagcttattgcttatttgttaaaggggaaaagcaggataattcatatagaaataagttcttctagctcgggaaataggatatggtcatacacaattgttacctactacaaatagcagtaatttcctcgtcccttgtataaggaaaacaaattgagacgataaacgtcacaggggctacttgtgttctttgaaactcctggtgatgagactaattttagtacatagtagcatccagcagttttacagcagaaatagcaaaatgaaatataggaagttgagttataacttgagcatttctttcagctcaaactagaaaacttggcgcagctttgccgcgccctcacagtgattggcctagtgttcttgcagagtggccttaaatcaggaaattatgtgcatacacagttacatggtaatgcatttcgtttccgaaaatactccaatatctgatgttcattaaaatgtttgaaaatattaaattacacagctcacatgtgtatgatgcttccattttaaaaaaaaaaaagcttataacaaaagacaataagtataactatacaagtcatcgttgaggcacatagaagaattgcaccatatcttgtcgtaccaactttgataaaaccaataaaccatagcccaatcaacctcattctcattcatcggattcatctcagcaatcttagcgtccattttgggatcaaaataaatccattcctgatatagagtgcacatcataacggcatagcaattgtatgcattgatacggactttagtgtacatgatatgttcgtagtaacgttccctcaaaatattttcttgcagcacccctgatacagcctgccatgtagatgcataatctttatgtctcgatgctcacagtaaataaacgaactttttctagaaaacaaattgagtaaagcagttataacttgatatattgttatgttcacagacaaagcaaaatgagagaaaaataaagtaaaacggtaggacttgatataccattagtctcacaatgaaagagcaaatctatgaaaaaaaagggggggcaaaagtcagacgatgcttcttgattatgcatacctaatgtttttttagcaaatactacatcaagataattgtatcagttactcagatgatcagatcacatgatccatgttctttgctgatactagtgttttcttttataagaagttgttaaccaaatattgaaagaaatatttttttttcggttgatgtggtaacgctatctgtgaacctaaagttatatacatgcatatatatgtgtaacatggttgcagtgcagtgtaaagctaagttttcgctctttttaagactaagagaggaggaggaaaggtgacaaattgaggttatatttggtgtgtcaagataaagtatatggagcttggatcaaagcaagacgagttccaaacagagggaaataatttctcgtctttacttggtcttgtccatactatttttcctggttacaaacatgtatattatttcacttcacagtcaatgtgacctttgacttgaattagtacactttagctctagcttttatcatgtggataagaggaggacaatatcagattctttgcatttgagctaagaatctcaatgttctcactttgtgtatgtgcacagacacagtgactggctgcctgctagcccatctatgacaaatggattgaaagctgcttatcataaagctagttgatatctctaaccaaacatcgtatagctatgttcttgatatactgcaatataaataatctgaagctacacgactggcgtttgttatattaagagcaacaatgcaaagatatgtagggcaaccgatccacagtatcttcgcatcaggatacttcagcagatgagctgcctttgtcttggcaagctgctccacagttgtcaaagaaccaatatcaaaatgcaatttcaatatagcagcatcaatgaagacagtagaaaaggagagagaggaaatgatgggtgataagcttaggctgttcttcagagtgctactaacaggcagagataaagtgcagagctgtagaacatctctttccgctgaagattattaagaacatcaaagtaaaatgtgaaactggattaataaaatggatactgaattaatgtcgatagtattgagagatgatgatgctagtctggaggtttcaaaatgttacagaagattaattcaatcaaaggacacatttgaacttcagaaaagatagctgaagagaacatttgcttttcattcctcaaagatcaatttatattttgaactcatgaaacagtaaaagctgaagtactcctataacacatttaacctgtcatgaccaaagtagcaactgagaagaattcagaaatcatggtttgcaaagaaatagagcatcaattcaccaaatatactgaacatttcaacattggcacaataacaactaacttcaatgcctcaaggaatattcactgtaaaatgaagaacacttttcttctgtgaggaataaaatgaaccatatttttgtgaagctatgtttagaaaattgcatgatatattgtattgccaatattctatttcttaacctatccaactaggtcaaagctagttggataggtcaaagctaggtcaaagctataactatacaagtgaactgacaacaacaggaataatgcctgcgagtagctttaactgataggacctatactgaactaaattagtttgatgacataaacttggcaggtcaagatactctctgggctatcataggaagaaccaaagagtataatctttcttacaacaaagctatgaccattgacaaaagataggctgctctagttgcataaaaaactcaccaacaaggataatcatataatagactatttgtcatatttcagacaataatagacatatatacatgttttttccgatacttctatgatatcatttgtgtctttgtgtattcagcttattattttttgcatttacatcgttgacctggttctggttactaaataggacaaattttatgcttgtagatatatatgaaatacacctaattgaacttgatttgtgttgaaagtatagcacagctagaaggcagagccaaacagagatgtaattaacatgcctgggtccagattgaagaccctatcgaacaaatagaggaaaggacagaaaggggaaaaagtaaagtctaagcgacatatggcacgaaaaggaaatccaatttcggtaagacttgatctgaatcgtagttcagatccaagtcggttcagtgagggcaaccgcgaaagtcaccgaatgggttcggtccgtcttttcctgatctttgtttgtccccccaaaaaaaggcgtgagaggacgttgcagatgtccgggacggacacgacttcttctaacgctagaagaccacaggaagaaacccgggaccagagcatgtcgtgaaagacgcacacggggcgggcgtgcttcgttgttcaaagatgttccagatgattggtcttctgccaccctcagctgcaccacccttgtactgcatgtcaagaatggccaactcatcagatttcagaccaagacaaaacatgtgagtgtgacaattaattttgacaaccaatccattccttggagccaatcttatcaatattcagtagcatcgtgtatcacgcaaaaaccaccaagagcaaaagaaaatcctttttttcttaattatcggtggaaattaatcacatgtggcgtgaacacgtaggggaccatgtgagggaactcctacatcgcggcgtccaacggcggctgccatagcgtggtcctcggcactacgccctttgctgcacggcgaacggcctccgtctgaggcggccggcgaatcaaaaggcggctgggtagacgggcacggcgatggatgtgaattttctcctcccccatccccgcgcacagcaaccgagctcgttgccctatctggcgaggatctgcaccgccaccgctcgaggagcccctttgccatgccgccgccaagcttgaggggagaggcagcgtcctcaccggagctcgtcgctgacaccgagctcctcttcacatatagcgacgaggaggggatcagaggacagaggactgaacggcgcgccaacgcgtgggaggctcggcctcgggcgccggaggcggagcagcgggaggaagaggcggcgacgtcggcgtaggacggcgggtcgaataacaaggaggcggcggtgacgtcggcgcaggtcggaggggagagcggcgaggtggcggataagagggggtcgaaggtggaggaatagagtggtggcgaaggggagagaagggcctgactttttttttgcaaaaaaatgcacctaaaatcttctatattacaacgaggtccaccacagagatccgtcactgtacatctgcgatccgacggctataggagggggtctaactctggattcgtatgacgctacgtggagggtctatttgcatgagaatccgcgaagatttcgatattgagagatagatagctttgtaagcactaaattgatcattgtgggtaacttaagaacgggcggctcctgaatgggatctataatcaacgtgttggttcctactaaagaatcttaacgttcaaaccacataaaccacctgtgaattgcacaatggtgtatttgttgtccactcctgaagtgtcttcaaagacctgaaaatcaagtaacccaataataaaacttcaagtgttctgaataatgcaacaaccatagggttaatgcaaatcaaaatacaatcccaagaaaacaatattttcataagaatagagaagtgatgacctgcacaacagcctctttcaccatcaacttccagaatttggccacaccgagtggttccatctcccaatcggatgtttacaatttcctagtactttgcgccatgaacatagttacatgaagaaagaaatgttcagtataacttgctaggagtaccatattagtcagttgaaaatttgtaccataatactaacacatacctttactttatccaagataaacagaggtcctggcacaccagacacaatcgaacatttctattatcgagaaaaaaaaagatacatgaggtaactatctctacctttttattatctccttaaatcccttgttattctgtctctaaatccaagatgcaaacacaaatcaattagtaaaaaaaaatgcattcattgccagaatcatctttttttttaaatgaacccattcccagattcataatttcaaaagagaattttgaggccaacaagagcatgcacttactctttgaggcaagcgatacaattggcatcaatccacacggactacaattttctcttcagttgtgcctcggatggctgcagcaccagtcatcccctaaaaaaacagcaaacaaatcatggttagagaagaggatgacatgggagagatgaaaggagaatgattgaggggaggcaaggtacagtcgatagtctgagacgacgaggagaagatggaccggaccctcgttgatggatgtgccatggatttgtgtcctcctcgttgaaggctcaagaagacacggcgacgtagagcaggttcgccaacacaccacctcgtggagggatcaaggcaccgcctgagacctagtgttggatgaaaggggaaaagggtgtgcggtggggaggagggatgggtagatggcgaaggggatgccgccggatccagagggagaagtggcgccagccacggggctacaacgacaagaatggaaaggggaggagcgggtggttgacgtagactcgaaaggagaaagaggagccgtgtgcgagggaggcggagcggcaggagttggaggagacgcagggggagggcggcgttgtggagaggtgaggacgggaggaggagcaggcggccaggatgcgggagaagaaaggggaagggagcaccgacgccggctctgccgccaaggtagggggatatgaagggggaggaggcaccgggccatctgcccgtcccatgtcccactccccaccgcctgtcctactcgtcccgcccgtaacacctccttcttagccgccgtcaccaccggtgctgctccagatctgaagagggaggaaggctagcgccgggtcgaactacgcaacgagatgagtgagaataggggtgaaccggcgccgactccgacaccgccgcaggcacagacgccgccacaagggagagagtacaagggggagggggcgccgagctccgacgggcaggagggagagggaggggaggagggtcgtcgtcgacggcggcggcggtgggatggcgcacggaggcggcagggggagggcggaaggtggcggcggggggagagcggacgacggcatcgtggggaggacgaacggcggagacaggtccccgccgccggtgcggggcgcggtggggaggagatggggagacggccgggtagggtttgggccttggttaattggatccatgccactgcaaaagtgcaaatatggcatatcaaaataatgccactcttattcgtcatatcggctacgtactactgaaatctaggaaaattggaaccatgccactacatcacattttccatcaaaaatccccgttagccccaaactgcacgtgggccccacatccctcccctctcttctctttccccttcctctctctcctccaccgtagatgcaacaggaggtgtcgtcatcatcgtatgagggaggtccggctgcgcctgcgtcgtcgtcgtcgtcaagcgccgaggatgtagtccacctgtgaccgagcggacgcagtgaactgcgccggcggccgccgccgccatcgcactggagcgaggccgccctcgtcgccatcaggtggtcgacgtgcacagcgaggacgagggacgccagggtcacgtcaagggcggatctacccattaggcagggtgggtcgaccgactcagctacgacacgtgtcaccccacaacctctagacctacttacctccttatagtagtcatgggacattaaaatgtataacaaggtgtaaacacccaacagattaaggcaattatgcgaatgaactattaatacgatatgtgttgttttcgattgctcttatcgagtgtacatcttcgttctctgccccatctttcgattgccgccggagtgctgcatgaggttgcagatgaactggtctaggttggtcttcatctcggtgtgactaccatcggccgggagcttcccttggaggaaagcggcaggaatacaagattaattgtataatgttaacatccacaatccaaattaagcagaaatttggattcacatgaacaagaacgaatcagaaggaggataggttttagtgccttggtgaccaatgcttgcgctttgacgaacttgtcatcccagctgaatatggagcgcctcgtctcggagccggcgggcaggactgcgccagtatcgtcgtcgcccactccccgggcgaggtccccggccatcgcccccgcgccggtcgccaccccgcccaccgccgcaccgccatccccaacactcgttgctgcagctaccaacctcctcccggcgcgcttgctttctgctcctgaaccgaagaaaggaagagggagagagatgacggaggttgacaaaaaactggacggaattggcatagttccaatttccccaaattccagtggcacatagccgatatcgcaaatagtagtggtatttttttaatatgcagtggcatggatccaattaacccttgggcctttgaggtagatatgactgcttttcatgaaagcccgtgtctttttcatgtttatagcactacccctataaacagaattttcttttcatcgggtgtgtttagttcacgctaaaattgtaaatttggttgaaattggaacgatgttatggaaaagttgaaagtttatgtgtagaaaagttttgatgtgatggaaaagttgaaagtttaaagaaatagtttggaactaaacttggcatttgtattgtatttctattcaaaccgaggggttttccaaataaaacataacagggtgtcagtcggttcgaggatatatacgatattccgtgaaaagcgaggagtttttttttgcaaaaatactcaacataaaaaaactcaaaaaagggggaaaaacgcagcatacacactactatcatcgatattttgtttgagatgtgcaacagacaaagcccgaccgaagaaccctaacaatggcgtcgaagctcgtgacggcggtcgcccgtcaagcggcggccacatctcgcgccgcccgcttagctgcggtggcgcgccatgacgcggcggccgcatctcgctccgccggcttagctgcggcggccgcatctcgcgccgcccgcttagctgcggcggccgcatctcgcgccgcccgcttgaagcctcgtcccccactggacgacgctgcccgcctctccttccgctacagcagtgaacctccaggtaaatcataaccaatccctccctgatccctccctgtcctcatggtgcagctctccaatttagcatagtctagataggcaggcagggggattaggatttaggaggaatacatccatctctggtctgtattaaattcattcaattgttgcatgctattcgtacaattcactgttttcttgagcacttttactgatgtaatgtttgcaaaattgttgatttgtttgtgatatatagatgatggaaagtgcgtgacaaaagaggaccttgagtcggacgaagccgtgtgggccttatttgagcgctattgcaagtcatacaacaggaagtatgatcatgctcagatggttcgccgcttccgtatattcaagttcaatgcaaagagaacatattgctggaaccagtatcttcataaagacgtaaaggaattagctcgcgccaaaaaggatagggatttaggactacctgtcgactcttggtacctacaaaaagagttaggcgaatacgacgatgggggggagccacttactgaatattggcggaaattttgatggaaaaccatctgccgctggtgtgtcctgcatcactccacatgttactgcagtaagagcagtttgctccccaaatcacttcactgtaataactagtagtcctttgacgttccgtgtttcttactaaggatgcgttcgtttgggtgatagggagtgagaatgcacatcgttttccgcacgcacgcttcccaaactactaaacgttgtggttttttgcaaaaattttctatatgaaagttgctttaaaaaatcatattaatccatttttaaaatttaaaatagttaatactcaattaatcatgagttaatggcttacctcgttttacgtatctttctaatctcctcaatccccttctcctcaaacacaccctaagttatgcttgtgtaccatctacttaattatctaagaggtcatgatatcttgcatatggttccacgtatgggagtgtgtgcgtgtctttttttttttttagcctttttggtttacaagcacaagttttctagcagaccaagatcaagtgtgatgattctggtaatgtatgcagctgtttgtgcacattaatttgttgagcatttattatgacgaaactaaaggttagtatatattgttatgtctcaaaaaattcaacagtttaaccgttatcatttactcattgttcgttcattgatgtatacaatatcaattatatccagtggtaggacctttattaactaataacacatgaatcttacttgaatatatatccagtgatggaactaaaatttgttatttggattagttggcacattggacaaacgaacggctgttaactacctatgtgaaaaattacttagattgatcatgtggctgttaattcagtttatctagaaaatatttttgcaacctacttgtttggtgcttgcattgtttggcaacccaatgagcaagctctaggtgcgcagccttgatctctagttacatgtacagtagttgcgctgcctcaaggcaccatgttaaatgcagaaatctagacaaaattttgtaatatatcctgaataacttcaatgttcagactctttcctatgattcttttgcaatgtaaagaacttcatcaagttgtatatataaacgaacatataatccaggacaacaagacacattctttctgatctagatttgtgcacatcaactagattcaattcatatagaccaaaagaaggaatatatatatatatatgcttgtgtacaaagaaaataacataaccagtataggagaataagcccacaaaacaaaaacaaataatatagttagaggcattaactttgagcatactctctcttaagtctcaactttaattggtctgttgtataaatggtcagtaactggtctgttgtacttgtactattttctcgatgcaaccatttgccttgtatggcatattgtatatataaacaccatggattggtgagctagcctatgttactacatgtgtgcttggcattgactgggcgctttgagtagggactgaaaggttgattgtttgaaccgtagctcggatggacgagcgattggagaccgtggatttgtagacctcatcgagatgtaaatccattttagtctggccgtttggacttcagatgaacacattgttgtttggttcattttgtttttaagtaaagactgaattgccgccacaagaacaacttgtgaagtgggtgcaaatatagatcatataaaacttgaaaattgctgaaacagaccattgtgcgctagattggatttcctgtttattttactggtgacaggtcgttattgctgtgcatggagagtttgaaggtcagtttcaagtttatgaataaaagtttttctttttcttttttgtttggaacaattaagctcttattattctcttactgtctgcaataaacagttgataactccagcaaactgaagagtaatgttgcagcatctaagacttttgcatgtctccatatcctaaaagttattctgatgagaggcatgttcactgacagcttgatccatgtgtcatgtatttcagtgtttaaaaaatgcataccccaggttatgtttgccattagagcaagttcaataatatagccaactactagctccaatttatctatagccaatttaatagctcattcatacaatagttatatactacactattaatacctagtcccacctgtcatagacacgttgcgttttggagtccgtgctacagctggctacaaatctgtagcccgctgctctcctctctcctaatttatcttcttaaaatatgtttgcccgctgctctcctctctcctaatttatcttcttaaaatatgtttgcagttggcttatagcctgctattgtacctgctcttatatacttcgctttatcgaatctaactttactgaatttaactttggtgctgaaaatgaggcaataaagtaattattttattacagttggcaggaacttggaaaggcaaatcggtgtctaaacttggtcttgcgatgtttctgcttaatgcttataaattaacacattgatctatgattacgtggactgctaggtgaagccaatagttatacttgctctttacctggctataggcccctttgccacctttctcgagggttgcagggggactgcctatgaagtgtcattcttatggccgtgtttagttacatcccaaatgcccctaacttttcatcacatcacatcacatccaaaacttttctacacacgtaaacttttaacttttttttcaaacgaactagacacaccttattccgcgtgaccgttataataaaccagcatacattgagtgaggaactttgacaaaaaagaacacactgaactcccaaattttgccacggaggatctagcataacttgtcagagacgagatgtgattagcttgccgtattaagacatgcacgcaaacaattacaattacatgacagaaaattactgggtagtttattccagaaaaagcaaagaaaacaacaggaacatggtaaaaagtactcctacagaaagaatggaagaacaagtaaaagtgctgaatgaatgggttaagacaagaaaaaagaatgcatagtccagccgaaatgtcaggttggttgggcctggcagcaagcataaaaacctaacgtggtaaatgtcatgtcaggttggttgggcctgccagcaagcataaaaacctaacatggtaaaatctcatatcaggtagggttggtcctgccagccagctcaaaaacgtaacatggaggtgtatttcttatactatacaattgtatgctaatcacatctggtttattcctgatcatcgtcagtccttcaaatactcacagacgatggaacgtaaggaacaaaacatggagtacacccttcattggttaggggcccaaagttgccagtaacgaggccttcaaggtccatggcgacgacgcgctcctccaagggttcccagacaacgacctctgcggcgccttgtgagcggagcaacatagcccttttgccaaccttctccccggagaatgagccgacaactgtccagagtgcagcaaccttatcatcaaacagtcgcttgtttattttaagcacgcccaatgtgaggaaaccgtcaacatccttgaagcaggtcacagtaagatctccctccatttgcccaagctcccatacggtatcttggtttaccactcgaggggcagggatgactttaaggaggtccttccccgggtcatagcagaggatagacccaagggaagtgcgccagaaggcgcagcccagtgtaccaacaccagactccgccttcacctccacagcaggaggggcatctttagcaatagtccacctcccagtcctggaggagtatgactcagatgtccagacgctgcccttgaggtggaaggcagcgacgacatgataatgctcaacagcaccgtcgaagcaggatgtcaggggttcctcgaatgtgatgacaactgctggttctccatgatcacaactgtggcgtggtagctgaacccacttgaaggtggtcgtgttggttacatagtacaagcctgttgtctttccacagacgcagacaaggccacgcgtggatgcaaggaaagatacgggctctggtaatgcagcaaagcgtgactcagggtaaagaagcttgccgcagcgtatggtgtcaaatgcgagatacccaggctccttacataatgtgttgaaaaagaagcctgagagcggcctgcacagcggtgagagaaaaatttaaaggaagagctacaaaatgacactagatgtttaaatcatcacaaaatagtcagtaaaggatctcctatatctaaggagaattgcatcaaatgctgatgtttaaaacatcacgaaatcaaatgagatgcagtagatctaaaaataactaccttgaagcggtactttccagtggagcatcctcatcacacagtttatttatcatcaattcatttctgaggacataaatatgagcaaaagcacaattgttagtggataacacatcaacaacattgcaatctgtgaccaacgaatagtgatcatataactgcagaaaaaaatcagctaaaaagcactacaaatttgttattctgttaaatatgtatgaaacaagtttagtaaatacacttacttttcaagcaaacttctcagcacatcctgtagaggtcctcctttcgagtttggagcaatttcaatgacctttccatccctaattatgttaccaatcgcagcagcttcaattgaagctaactgatactctaaataaacaaaaaaaataatgaaatgtaaatttataattagttcagatttcatcaatataaaatgcatacctgtccaattaattctacaagataaagcagcaacttccatctcatccagaatttcatcaatataaaatgcatacctgtccaattgattctagaagctaaagcagcaacttccatctcgtctagaatatcatcccttctgttagctctactttgaattatagcacaatttctgttagctctaccttgaattatagcacaattttctggagtgttaagaccacctatataaacaaaaatatataaataagattaacaaaacatacaaaatgggactatctatcctattcataccacaaaactagttaattaagtcgtatatcattgaacattgaaattaacatttatagcgcctcaattcaatccctttatcaactaacaatgagaaattgtgtcatgcttgcatcacaaacaaggccataatgttattttaccatgtcggtcaggaggcgacggcgcgggctccgaccgttccgtcgatgcgcctgtgccggcacaccgatgagacgtcggacgccggcggtcggacctcgatctgtcggtcaggaggcgacagcgcgggctccgaccgttccgccgatgcgcctgtgccggcgatatggacgtcaggaggccggcgtcggaggcccgtcgatgcccctgcgccgacgggcggcgggagaatgcccctgcgccggcggccggcaggatcgaagcgctccggcatcgtcgggaatgagcctggcggacggtcgctggcggctggaacggtgggagagaagagtgggtttttatagctatctattagggtttcttaataagcgctaataatcagaaaaaataatttacgacgctccattatccgaagcgttaggcgctaataagtaataaccaggaaaataatttatgagccccgctaatatcgaggtttatactccgtaccaagcaaggaaatgaatttaggttctgattgattcagcttagaattattataatttggattattagaagtaagttgaaacaaacatatagcttattatgatagattaatataatatactagtaaaagtgtccgtgcgttacaacgggaagcgtacagatcaaaaaatatgcaattatttaaaatacaaattcgttgaaatttttggtatttttaagtaggtatgtgtataattaaataaatttacaagtaaagcaaatgcgagaaataaaataacatggttaaatttaattttattaaattctccatgattagtcacactctttagaattttattggaattttcataacttaattgctaattttaataatacaaacatcatttaacaaattgtttaattggaaaaagaaagaaaatcctttcttttaggtttgattcgaaataaacacattcaataactataattgtaaatgcttctaaaaaaagaagcactaaaaatgaactacttctctttttcttcggctagagggacctaaaatagacttcttccagacccttgccggtcggcccacggccttttgcgcatgcgcgggtgcacttcccctccccaggccgcaaccttggcttgggccggaaaagtggcctcgctctcgatcccatttcgggccgaaatcggcccggtcgacgctgtccgtccgatctctagggttttgatcggacggccaagcctcgagatcggggaaacaaaaccccctcagccgccgaaactgatgaggacatcaacaccatcgatacatccacgtccccccatatacagcatgatggtcctattacccacgttcgtgcacgtcaactaaattatcaggtgagttctttcttgagttcatattcctcgtctttatacctcggagacgcgtgcactcgtgttttactcaggaacgatggagaggatccaaagggaagaggattcgcgcggggtggattcggactgcagggcagcgccaacttctgacggccgccacgacttcatgcgaactccgatttgggcgtgcaagtacttcatggaaagcttatcaagtctattttcaaatggatccagccacatgtccatatctgttctggagcggccgcaattgtcattttactcccgactattttttgtccatggtgctgcgtcacctcttttggcccaatgggctgtgtatccatgttgggcccattaggggcgcgtcctagggttggagcacgaccctatggtcgttcttcccctctttttatacctctagtcgccgccaagaacaggcaggttttgatgatagagatagcttcttgctaccggctcgcagcgcgcgtgttggctaaaccgcccgtctgcctgtaatcggaaccccaccatattgtgtttgatagtgaaactttcatctttatctagcaatctcagcgcttgtcctacttgttcttgcttgttcttcgattgcttgcaggacgagtgccctcgtggccgggttgacgcgcaccacaagttcgcggcgaccattggagacggtgtatcggttgctaaggcgcagcgtctttggacagttgtagtcgggccgtgaacgtcgacttcatctaatcgagttatcccttacctctcatcgaaagatcgggccacaaaccctagcgggttcgcatcagaaaccctagcccatttccttcccacctatctctctcttcgccgccctcccctcagcgcctctgagcggcggcggcggtggtaccccacgagcagcggcgacggcgcccctcctcccgcgagcggtggcgactgcggcggcggtggcgcctctccccccgagcccaagcggcggcggcggcgccctcccctcgagcagcggcggcggcgacggcgcctctctcaccgagcccaagcggcagcggcggtgccctccccccgccagcggcgacgacggctcccccatcaccggcggtgcggccgtgtcctccctcaccaccggcagcgcggcgacgtcctcccccaccaccggcggcggcgcccggggaggcgtcggcggctcgccagcatcccaacggcggtggcgcccctcccctctgtcggatccagcgggaggggagctgcggcggcctggcgtccctatgacaacggcggcggttcgacggcgacttccccttcgatttttttttggatatatttgtgtgtataatacttcctccgattttattttatttgtgtgattgattgaattccgattaggatttttttttgggtggtggtgatggaattccaactgggatttggggggaggcgagggggacgaaaaatcactgcacctatgaggtgacgaccggaaaaatacgaatatttatattagttatagataagccagattaatataatctggtaagccactataaatgtgtttttttagattattgggtggctaacaactaacaaacagataataatccagagaaacaaacagctagcaacttattctatgttggcttattataatccagcttatagtaatctagttctataatctagattacaataatcttaagctgaaacaaacagggccttaatcgccgggatcgccattagtaatttaatcgcctggatccctattagagcaagtttaatagtatagccaactactggctccaaatcatctatagctaagagcaggtacaatagcaggctataagctagctgtaaacatattttaagaaaataaatgaggagagagagaagcagcgggctacagatttgtagccagctgtagcacgaactgcaaagatgaagtgtgtgtatgacaggtgggaccatgtattaatagtgtagtgtgtaactattgtatgaataagctattagattggatatatatgaattggagctagtagttggctatactattaaacttgctctaaggccattcccaaccccaacccaatgattaggatggtgtccatagcattaaataaactaccacctaagatgaaagatgatgtggtaaatgaataaatgaggaaagcgaaggaaatcaggtcttgcataagacatggtttctacacaacatacaagacatcatgtgagataagtagcattaaatttaagtatggaagagtggtgtttgcattgatgaaagagtagtgtctagtactagtttcttaatgatgtggagtttatagaaactatgtctagtgtcttgggttgggactggcctaatctaatagcccattcatacaatagttaactataaaaatatactacactattaatacccggtcccatacacacgtaatgtattgaagtccgtgctacagctggctacaaatctgcagcccgcttttttctctctcttattttttcttctcgatacgtggttataggtggcttatacctgctcttaggaactaagccacgtcactgtctaatcctcaaccattcgatctgatctgagcggcgcacacgagtcagcccatgtctctttctagggttttttctccttccccatctggatcgcatcactcacagccgccgccgctggtagggtaggtagaaaaagaccgaaccgaaaaaaccgacactgagaaattcaatcattaatttggtcctatgtaatgaaagaccaaattttgttcggtcaaaattcacttagtttactcggttaatcgaatagaccaaatgaccgaattaaaaaaatgtctaaatgcaatctacaatccactaagttcaataggattaaactctaattttcacttccctacttcttctaggcatgcaacataataagagtctttacttctacgtgttcacgattttttttggtgatttttgtgttgaaaatttccattatttctttgcaaatatgaaaatgttgttgaatttcggtcaggaccgagaccgagaccgaatttgtctatcctgacatttttacattgaaattcagtctttacttttcaaacaatgaaatgaccgaagacgtggtcgcggtcgcctccccctcgccatgctgcttcccccatccctcgcgcacgattctataagaaggcaaggcaagatagcattgactgttgcatcatcgggaattgtatccttgttacttccaggtggccacacgcctcattcccagaataatatctatggtttgggtaggtagtatcatcaaatcgattaaaaatacttgatctcctaatttaatcggaacatttctacaaatagatgatactaatacagttcctccaggtgaatgtattagcatagctttatctaaattatctttaggtaaagactgatttcaactggcttttgcagataaaaaggaatgagaggcaccagaatcaaataaaacagtaactggtttagagtttatggtgaacatacccatcaatatattaggatcttgttgcgcttcttctgctttaatatgatgtacttgaccacgtccaagattaggtccactcttaataattggaggatttttctttataaaacctgtagcagatggtttctgataagaagtttggccacccatattttgacgattagggcaaagtcttgcaaaatgtccaattttcccacaaacataacatggagagtcttccatttttaatccaggtcttggtagtattggtggcatgcctggtcttgcattgggtaaagatggcttaaatagataaggcctccgaacttgtagtgaacccctagttggtgattgtcgttgtaaattcattcttctcttacgaagtccttcgaccattctacgatcattttctagcctaaccactttattgactaggctttgaaaattttcatgatcttgactaatcattggtcctcgaagttcatcacgtagtccttctataaacctttcaatcttttccttttcatcttgaatatcagaggcagcatattgagcaagttgcgtaaatttattcaaatattcttgtactgtcataaagccttgcctcaatcttcgaaattcattctttttcattctaatcacagctgtaggtataaaagcatctctaaaagctgtagtaaattccatccatgtaataatatgtgtaggatcttctatagaagcttgatatgcttcccaccactcattggctggtccttctagttgatgggttgcaaaggttaccttctcttgttcgcttgttcggaccaaggttaatttcttttcaatagcccttagccagtcttcagcatccataggttcttcagatttagaaaagactggtggtttaattctcataaattctgcatgtgcgctgtaacctttacttccttgattttgtgctatggcttgtaataattgagtttgtcttgccattacttctgccaaagtggtaggatttggtgaagggatttctcctgtttctctttcacccgtactgccattgcccatactcatctagaaaatggggtaattgatatcttctcaaaggggagtcaacatccataattaaacatagcttttatttatggacaagttgtacatgatgtatgctacaaagaaacaaaccaaagaaaaccataaccacaaagaaagaggtaatcacacatagaagttagagaggagtaggataactatctattctacacttaagacctctaactatctataacttctatttatctagccatccaccactgccttctgcgggattagtaaacaatgatgcaggtgcgaagtgtgaaaattcatgaggagatgcagaagttgatgcagtaatattgggagcagagcatgagtaagggtcttcattattttcttgatcattagtatgtatagaaagatgttcttgtgtctcaagctctcgttcttccggatcttcctcttcctctggagattcagtccagattggggcagtatttaactcattgatatgaaacacccgatttggccttagtatttctggttcttgactaggctcactgatatccatagctgaatgcatttcttctgcttcatcatcagaatgaataggatacaacggtggtggtgatggtggtaaacattgtaaaactccctcaccattatcatgaggatttggcccatctggttcaccttcacgtactggtgagatatgtccttctataccatcatcatcatcatcatcatcatcgtcatcactaccatatttgggatttgatgaagacaaaaggctgctcctgcaacacaaatattgaggatagaattttgtttttctctttcctcatataattcatgaagtatacgatatttgtgtttaagaacattttctctgcattcagcttcttcaagacgtttacgttgtacgtccatatgttccagagcttcttcatacatgtcatccgcggcttccatccagatagacatagttgcttttactggttgttcatgataatccacattctggagggtgcaatagtcttcgcccggctctcgcataggatgataagaatagctgagagtgttgcaacctgtcttggtaaatatgattgagacgtagaaaagcctccctggacacatcatatagtgcagcttgcacggtatcccgcctatgacgtgttcggaagtaatacatatcacgttcacctcgtggaggattgatctttacggtcatatcatattcccaacgttctccccgttgataagcatgtgaatagaattccggcttctcatttatcttcagtttagtcatcaaattgattagttgatcagtgcactcattatcatggatagtaattgcagtttctatgagttcttgctcatgctcttctgccattatcctgaaatacacaaatgatattataatacatgctcgtggattaaatctaccccccttaaaaggtaagcttgaaataaattcaaacttagcttagttaatagtccttaaggttcatcctatagtcaaacatatgctctgataccagtcctgtcggagcccaaaactaacaacttggatccgactgagattaatgtatcaatccctggatcagtaaaaattgatacatacaatataactggttcttcattgcatacgttaaagtcttacaatactaagggttttacaataataggtactcacctaagctaattaatatacagcggaagtttctatacattctaactagtgaggtataacctttagggattttctaaattatcagggtcttcgtagtaatagttataagggtcctcctcttgacccagatctgaaaaaggggttataagagcaaggatgagtattcacaatactcagcaaattatcatggaaatatgttatgcattgacatataatagggttctttgcaaaaagcggtattggacaatctggaaaagttatagcagaatttataaaacatataaactttagatttctaaccaaggtaccatatgagtcccggtactcaactccatgagtacggctattcgaatagtttcaaagatattctactgcagcagatgtacgctttacccgcagtccatgacttgctgataatcatcggctttagtcatggctcagtattaagtcaataacaattatggcacttattccatgaacttatatcctcatatgctctgaacgtaatgttaacagcagcaagaggagttctggcgttcccgaggtatttaaggggaactgatcgtatgacaccacatcatctcgatcagggtttagaaatataccatatagtttatacccgagtatcacaaaccatttacctgtacatggtaatggttaaagttgcccttcgcggctatagttgcctcctgcgcgaggacttaaaaataagaaccactatacagaggtgccatattgctaattaacataataactaggtctgtccccattctagaaactgcggtcgtacccattcgttcgacataagtacctggtaaaacttatatcgattgagacaatactagccacccggaaatcatccaaatcttacgtattgtcccaatctaagtatagggtattttaaccagattgtaagcaaaataagcaatactaaattatttgggtttctatgattaatttatgcatagaaaatagaatattgaatagaaggctataaataaataaataatttgtaaaatataggcttaaatgatcaacaggtatatggtaacttgccttgctcgatgtcctgagattgattgatattatctagagtgtcagaggaatcctcaagacctagggttagacatataaaattcaaattcaaaaaggagtttaaataaaatgcaaaaatagcaaaaaggggcccaatagatagaggatgattttagaagaatattggtccaagttttactgaaattggatctatattttaaaagatatgggcttctaaagtttgaaaatcgaataaaagtgaaatggtactgtgtgtgggtcccatctatcagtctctctctcttctcttcttctacctccagccgttccccatttcaagccggcggcgctagggttggcgactgcggtggcgctagagggagaaagtggttgtggccgaggaggggagggagctagggatctccggcggcggcgagcggtggcagaggagttaatttgatgcgtggacggcctagcggctagggcggcggtggcacggttaggttgtgatggtgaccggagtgatgagagttagacatggttaggggaggggttctagagcatctacggggtatctagagggatttcggcagcttgccaacctttggcaaggtgcggaacatagttgccgacgagcgcctacataggcggcggccgtgctcacgtcggcagctcagagggtgacatgatagtgcaaagggattgctcaaatggaatctaggtagtatgtaaatggttgaaatggaagaactcaccgagatcggttgaaacgacggattgcggccggaaaaacttcgcggcggcgaagaacagagcagcgcaggggcggcagtgctcggcttggtgcggcgaggtaaaactcgacgtagggctttggttagggcttagtatactagaacatggtatgatataggtgttctaagtgttatttagggcggaggatggatggagaggggtggagtcgatcacgcacaaagtgttcgaccgacgggcgagggtggttgatgagatggattggtgaagcagagcttcgggattatggggctatggttgttgatgatcgatgatggacagggaagggattggggtcctatttatagggctaggaggagcggatgagctcgggcaccgttatcgccatggatgagctcgggatttggatgaggcaaaggtggcagaggctgagagagggcgggaaagatcgatttgagtggcgggaggccacgtttgaatacttaccggcgaaggattggcttgaccgcgtgttgattcggctggcgacgtgttggcgccaatccgagcgcgacgcgcggcggcggcgagggtgaaaacggccggctcaggggtgaatggtttgaattgtgagaggggataccaccgtctatctccaatccaaccgtgcggcaagaattggcgcgattcaccccgggtagaagcgaaatcgcactcggtggcggcttggacgggtgcgcacggcgtcaagcggtgatttcgtgcggcggtcgtcgtcccggctttgtcatcgtcgagattggtgcggcggcggtgggctgagggcgtcggacgggcgacggtgcgccaaggcggtcgggcacgcgcgatcgatcccgagatcaacgcgcggcggctcagcgcgcggcaaggtcggctgccagagagcgcgcgtgaaggggaggagaaggccaactaaaccacggtttttgagtgggttgtgatcccctaggaccaaacctagactttgcacaagattgggttgaaggtgggctgctctagttgggctgggcattttgtcgagcaccttgagtgtaatgaacagtaaaaatcagaatttttgaatatttccctagaaaagatttgaattcaaactaagagtttggaaaggtttcactagggtttagagtatagtaaatctccactaatattgggataagctaaggaaataatctatggtttgaatttgagagaaattgctcaaattcactagggtttagaataaagggaataagttagagtaaattggttgggctctaatacttgaaccaattttaaataaaaaatcaaatagatttttgaaccaaacaaatttaatcaaaagccagcatgatgcagttaattttagtttaaaatttgaggatgttacatgatgcaaaaacatctctcattgtttgggatgaatctcatgttaatcataagtattgctttgaagcattagaccgcacactcaggacatgttatctgctaccagcctgcattcgacatacaaacagtttagcggttttgggtggagattttgcccaaacacttccatccaatcatccaaaatgtaacaaagaaaaaaaatgaaatcatgccttgttttaattcatattgatggagtacttcatttaaccgaaaatatgaggcgaccaacgtgaaacccaccacgcacgcggcccgcacccccatcccaaccgaccgaccgaccgaccggctcgcggtcgcaggcggccaccgcaccaccccacaccacccaccgacccatctgatcaagataccgatcgattcctccaccccaattcccaattcgataccacccgccaggccgccacgccctcccctcctcctcctcgccatggcggattgccgcagcctcatcgagttcctccgcgccttcgagcaccgccaccgccaccacgccgccgccgcctccacggactccgccgcctgcggcaccgcgcccgcccgcccccgccgcgggtcgtcgccgcggagggggaggcggaggctgttcacgtccctctgcgaccactccgcgatggcggcggtcgacgcggtggcgctgctggccgtcgtctccgcgctcgcgttcctcgtcacgccctacgtcaggatggtggcggccgaggtcgggggcctggtgtccgacctcgacgcggcgggggtggcgtcgtcgtactacgcgccgttcgccgcggcgggcgccggggcggcgatcgcggccgtggcgggtgtggtggcgtgggacgccgtggggcaccgggcgcggaggtgcgggaagccccggtgccgcgggctgcgcaaggcggtggagttcgacatccagctcgagacggaggagtgcgtccgcggccagcagcagcgcctgctcccgctccccgggggacgcgccgcgcttctcgcggccgccggggcgcgccccgtccagctcggcgacgcgcaccgcgagctcgaggcggagctcaggaagatggcgccgcccaacggccgcaccgtgctcatcttccgctcgccgtgcgggtgccccaaggggaggatggaggtctggggcgccaagaaggtgcgccggatcaagaagtaggcagccgcttactcccatggccatgaactgtttggctattgctgttactgcttcatcataagaacttgctgttacatacatagcaatactatcacagtgctctgctcttgtagctagtataattgagcataaggagagaaataaaagtggtagatacatgtcttatgaacttattatgatcggtcgccaaatcaaaagtagcctgctccttggttggcagctgttaattggattattatgcaataagtggccatttcctcttgggtatataaataagcgtggtggatagacttctatctgataactcgtatataccttgttgatgaccagacctgtcaatttatactctggctgttatttgtgctatggagtactatgtaacatggatggttttctggaggaagcaatcccattgctgttgcacttacattttgaaaaatgtttgctaacagtatttgcaatagtccaccaatatatgagttattcccttttgtccttttttcattcttttttgtttcaagcagcactaagctctaaacctgatatgttggtgctgaccactaaacctgaaatgtcagcttcatggtggcatgaataacttctacgttatgttattaaattgaggtgatggtgttatttagacggtaaggtttctggtgttttcccccccttactgcttaggttctggtgagatttgataattttccactctttagatttctgttatgatgatttgccatcttggcgcacacatcattgactcagaggaccccacatgtaattgccatggggtggcaagcttcaatctgaagagtggcacatcatcaaatctgcctcttttatgtgaatgggtatttctcagtttgttaattgtacttttctatgcttatcttgttgcatttctgttctctaatatatccgcgtgctttccgttgtattcatattgagagtgccataattaatatgctgtcttccgttagttatcctgtggtacaactcaacatttgcaatagcttgttcatacatcattgaattatttataacctatggtacaactctagatagctacaatctttcccggcctacataatgtatttacagaattaaagtagttataactttggaagaaattatttgtaagctcatttcttctccttgattgtattacatattgtcagctaatcaactccagctgaagccgttcaagtcaaaatgtctataaccttgatcgttatcatctatattgtgagtatttagatcaagattcttccctgaactttgttgatcaaaatctagtagcttgctttctctttgatagtcaactgtttgtcttttgcagcttggttcatcaagatatagcttctctacatttatttctttgcttcctgatgttgaactggttgtgctgcctccgccattcttttgaggcgtgatatactcatgtagaacctctgtatcactgtcacttccctctgatttgtgatactgtttaccgctatacagatgacccattctacgctcacttaagcttctgttaagggaatattgagattcttgatcttgggactgttttcggcaaaataatgtactatcatcatatgctttgagtaccccgtggttttgtagcctatgctccttgaatccttcagctgcagtcaaacagttattggctgaactttcaacaaactggatttgccttggctctagtctgtgtatacttgaactttctcttatttctgtaactgcgttgctgagacattcatttgaaacttgtgagaccagttctgatatttttatttttgcatcttccaggcttgcagggcccaagttctgcttcccaagggtctcttgagcttgctcaagaactgcctgcagatacttcccttgggcttctatccgcagctgtagatgccgttgtacctgataccaaattagcttcaggttagaaccattgagccaattcatattgttgatactatatgcattatattaatcttagctgttttctaaaaatagtttgctgccaaactggaggagagtatccaagttctctaatctttacataatactgtctattctattgtacaatgatttgagaatatagttagaaaatagtgttatgaaaggaatttttggggtagatctacccgatcaattacatatgtccaatcttattcataaagatactggtaccgaattctaaaggtttggctggatgtattctgaacatcgcttaacttttactagagggagaaagttatcttgggggtcattcctggtgggaatcactgttgtgaaggatacaaaaaagatgatacagcattcatagcagttttcttatgctcttagttggtatgtgggcatgctgactggatgctcgaatttttttttatcttatgtcatgtccatctactctatgggcctatcgtgggttaagatcttattatgcaaacagggtcagtacctcacctcaagttgttcatttagctgcctctgcacctcaatttgcatctgtagtgcttcaccgatttgaatagttcttgcacccaataaaagggactattacttcactattcagatggattacaattataaagtacatgggaaatttcttacttctctgcctgtggaatggcgcttgcactggccatcgctaatgcacttgttccaggaatcctatcagcaacacctgtacatccaagggctgcaaattgtcatcatccatgagttgctatgtggctattgtagtggtaacaatggaaattaaacttgtttttaccattctttgttgtcccaacattagcttgaccttggagattcttactgagcctgtatttctgaaacattcaagaaattatgaattgcactgaaattttttagtactattttaaatgggagattcctggttgtcaggtacctggagatggcttttcagatggtataaggtgagtcctggaatgcccatgagcctcatgactgtttttggagtagcttctgagtgattaaaatgaatgttagaactcagctattctagtgcattgagaagataagaatcttatacttactctctgctccacctaattgattaactgcatctacaaatcgctgatgcaactcaggtgtccatttcaacctaggtttagcgtcagttgagagaaccagcccagaatctccttgtgtatttcctccatgcagaaacagatgccgctccattggaaaggatgtcctagtagtgaagaggtcactccgaccctgatgttggtgatacatctgctgcaaaattaatacacacttttagaagaatggaaacataaagaggcaagcatttacactatcctttcttacttgtgttatccagtctgtttcttctctttgctatcacacgtcgaaactgttatgagtgcttctcttttggcagtgccaaagccagcactcttctccaagcctaggtctattgatactcttttggtcttctcaggttgataagcagtttgttgtgaggggttccttatatggggcaacatagaatctagcatcttggaaacaatgatcgaatattttttatgccaactaacataaggtgctgtccttatagttacctctgaaattaaccacccccccccccaaaacaaaaaaaaagtctttaaaaatgcactaaccttttctcttcctcttcatgctttttatgaataaaccatttttctcttcctcttcatgctttttatgaataaatcactgaaagtatgtatatactatagtgataaggactcacaattggaacaaattattgttttgaatgttgctttctggcatatcattctgctatctgatctatttggagtgtgaaagataatcactagatgaaattatttgagtactctatgatcatagctgatggattgttatttagttagtattttgaaactgttgcattttgttttgttttacctgtttaatgtttagttgtttatagctgggtggtacttggtatgtgtatattttgtttaaatgaaaaaaaggacacttaatgttatggtagtagattccttgtgggtaaggacatcctacataaacataaattctgtcaattttattctgtcctttactactttaaagcatatggaatatgaacaagcataagttccatcagcgtcctttcctaagattggtacatattcacatttcagtccagagaactgtggaccaagaggcttatgctttttatgtgagataagctccttttgaaccagatctctttgattgtaatcatcaccagtcaaagaaacagtacttaggtactatgtttctgtatatgtttcacaactatcatcatttcagtacttttgccagtagaggcagatagtttgttccatcgtgcttcttatctaagttcgacatgaaaagctagatgtgatctgtttggaaatgtatgcaggtctagcccctccctttcccccttcgtttgtttctaaaacagtagcacaatactaattatagcgcttcttgcttggctcttaaggatgcctgtactgtagatactctgatcttagttttgttgctctcctgtaaccaagtctgtcagagttctttacatgttatcattttgccttataccttatatgcaatttattaagggtgttcacctactgtacttttgcaccattgctcttttctgtgattcggttgattgaagaggtgcctcattagaagtgtgccaatggcatatgtcgacacctgggaccactagtaagagctttcacctgtcacaatttaatggtgttctttaatcaatgaaatgaactatcaggaatatatctctctttttgtttcactgtcactggtgatgttgcacttaactcccattaagagctttctgtgatggccactggtattgcttaccattacatgctactgtgctatgtttctttttccggaagtaagaacctcatgagatttagggtagatgggcgatatgagattattttatctttgttatatgatgtttatgacactcattttaccagtcataaagctgttgcatctactgctgtgttagtgctgataagtgatgggtatggagcatgatacgacaggttatatttctctttctacttaccatagtttatttttctgacgtatctacctaacagatattacatgttgttgctgtttgtagttgtactggagggtgggctgtcgtgctttcgacatataaagaagttatcaatagagaatctaaagcattatcccatgctgatcatcttttgcaaagtggcatcacttgtgggagcgcaggcagttgtaaagactgatcctggtagcagttctagaattgtaagttgcatatgacctggaactttctgatctatctttcaacctcttcaattgagttgcctctgcatctgcaagcatgccttgcctgttcaacagtaggattgcagtgagttgtttgtatgagctaacaatgcagagtcaacaccccagggtataggtgtctcttaattgttattatgatcaggtcaatagaaaaaaagggataagagtttcttgttgttcttttttttttgtttgtttatgtaagatggatgtttttttttcttctattaattttttgtggtaaataaggaaacagttttatttttagaatctttcaattgtcaataatattggacccttttaattttctgaccctttttgctgagaagagttccttttccaatcttcttgatcatcctttgtaaattggtcattggtaccatacaaagcaaagtacaaatccggttggaaccaagccatcccagttgcatgggttacttatcttgtaaatgtaggttctttgtccaggcaccatgagcttagtgaatgaagggattcttgtgctcaagcaatctcctcagcatcaattctttcttgttgtccttggcatctgtgttcatcttcaagttgccctgcagccctgcacaatacaattttctttctcatcaatgctcttagatgcgcagttctcgtcttttttctgatgcgccttgccggcatcctaatctcaatattccttgcgcagcacagaagctttcagtagctttcacagaatatatgctgcctgagcgtgcaaataaactatcgtagcgacgactatcttgcgcttagtgatagttactgttcagggatgctttcttgatcaactagtctggtctagtggttatgtgatgctcttgtagttcatgggcactgggggtttggggaagcacctgaaggattcattcctgatatggtatctaatgccaaatttgcactctatatgttttaccttgtttatgactgcgggtgtagtaatgttctctgatgccatgtggtagtagctagatttgtttgaacgtaatctaaggttatataagattacactgaggcaatgaggggggcatctttgatatttcttccttgggagtatcgttggagcatatggaatttctactcctggtcagtgcttttgggcttcctcactttttcatattccaatgatcagattagcattagtcgttgtcatgagaaatattcctcttagaatgtgagcagttgtgccacatttcgcttcctggtttatcgcaggattggaggtgcactctctccatgttaccaaccacctgctgaaaacttcgtttgtgctatttcgccacattgcaaatgtgcaaatcacttggtacgggtggcagaaatttcatcagtcaacagtcgtaattagatcgaaccttgtgtcatatgcttagtccttctgcctcatttgtttcactgtacttgtattaacagcatagcttgtggcctatggacaactttttgcagccgttttcatcaattgaactgaagaatggactcaagccatccaggattccagtcccagatgatgctggtggagcaaagtcaagaggtctcagtaaggaatgctttctttgccttcccattccatctctgatcaagtgaccatttgatatgatccactgagaaaaccaccacattcttgtaaactaaacagtatcacacttatgcaactcaaatcttcttcgcaggatgatttttttgcgctggtgaaccggttgccggagaggggcagccgaatcttttgccgccgacctgactgacggtgcaaatccccggtgcgggatacggtggaaggcgatcggccgaacccggtctgctccacggctcaattcattcattgtcaatgcgcgcatctactgaagaagctgataagctgtctggctgggctaaccgaaagtcgtgtgcaaatgcaatggcatcgtcagctcgtcgcggtcgtggatggcgagttggcgacgcgttggtgcgtggccgtgcgtctgtcttttgcttcgcacgatcatcagttttgcagttgccttcatcgtggctttatttgaccatgagctccggccatctgaatccccaggagcccattgatacgtgcacctaattaagagccacatttgcatgaagcattggagggggcaaatcctgaagctttcgtttttgcagtggtataaagcagctaagggcctgtttggtagagttccaacttctaaatttaacttcaggagttgggtctggagtagagttgtggagctgcctaaacccagctccacttctctagttcattttgtgagagagtttcatccagctccactctcattttaggtggagctgaaactgtttggctgggttctagctccaggagatgtggagctggagctgaggctctatctcttgttttttttcttcttttggaaagctaaattccctattgtaaaaatgtgagttttctaactgccaacaattatagttaactacagtaacatatttcaaaattgaatgttcttctaacatattgacgggtaagccttcttgtgaaaacatatataggccttgtttagttacaaactttttcttcaaacttctaacttttctatcacattaaaactttcctacatatataaacttccaactttttcatcacatcgttccaatttcaattaaactttcaattttggcgtgaactaaacacacccatatatgtttgagctttctgactatcggcagagcccctcagtaccgctgttacaattagttcagttttcacaacttccctattggtttttccggtgcatatctttcttcggagaaaacattccttcccaagtttcaacttctgtatgggttggttttaaatcttaccgtagattatttgaactgagatttctcgctttctactccacgtggatcaaatttcaacacaaaaactcgctcatcgtaatacatactcagtttttgtgctgaaaactgagtaactttgatccacgtggaaaactgaactcagttataactcatcgtagctttgatgtattacgatgagttataaccaaaagtataactttcagctcaaacttatttggactaaaaatgtagactaggtttctttgggccaacagtgactacgctttcaggagtggtaatcctcctgagggcactattgaggtacccctcctctctcagcaaggagttctgggtgaaaaccttgtccagtctttggatggacgacgacggcgtcattcggcgtcgcgaccttcgtgagggcgtcgttttttagagtctccgctccgtggtagtgttgttggctcggtggcgatcggtctcgcatagcgacgaccggttcggtgctcgacttccctctctgtggcgtgtgtttgggcggttggcacttggttcgggacgtgtgctctggtgcacatccttcctcgacagccagttatcgatgtaaaacttttcttgtaacattttctctttatcttaataatattggatgacctccttcggtcattccgaaaaaaaaaaagttcagttcggatcccataactttcaaccaaaagatgaatagagttctctgtacatgaaaacccgaaaactctcaatcatgatgatcaaagacttctctgtaccaaacgagcttaaagaaaggtaggagctcttgccaatcatccaagaatcaaaataatctacattatcttctctaaattaatacccataccaataccaattaatttatatcaaactatgcctgagcacctcgtacattcgtaacgaataataacaggatgaataatgcaaagccagcattgatcccagagacactaaactcggttcttttgatcacaaccacggaccattgccaagtccagagttcaattaaggattgctgcatggtaaaagttgaaccggatttagatgcgatctcctaagatgtcgtatcatttatatataaaccgcctaataaaccaggggctagatgatagattattaataaacttgcggctgttgttacaagtaagcagacaaacagaacatctcatgaagcagaaaaacaaattattccagtccacaaaggttcatctcaacatctcaggaaatttaatcactttcgaagaaaggataagtagtgttagccatggcagattatcacaatttacataatcttagcatgaagtagctccatatatagaagaaattccatcaaaacaacgttgtaaaactaccagagctgtagactttttacccacatgtttaaatttcggcaacacttcaactgcttcaaaaactcagtcttagctgcacttccctactcatgaatttttacaagaatctgtaacgccttgtttgtaataaataatgaagttgatttatggctgatggttggcaattagctaacaccatcacttcctgaatatgccaatcatgacacatgagtggtgtgccattctcagagccaagacgaaatcaatgtcccaacatgcagaaccgactttagctgcagtaagctgaagcaaagcaaatgagcacagatgatatgacaatgcctggcaagctttctatgctgtgatccatccaagggagatgataggtatggaaaacaacagttctaccaatctgggtcacttgtactatcattattcacaaatcgcaacagcagcagaaatcaactgtgccctgcatttgggttggttccagaagtgtgcggtgattgttgatccgtagaaacacctccagcattctgtgcctcacgagttgagaatagctcattcaaccaaggaacaatagcccagggtctgttactgctctcgctgacgtttccagggccatcagctctgacttcctcatggctgtcctccactctaccaatgttgctaggctcgttcaagtcttttgtctcctcagaaggcagctcaaaccggcaaaccgggcaggaactatgtaattcaagccatggcaggatacaagaagaatgaaacttatgttcacatggcatttgtttagcctgggaccccacctcaagatcatcaaggcagactgaacagctgacaacctcttcgattttcacagtgggcagcgcttcaaccgcctctttctttgcaggaggggtaccattccgacttgggtcgctctcagccaaatgttgaagcagcaggctcagacctgctccgaggacatactcctccagtaagccatcatcatttgttgaaccgccttggtcaccttggccctcatcaggatcaagcactgagccttgcagagcgagggcttggttgaaggcgttgatcagaatggaactgtccctttcttggtcatctgcaaggtcatcatggatgctgtcaagcacgcgtcgtagagttgatgcccgtcgatgcctcctgataaaaccctcaaactcacgacctaaatcattatcttcatcgtcgctgtccatcgtttctcctggatgctcaatagggttccattgcgagaaacccggctctggctgcctgttggtcagtctctcaatctcctcatcggtcatctcttcaacgaacccgccaccacaggatgggcacttgatctcatccaccatggcctcctcaatggcctgctcgcattcatggcaccagtaccttgtgattgcagcttctgccatcttgcaaatccttcggttgacggcaccacgatcaaaacgcaaatctgtgaaccgggcaccataataagttaataatccgtaagattcccaagcaaacaaccacgacatacacattttttatcatctacacgagagagtccagcatcttgccagaagtttaatcaagaagaactgaaacaagatgaacactacggcatccatccgtgactggatttcacaaagacaattgctggcatacagatctcacaacagatcagcatcaagaacaaagaacaagggttagctttgcatccaacacacgaaataaattagccttttttgggttcttcatcaacaggggcagcaagctgtcccagagaaaagacccacttgggggggatgaggcacagcactgacagatagatctttgcgaaggggaaggcagagatcaagagccaagattccctctccaagaatcaggtgctcgattccaattctttcagagaacacgatgctatcccccccgaaagaggaataaaaacgcagcagaagtctttggtttgggggttagaagaacaagaaaccggattccggcactgctcaagattcacgccattgcaccccgtataatttcgtcgcaggactcatcttcccccaccaaaatttcctctttttttaaagagaaaaatctctagattaacatacaagcgatcaaagggggaaagatagaaatcgtctccatgatttcgaacactggaacgaaaataaaaagaatccccttttgtatcaaactaagcagaaggaaaattcaaatcaagaagtgactaacctttcgattggactgggatattggattggatagaggcggtcgtcttgttctcgtttgcttcgggcgaagtgtgagacgaagaacaagaagttcagagggcaggtggctgcaaagctggatactttactccatccctagaggttatcgtactactaccaattttttttctctcgttcttgaataagataaagttttttttatatgatcctagcgcaaatctccaaccaataaagttttgttatgactaagcatacaaatcacgcaaatccgctgatcatcttgggagattttttaatatctgtaaattggagtttggctgataagaactcgttttcatccaaaagcaaaactacctaccagactagtatgctgttggcttctcccttgtattattggcgtgttaatttctataaaccattttcaatttattagaaaaatcttgttataatcttttttttacgaaataataagatatgaaatgtcaaagatataaatgattttgtcaaaatattttgtttctgatacttttcagcgaaactgtcgacgatggtatttgtgatacttttcagctaggcagcgagggccttatcttttcgcttatacttatatttatcagccaaagattaaaattttaacattaaatttgaagccaattttaaggtttttttatcgaagtttatttttcagctttgctcttagatcgctaagaacacatataaagttttattcacaaattactttcgtttgcaaatatgttattttgcttattcctgcaggttaacagcactgttcaggccttgctaaatgatcctgtctaaaaaaatcgtttctttaaaaggagatttgtaatttggccaaacatgagtagatgttgtttacttcttctttttttcatatatgccatgtgtatgacatgtggctttggtgatgatttcccaggtgtagcaaatgaacactaatcactcaattatggggcaaaagagcacaattttcttcttttaaaccacttagtgtttcaaatacaagaaccgttaggatttcttttttaaaaaatattttaaccttttaaattttttaaaaataaaccatcccaaacttattactaaatctaaaccttgacagcagtgccatgtccaatgtttatcacatgttttgttacgccaaatggagtgccatttttaaaatgttcaaataatttttagatagtttctttttgaaaaacaaaaaattaaaaggttaaaaaaatattgaaatgccaagaggggcaaaggcaaccatatggtttacttggtcaacctaaatctgcttccaaaaggttaattaacctctaccgtaattgggtaacttaatcacgacgtactccacctgcctgtcaatgtcatactttacacctgattagtactcctacttactatacttattttggaactggacctatctaatttctcctagtcagaaccaaattttctcctcagaaagatcccatttttttctcatagaatattcacaagctggtacttctagaagataaagaaatgttaaatccggaccgacgatctggtggtctactcgccgatgtcaacgtgccacctgcactttttgggcctaaaatgggccatacatgggccggaacccggcccatacaggtccgtgtgaaccaggccggatactgcggcccacactacacggcctggcccatgaatgatcggagatgagagcaagggtgacgtcagccatggcggagaagccaatccacctcctccctcccctccacctcgccgccgccgccgccgccgcatctgccgaaggcgggagccgtgaggggaaggacctgtggcacgaggtggtggcggcatggagttcctgcaggggcagagcacggagaccgccgtggccgtggcggtggccgtcgtcgccgtggccgccggcgccgccttcctcctcctcctcctccgcagcagcaagaagcccaagggtatgcacccgcgagatctctcttcactcgacgacgctgcagcttccactgccactgaccactgtgatacaccgacactgatttagtggtcatttacctagcgatgtcttcggccttagccatcggttgcttgcatctgttctgcagcatttagagaatggttttgtgattgttaatgtcttcttgaagtaagctagtatcatctttggttcatagctcatcctgaatggttgtgctgtgatttgttccattaggctgcttggaccctgagaacttcaaggagtttaagcttgtggagaagaggcagatcagtcataatgtggccaagttcagatttgctctaccaacccctgcttctgtgctggggcttccaattggccaacatatcagttgcaggttgggggttatatcatatgtcttcttgcttctctcatatcttttgtttctcttttacaaagaattgtgttaaatgttatctcctgttcttgcagagggcaggatgctactggcgaggaagtaatcaagccttatactccaactacgctggattctgatcttggacggtttgagcttgttattaaggtaaaatttcacaaatatgttccattttgaatttgttagtcttgtctcgctagctttgtgcgtaatgtaaagctatagtccgtcagaaatgcaattatgtcaattcatccccctttcctggtttcccccctaatttttccttctcattttgaagatgtatccccaaggaagaatgtctcatcattttcatgagatgaaagttggtgactatttatctgtgagaggacctaaggtatggctttatttctgttgtaagtaatacagaaattttccatgctgtatttggccattcttgtgatgtataattttttctctgacttggttataaatctttgtgcctgtataaatttgtctgtgacttagggtcgcttcaaataccaacctgggcaagtaagagcatttggaatgttagctggaggatcaggcattaccccaatgttccaagtaagaccctttccaacaccaattttttttatggcatttaatatgtgagacacctgtgttcttcaattcattgtcctcccttactgtaggtcacaagagcaattcttgaaaacccaagtgacaatacgaaagtgcacttaatctatgccaatgtcacatatgatgacattcttctaaaggtatgatcttgttgaaagaattgctgtagttctccaccagtgattaaccttactggtgtttgttatatttaaagtcgcttcaattcatgggtgcctattagacttggatactatatgctctatccgttcagcttatgatattaagaataagaatctggtatgtctggtttttgaataaagggtagtttgtctagttgtagtgcaaagttagcaggttataccacagaaaccttgaaaatatcatacaggacatgtactttgttaccagataaccagaattccatatatgtcgtctcgataatcttcttccttaataatctggtaacagcccactttttaattgaaagtcaaagatgatatgcaaactatctctcagtggcctaaccatgaacacaatcaaccttgtattgtagcttgttttgctatgtagagtcctttctctttagatctgttggagaaaagtaaggttccattgttgaagtaatgcttcatatgtgcttttcgataactgaatgagactactgcatagtttctgtaagatgaacgtggttcaatatgtagtacgatgttgtgcttgaaagctgatgtttgctaattgctgctgctcatttacttgtcgctttgatttatgcaggaagaattggatagtatggttgaaacctatcccgatcgcttcaagatatactatgtattaaatcaggtttgttttctgttctgaggtctagtactttgtactgtggtgtgcaataatttcatgcctgaactgtctactttggtagtcccatcttctactacttactgctaatactactatattatggcttgcattaaattcctaccatgcaccttacaccatcagctttgttttcatgagcagcctccagaaatctggaatggtggtgttgggtttgtgtcaatggaaatgatccaaacccattgcccggcacctgctgctgacattcaggtaggtgtcacattgtgatgtcttctgtggtagcgtgccttctggaacttggaaccgacaattgctaagagaatagttgaagtgtattccatctaccaagcaggacatctgtgtgacaatgtatggttgctcctttcagatattgagatgcggacctcctcccatgaacaaagccatggctgaacacctggagaatcttggctacacgaaggaaatgcagttccaattctaagcctccacagtggaacaataccgaaataacagcgatggacaacattttcgttcaccttcagtagaaattgtctgaccctagtgccatttaatcaagatataggcgaactttaaacccgataaaagtagaatgtcaggtcagcatattttgagtgaaagcaaaaaacaacacctacttgagttggggtcagaagttcctgtagcccatcatttttgtgccaatgctgttcaattccagacagacagaatgaaactaattatttttttttcaatcagaattttggacacaaggttggaacgttcattgctccagctaactcgttgctcaggtgattaaagaatgaccaacttgtaccatttgattatgagaagaaaaacaactactgtacgtgccatttatgtctgtccatagatgcaaaaacctgtgacagcgaagctgttgtctgttcttttccagctcctgtcctgtacagccaaaacagtgcatcaattcatccgcttgtttatgcacaagattgcaaatctttgacagcaaagcaatcgccttttcttttcagcagctccaattgatttggtattacatacatacaaaaatgcattgtgtcttgtacgttactgtacgtatgtgctggcttcctaggagacatcagcgaggagattacgtccgcctgctgggcacacaagcattcggttccattttttaaagtaaatttcgggacattaaaactattttatcaaaactatcatgttgctgcaactttagttagtcatttaggcttcacctctcgtgcatgcaaaacagagcgacgtattttcttaattttaatatatttatatgatttttttaaaagtagcttttgtatagaaaacttttgtaaaaaacacaccgtttatcaatttaaaaagcgtacgtatggaacacgagagaggcgagttggaaaatgtgggaaagaacacagccttagagaactgtgtagaactatgttttatagaaaactatagttttatttgtctgataagtttagagcccttattacacacatggaatattgaagctattgtaatttaggcccacatgtcgtatgtagtgtacaaagttgtagttttctgataaaattgtttactattgttgtaattttgtgaattatcaattccataatttgcttgttagcttatcaaccacaatcaaaatttgaattttaaaacgcaattttagagtggttttgagttttttttatcgtagtgtatttgtccagtattgccttttaatatgttaaggtcatacatataaaggttttacccataaattatttttattgcttcatttatttatttttcacggctcatcagttgtacattaagggtctgttcggttcagctgggctgtggcgctgcagctcccctagcataatcttgcttgctgagtcctgtagctgcagtgctgctgctgccacagccagctcttccgaattcactctaagcaatgagagacctggttgaagttgtaacaaggtgatagttatcaccaaatagttgtagttttgtgaaatctactttttttaaaaaaaaaactacaaacacacattatattatatatatatatatatgccaaaataaattctacagatgtactactacttttgtcaaaacattttgttaactcagaacaaatgatggcagtgatcaacacagagctgtaatttggggagaagcactgagctggtgctataattagaatcttcgaggttaagttatctcaagctaaatgtggctaaagtagaagggacattgttttcagataagaccaagctttgatgtgtaccttaaaggttattatgtagtaggcctccccctacttctacttatttctttgggttgcacatatatgactttcttctcttgattgcccctccctctctagatctctcatggagggcgaaaatcgctgtcatgatcagttttaaatgcccatcatggcaccccactaattctcttgaggggtctagttttaatgatggagatgatgatcccacatcatccctcccacgagctcgtggcctcatgaccaaatcatatcttcttttttatggaccacgtcatttcttactcggatttatttgtcaaactataaatgaattaattattgttcgtctatttttttcattggttaaaacaactggatttggaatgaatttaaatgcaaacatatatgattatatttaaacttgtctaaagtttgtctagtaaaaatttcactagtactatctatgtttttaagtaattgttagtggcgattattattgctttattttgaccgcaaaataccattaaatggttaggctaggatgtgcggaagcgttatgattatgtttaggatgcaatacatccgtaagtaattgtttctctaatgaaaatgagttgtcgaggtttaaagatgaaaaagtggatttccccgtgcaaagctacataaaaagtacaattggattggatttcatatacgattatgttttttatataaaactggtaatagaattaatattcacatataggagtatctccctacgtacggttgtaatttgtatacagtaaatttaaaaaagtagaattacatctgatataccggtcttacgctcttagattttacatttttatgtgtttcatatcaaccatatcgaccaatctacactggtatagtttgaaaccatgttaaatttagtaagaactttaccaaaatcagttcaatcaacaaaaacagttaagtaaatttcacagaactacggatattccgactaatctatcgcaaaactaaaatatcgtatcacaaaactataaatttagcggtaaatttactataaaactacatattatatattgaagttatcacaaaactacataattaatattgaagttatcacaaaaccgcaaattctagagtctaaatccctagtactaacgttatattagagctatataaatgttgtagttctatgataaattagcactgtagttttgtgatatatttgctacttaaccttttttttttttgacactccattcaacatgtagttttgtgatataagattttaaatttgtagttttatgaaatttacttaaaaagatgttcccatatttatcattgcattattctgtctggctgtctgccatcaagcaaaatagtcttgactcttgagaaggatgttgccttgagaaagatggtgcttcaagccttcgactcatcatggattagttgagttgaccaccaccaccaccaccacaccacgacagacgggccaatccacccaaccgtctccacttccctccccaccgcgccaaattcccaccccctcctccgccgccgccgccgccgcacgtgcgcctccacctcctctccattgccgccgccgcggcacggtcaaccacccccacccttcggcggagtcgcggaggaatgcggggggggcaatagaaaattcgctcgctagcagttggcatggcggattagtttaatcttgaagtccttggtggtggtggtgaggaggagggggaggaggaggggattgggctggctaatggccgggtcctcctcctcgtttggctcgcagagcagaccgcgacccgggtttgaggggggagcagctccgcgccgcgctcgcggttgctggctgaggccgccgccgccttctcgggttgggggagtggttggggagccgttgggttcttcgctgctggggttttagggatcctaggctggcttgcttgcttgctcttggaggaggaggaagatcgtgggggtggagggtttcttgcgggggttggccggattttgattcgtcgcccgagcgggtgggttcctgtttcatcctgctgctggaaatctgtagaattgaatttttgttttctgattccatatgctcgatttctctttgttcctgttcgcaacttgtagaaattatggtggaagaattctttggtttgagaaggataatgagttgtgagaaaggagatttttggcatgaaaactactttttcttttggtatttgttggcgttgtggcgcgggaaatgtttgatttattacttggaatctcttacagtatttacaggcatgtaattcatgagagaccgcattgataatatttcatgagacttactaggtagtggatttttgtacgtcaactgttgctcgaaatggcactgtcataattttagtataattatgatgaatagttgacgatacttaattctgttaaatttttgttcaggcttgatactggaaaaaggagaagcttccatttttttttctctgacttgaaaggggatggccttcccagatgatgatgaaaagatgaaggtttgtgcttttcgctttacatcattcatataacattacaatacactcacaaaaataaaacatagcagcataattctattctcagatccactgtgctctatttgcatgttttggccctaatattttttttttcatactgaacttaaatcaaagtatttactttgtaattggttgtatactatagggttgccggccaaaactttttggaacaaaagataagaaagttgtgaagagggcagattaccaaagctgttctgcaggttagtttttctttctttttgaattgtgcatctagactgaattggtgtcttgtaggatagtgataaattgaaacgaagatgagcataatttatcaaatttcagctcatctagttgaatcaggggaattgctcaagtcagttgggcaatcagccaactacattcataaggtcaactgaacctcgtttcattgtgtataatgagaaatatatgaggagacagccagttcaaatatgtttaagaagatgctaggattcatttattctctagtttcatacttgataacttcgtgtcagaaatttcacattttgcccgaattgcttcaatacaattacgttgatttggcctaatgacaataatatagcgtaatagcaactaaatgtttccatgttttcctgtcaaatgcagttaagtccgggccaagttcctcaaagtcacaatcttcttcccccttcagaacacttacaggtggccttctgtttagcatttttgccacattgcctcactctattcatgtgctgatttgttttgattggattattttttggttctttggactgaaaggaagtttttgcagaagttaggagcatacgcctcagccatttacttggtcactcttcaagtactactaaaactgaacctttcaggtcaaacagctaaacttgcatgttgagtcatactttatgccgtcggtttgtcatactttacattcttagatcggactaggtcgtctttaattttttaattcattatataggatatttgtatctacatggaatgtcggaggaaacacgcctactgctgaattaaacctggatgacttccttcctgctgatgacaattcagatatttatgttttagggtaagttatttcaccaatttttcaccatcttacatatttttcatatttcagttagtgagtgatatgaaaaataaaaatagctccttttaatttgtttcctagtgatttcaggatgttactaacttgcttgctttgccacgatgagctaattttccttagtgttcatttgtttcattcagtgaaccgaagacgctgtttccatctgtctcttttctaatttttttttgacacattctcttatgatattatgcagttttcaggaaattgtccctctcaatgctggtaatgtgcttgtcgtagaagacaatgaaccagctgcaaggtggcttgctcttataaaccgaacgctaaacaaaccagttgacagtaatgctgatatcttccagcacaagccatcttcttcccttgattcaacctcgtctctgtcttcatcaaaccttgatgcctcattctccagccgcacaagaacagctagtggtagttctgcaatcttccagaagtcctccttgaagtctatcaggaagccttacatgccaacccagagaaaactgctcaaactctgcaattgctcagttgagatgactaggaagtcctacaaagatgcttgctttggatgtccacaagcatatgctaatgagacggactcttcagaagatgatacagatgatagatcgaatgatccttgtggttatatagttgatggaatgaattctgctgcctctgcctccagggatcagctaaaatacaacctcgtatcgtgcaaacgaatggttgggatttttatcacggtgtgggcaaagaaagaacttgtgcatcatataggccatgtgagaacgtcttgtataggtcgtggaataatgggctatctgggaaacaaggtaagaattaaatcaaagttcagaagtattatcttcataaccttgtaatgggatgtcattgttaattaaagcattacaatggtcacaattatattaataagtacagatttagcctgacatgttttttgataatgtttaatagccggaagtcatccttctgttctttctttttttttttttggagaaagagagggggacctctcccatttcattaatgaaatgatagtagttctacaagcattccaggttccaacttacacacaaagtctcagactactcctgaccttcagaattacaccagacagactaacagagcaacacagatgctaaagcaaacatttcagctccttccattctttttagtgtgacatagtaatgagggttcttcacaattctcatgtgtagattacatatttatgccacacttgcttttggcttcagggatgtatatcagtgagcatgacggtgcaccagacaagtttctgcttcatctgtagccatttggcttcaggtgagaaagagggtgatgagctgaggcggaatttagatgttttagagatactgagactcacgcaatttcaaaggatttgtagagctgggcgaagaattcctgagaaaattcttgaccacgagtaagtcatgcactcatgctacacatgctgcgaaggatttgttcattgtcaatcatcatttactaattattgtgatttctcttattttgttagtcgagtgatatggctgggagatctaaactaccgtatttccttgagctatgaagataccaagaaacttcttactgaaaataactgggatgccctttttgaaaaggaccaggtaaacttctcaaaagatgcactgttttttgaaacttcctctcagaaggaaaggactaaagtaataaacgataaaaccaaactttcaagaacttctactgtgtatgtgtgctctatgttctaattatatctagccaggctataatctacttatatcttgtgaaattttggttaacatgcatggttgccttctctttttcagcttaacatcgagcgcaagtctggaagggtgttcaagggttggagtgaggagaagatatattttgctcccacatacaagtattctagtaactcagattcttatgctggagagactgcaacatcaaagaaaaagaggagaacccccgcctggtatgtaccgtgttcatattagttagttttactataaaaatgtattcccactgtgtcaggttacaactttattggtaagttagtaccatttaattatcattataatttgtccacatgcttgtgtgcaacttcagtaatccaacattatcatcttatattaccatagaagaggaacatcttttgggtttcttgacgtgaaacagtgcgcatttggacaaatgttggttgaagtcgtagaaatagaaaacgatgaaatcattcacatgaacaaatattgcatcatactaacaaatatatatcagacaaatggcttggtgtactggctgtgtgcattgcactactgctgcacattttgcatttcaaatgttaatagtttcaacttgttcaggtgtgacagaatactatggcatggagatggcattgtgcagttgtcctacttccgtggggagtccaaattttcggatcaccgtcctgtctgtggaacatttattgttgatgttgaaatacaagagagcagatcaaagaggcgatcatctaataccaacatcagaataggtgctgaagaactcttaccaactagtaagagtaaggctaataaaaataagggcaataaaggtatgcagcttcttgactcttgatttaaatttaccataaaaacaacataatttccagtatatgcatggacaaaactaatttgtatgggcattgcacaggttctgggacctaaaccctattggaaattaaattggtagcaacagcaacttgtactaagatactgaagaatatttccatcggcacctgtaggtatttattccaaagcagattatttttttgtgacaggggaaaggtgattaccaagtcgtacagaaaatgtagtgcatatatactttccaaagggaaaggtgattatattatactcgaacaattttccacattctttttgttcttttgggtagaacaagtgtgcctatgcatagctatccagaatccattgacccccttgtattattgtgtctgtctgatcagtttgaacttttctgtaacaaaattgtactgagaacgaggcattattccaaaatgtacattatgttatctatctatctatctatctatctcataattgtctttgatttgccgattattatgtgactatctcatggataaacacaaattaagtatgattacaatgtacagtggatgtttcacctgagctacgtctgtaaattttcctttttgttcagtataattttggtcacctggccaagtgcaccatggtcttcttgtctggcttcgatcgacttctttctcacgaatgagtacaaacttttgtgattttcagctgaatttcattccttcaatcacattaagaacatttatgcaaacctattttatatctgaattctgctcaccttgaagttcaacggtagagccttagagggttctgcaactggaagccagaaatgcaaacttaacaagaaaggtcagcatttctggtttccctgacaaatgagtgcagttgttagtgcacgaagcttattctgcagaggaactgtacatcaccacatctttatttggcttcaacaattagccttatctgttacctgatttgtttcttatcactgaacaaaatcagctagtagtagaaaatatgttgtcctttctttcctcaactactgttttgacaatgttatgcgagggaatgatgtgttaacatgagacagcatgatgaacttgatgcccctgttttaatccaagtagaagtagctactgtggtccaagagacaagcaacaaccgctgaaaaaccattgtctaccgagtctgatgactaaactactttcttgtggagtcaggaacagggtttcaaaaaccgccgggggcccggttaccgccacccggcggtacggcggttaccggcggtaaccgcggtaaccgcgcaaaaccgcgacaaatttacaaatcgaaatttgaattcaaaaattcgggcaaaccacgcggtttgacgcggtaaccacgcggtttggcgcggttaccgcgcgatgtgtaatgggttgcacagtaacgggccggcccatttttttttctttttccaattttcaaatttattctccgttttgctctcaaatttgaataaatattactcttttttgagaaatttcttcaccataaaacactataaatcaagcactaccttcactattttttttgatttttttctttttttttaaatttttgaatttggacgaattttattaaaccgtaccgcgcggtacgggtaaccgtacccccgcggtacgggcggtaaccgcggtaaccgcgcggttaccggcggtttttcacaccctggtcaggaagccactagcttggaacagactccccatttgttttgtttttttctttttcatttgcaagacagaatgtaaaaggtagtgcttcatccatttcaaaatataaatatttatagcacttatataccatagtctaaataacttatggaacactgattccaataaataaaaatccatacatttctggctaatcatattttatggtacaattataaataatctaaaatttgactattagtatgattaaaagagaacttttttaatcttaatattttgtaaataactttaaaacaaatatggcttaaaattgaggagtaattgaggctccatttttatatgacttttatacgactggttagatttctcgtggtggaaccagtccacccaaattcaaatcctagatttgacacgggtgcttgtatttatggctaattattatttcagtggtagccgatatacgcctagtcttttaaaggtgttcgtatgtgtagggtgtaagtgtacgcgcgctgaggacgcatatgtttaatactgtgtttctcacttctcagtaaaaaaaacgtccgttatatgaaaaaacacagtaattttgaagcaaaacatcgtgatttccaaggtatgtgcgttggcgttgctcacctcacctacccgttcgttactagtagttcgctgcttgcacgatttcccggtgcgccctggccgtccgatctcctcggcgcgggatttcgacggctcagatctcctccctcctcatcactgactcggtccctctccgccgcgaagcgtggcggccaccgtcgcggcgaccacttccacctccagctcgccgccgcagccgcctcctcctccatctccacctccacctcctcctcgcctccgttgggcgagagggagacggagaattctccgctgccatggctccggtgcggctcggggctcccacttccggcgccctgctgcttcttgtcctcctcctcatctgcggcggcggcggaggcggtggcgttgctgccgggggtggaggcggaggtggaggcgggaaggggagctcggtgtacccggcgcccgtggtgtacccgcaccactcccgccagatctcctggaagcccaggttcactttctctcgctcgcgcgggcgccgccatcggttggttcttggtttcgtctcgatctcgacattggatggactgactgatgcgtgatccatggcagggtgttcctctaccagcatttcctcagcgacgacgaggccaaccacctcgtctccctcgtcagtgcccaccacctccccaatccaacaaattttcatttcttttctctgcatgaatcgggagttcttgtggatgcttgaactctgtatgcccaggattcattgagtttttagaggatttatgtttttttttaggcgagaacggagctcaagaggtcagcggtggctgataacctgtccggcaagagcgagctcagcgacgcccgcaccagctccggcaccttcatccgcaagagccaggttaggtcttgattaacgtttttttttctttgaattatttgttcatccggagtgtgagttcatcttttttattgaaaagtatctttgaataaagggggtcttttagtgtatgaagatagatgtgcaatataacttaaagtagttcttggctaaatgagaggattcttcctcccaattttgagaattttcctttaaatttacataattcttatgtaatgaacaatcatgtccaaatttgtaggatccaattgttgctggtatagaggaaaaaattgctgcgtggacatttcttcctaaaggtatttgactccattaagacaataacaatgcactttactattcatgcaattcttagatgttctatataattcataacttacacatgtgagatattgtcattttacacctaataatcaacctccctctgggcctttgttttcgttcctgtacctatgggcagtcttgaagtgaaagcctctaaaatagttatgctccacttggcatttcatttctaaaataaacaaagtaaagcctttaatgttgagcctccttacctgactttggggctaattcatccaaaggttagtttcaagcagtatgtcattgaaaaccacgctcaataattgttttttttcctttttctttttgggtggggattgatagtagggattcttttttatgtgtcctcatgttgtcttccttcatacataatccaaatttatgttaactttatgtgtttttattttttttcttgtacatattatgtgataataatcagagaatggtgaggatatccaagtgttaaggtataagcacggcgagaagtatgaacggcactatgattacttcagcgacaatgttaacactctccgtggtggtcatcgcatagctactgttcttatgtacttaacagatgttgcagaaggtggagaaacagttttccctctagctgaggtaatttctttactccattgtctccacggtgtttttttaaaagaaaaggagagaaatctgagccaacaggccacaaccaagcatgggctcctttactttctcagcggttttgtgaatttgttttgggatctcttattgcatcattttctctacacacatttgtcaaacaggagtttacagaaagtggcacaaacaatgaagattcaaccttgtcagaatgtgctaaaaaaggtgttgcaggtataaatttctaccgatgttccttttttttgtttgtaattatgattcccatgatttttgtaatatatcttatgcatttctcaattgatatactactgctacctcagtgaaaccacgaaaaggggatgcacttctgttcttcaaccttagcccagatgcttcaaaagattcattgagcctccacgctggatgcccagtcataaagggtgagaaatggtctgctacaaagtggattcgtgtagcctcattcgacaaggtttatcacacacaaggcaattgcactgacgacaatgagagttgtgaaaaatgggctgccttgggagagtgcataaagaacccagaatacatgattggaacagcagcattaccaggttactgcaggaagagttgcaacatatgttagcgatccaattgtaaataatcaacggtaactgctttgtcggcagtctgatttatacaggaatgggttaaaataagtaggttcatgaggtttttggcacaaattctaccagttttggttacttcctgatgacaacttggtttttgttaccattcttcaatggtaactggcaggaattagaaagcaactcattgttagtatccataatttatgctagatggagatgcactttatcagtgcaatttctttggagagcaggtttttgtttttatttcatagagttgtcgacttgagcctactaggttatggttggattctgccagaatttacaaacatctggtctggttttcatctgtaatccttgagttgtcgacttgaacctactaggtcatggttagatcctgccagaatttacaaacatctggcctggttttcatacctgtaatccttctcatttgtggtatatagcttcagtgatttttgaattcattaatcaaatctctttatcactctaattctgcattctgtactggaatatgttcaattgcctgctatctgtgtgcaactcaagagctttttactgaccaatgatgatgaacaaagcttcaggagagccagaactacggccatgtttgggaagccgaagattctgagaaatagccgataagtagccagctagtgataatctgtgttttctagcttttggaaaccactatttcattttatggattctatagcttctgatcctcagaatattgataagaattgaagctgtttggaagaaccggagattctgggagaaactgtaaccgccaaacctccccaaaaactggtcctgaaccttttgagtctgaactctgaaccatctcagggcaagtactataatgtctcatatgttgcctctaaaagtgccatattggattgagtgataaggtgaaagagaaaagtgagaagattgatgatgagtcacccctaaattaagaggcaacctccacacaaatttcaaaaagagtgcgagaagggtgtcttttatttcataagtgaataaaatagacaaatttagaggtggtagtcatatttgccctcattagtcatgacatctcctgttcctttctcacgacatgacgccgtccaactgcgagaagccctgcacaagcacacaagatccttttgggtgcttgcccataatgtggcagcagttgtagcagaagtgagaaccctgatgagcttgcagttttgcagcccagctcacatgggaacagaaaaaactcacaaatggatggacagttgggaattgaatttgatgatgctgttgcttgccatcttcattcattgctgctatcttggagtactgtacaagatgtgcagtcggtcggtgcgttgtgtccacattcacaaccgccttcattcattcattcattcacttctatgtgcatcatgctggcaaaggcatttgtcattctgttttaactactttgctgtgagattttcttttttgccgtgaattgtgtcacctgtaactttgcaaccatgaacagataatctgcagctataaacagtactcactctagtaaaaagaagttgatgttggaaaaactaaactctgttcttctaacgtcaaacaaatttgaatgggtattcagttctctcaacgtacagtttttaattcaaggaatgtcattgacaagtgtccaaatctaagaaatgtcatcgaaaaatgtgagttctaaaaaaaaacatcgtacaaaacagttttatcccaaatgcggaatggacgaaaacctaacggtgatggtaattttggaacaaaatccccaaaaatatcatcgccgttagggttccgtccattccgcgccattgaatatattgttcatcctatagcacttaacggtgcggaatagacgaaaccctaatgatgatggtaattttagaacaaagtcgtttgtaagatgatatttcttagattttatacttgtcgatggtatttagaatttatacttgtcgatggtatttcttagatttggacgtttgttaatggtattttttggattatcttaaaatgtaactaaaggaagtatagtagatatgctgcaccaaggaagaactttcttatcatcatgctgttctctttttttttttgaactttgctcatgctgttcttgtgacaacataaaaccagaaaaagtactagtatttctcacataccacactaggtggttacatgacgacttgtgagtcatcacatcaaacatatgaacaagataagtatatacgtccttgcaaggacaaatgtcatggaatccagcaagttttacatcaaaaggaattttatagttacttaatacgtctttaaataaaaaggaatttgattatgatcagcaaggaccatacaaacaaacagccacatcacccccagaaaatgatagctagttgagcggatcaatcaaacgattctaaacatcccggcgacgacgacggcggcggcggcaatggcgacgccgacggcgacgaggtggtcgccggagcggccggcggcggcggcgttggtggacggcgtcgccgtcgacggcggcgaggcgaacggtgaggtccctgcagatgaagttattaaggtcacatgaactcgaatttagcggccgtataaatacgtgacaggcacatgaacctaacggtacggcacgtcagtgtttactgtcgagcaattaattgccatcataaactgtatatgatgcttttgtacatgtagccgattaaatgtttattcctctatgatagcatcatcacaaattgtatgaacaacaaccataacgattccctcttcttttttcttttcttttttttgcgtgtataaggcaaagcatattagacaatgtgagttaggagacgtatttactggtgtagtatgcattagtagtgatgtgttcatcagcatcttttttatacagcgtgaaaaaagattatttgaaaaaaaaaatccggctggaaacacaaatctctggttaaaattagatgcttccctaaatctttgctggtatgtgacgtgtgtattactcagcttttatatgttggaatttcaaaaaaaaaaaaggtgggcaatttcagatatttcaaacgctaaaagggactgatttactgaactagaacaatatctttgccaaactaaatcaaactaaaatatctatagccggaggctcctcatacattaaattcctaatacttcatttcaaaattgtgaacctcctgccttagccatcactgacaaacaatcaaaattaaactacggatatttcatatttctacaattctactcaacaaaagctatggcgaatgatcaagctaattaataactccagttttcttaaaagtacaaaacgaacaacataattagtgagagcaagtacatgcttaccagggaactgtgggccctcaccggagggcgagacggctgccggcgaaggcgacggcgttgggcccattggaacattgaatccaaaggctgcaaaattaattatttcccaaacttaattagcccataatatgcttactaatcaaaagcaaataccctcaccaaaagtatagagctattacttttatcattaagacctatatatcctgcatataacaaaaaccaaaccaattctagcaatcatttgctcgattctgtcaaatcaatttcactcgtatgctcaatatgcatatgccaaaagatgagtagcatcgaaatcaaataataaatctgaaaccattttacctaatatagtagtatattagtatgcatataacaaaaacaaagaaacatatctctatatgcaaccaataataagtaattaagatataaatctagtttaactttttttttatggagagagtgctgctgctactgctactagaagtgattaaagtgataattgggggagattaataagattaaagattagggaggtgattgattgcctgcgcaggtggagacgggaggggtggagacgcggcagatggcggggagggcgagggcgcgggagtagtcgacggcgatgccgtaggagtcgccggcgccggagaggagctcgcagaggcacaccgggttggactccaccagcccggccagctccgggcagcacggcttgtccggccgccgcgccctgctcccgttctgcacgtacgtcaggcagtccgacatgttcagcagcgccgtcaggcacgcctggtccagcaccggccccgctggccccggcgccgccgccggcgccgactgcgcctccgccgtcgtcgccgccgacgccgccagtagtactactacggcgactgccaccgccgccagcgtcgacgtcggccaccgccgctgcgccgccatggcgcgctctctgggggctttgatggcgagtggttcgttaggcggtggaaggagaggagaggagaggaatcgaaaatgaattcggaggcgtcgtgtgacactggcttgtcctgcagggtacacacgtatatatagagtgatgcgtctttttttctaaaaaaaaattcaggttacacaccaccgcgtccaccttgccagatataaatgtgttcacttagggtgtgtttagttgaggaaataaaaatttttgggtgccatattggacgtttgaccggatgtcggaaggggttttcagacacgaataaaaaaactaatttcataactcgtctagaaaccgcgagacgaatattttgagcctaattaacccgtcattagcacatgtgagttactgtagcacttatagttaatcatgaactaattagacttaaaagattcgtctcgcgatttcctccctaactgtgtaattagtttttcatttatctacatctaatgcttcatgcatgtgtctaaagattcaatgtgatgtttttcggaaaaatatttggggaactaaacgggctttaatacacgctcaacgaacgtacaagtagtacgtcataaataaaatctatatatcttgcgaaattcatattcgaacaccatggtggtgtttgaaattcatatatagataaggatgaagattaagattaaggttgtgtatagattccaactttttttcatcgaacttctaattttttcgtcacatcaaatatttagacacatgtatggagcatcaaatgtggacaaaaacaaaaactaattgcacagtccggctgtaaatcacgagatgaatcttttgagcctaattacgtcatgattagcacataggctaaaaagattcgtctcacagtttatagtcggaacctataatttgttttgttattagtttacattattaatacttcaaatgtatatccgtatacgtcaaaaaaaattggccaattttttacagcatctaaacacggcctaagtgttttacgcaaaacgatatggtatcaacgtatgattaattttttaattgacttttagttatttattttgtaaaatatccaaactttagagcaacttttatataggaagttttcgcacgaaacatatcgtttagtaatttttaaaaagcatgtcacgcatatccaaactttggtccagtttttgttgaagaaataaataaatctatacatcttgcgaaattcatatttgagcactatatgtatcccgagtcatgacgtttggtgcaagagcattttatccatgtctatctacaacaacaataatatatatggagtataagttttcaagaaaacagcaataatatatcgaacgcaattcaaggatgatggcatatgcatgcatgccgcatgaaggatatgagttgtggctatctagctagctagctcacattaatgcaccttgttgtaggagtaggatgcgtagttcttaaaaaaaataaaaaaagaaagaaaaatgtgtaggatgtgtacaccctccgtccgtccgataaaaaacgaatttagaatcggatgtgacatattctagtacgataaatctgaatatatatatgtctaaattcgtagtaataaaatgtggcacatataatactagattggttttttttaatagaacggagtacatgtgaaacaagaaactgcccgtgattaaatcctgtatctatacagtcgacacgcatgcattgcggctccggttctcgcggcagggattaaatcctgccgtccatcttcagctcgattcatcactgtccatcaggtcaaatttgcgcagttcacacacgccggccgcccgggccgaccctcgcgttgcatgatcgaataatatgattacggcgagctgttctgttcttcggttcatatgcatgatccgatgatcgatcgatcatgaggtgccagtcttttgcattgattggatcaaacataattctccctctgtctcaaaaataaataaacacatgtgatatgtaacatattttaatactacaaatctacttataaaatagaacttatattaaagagacaatccattatatgccactgagtttgtcacatctttacgatttgccactgactttaccacgttttataatataccatcgatttttacttaacttttatgatttaccatcgccgtccagttagtctccgttagtactgtacaattttgttcaaatgaccaaaatacccctgtgataaaacttccaaaatgtggacaaaaattccgaaataccatattataaacataagatagtaaacattcaaaatttgtccaaaaacttaaagtctgatatttcagaatttttatccaaaatttgaaagtttttgtctcaggggtattttggtcatttggacgaaagtgtacagcaccaacggagactaactggacggcgatggtaaatcgtagaagttaagcaaaaatcgatggtatattatagaacgtgacaaagtcagtggcaaattatagacccatgacaaactcagtggcatacaatggattatctctatattaaatttgtttattttggaatcgaagaaaatacgaataaccaagcaaagcttgtcaagtgccttcctcacatatatggttgtgtttagttcacgccaaaattggaagtttggttgaaattggaacgatgtgacggaaaagttgaaagtttatgtgtgtaggaaagttttaatgtgacgaaaaaattagaagtttgaagaaatattttgaagagtaaagtgcaccagcggtcctcaaacttgtaagggtgtgtcatctaggtccccaaactctcaaatcgtatttacaggtccctaaacttgcttagccgtacattgcctgtccaaaccccatttgactcggtctgctcgctgacgtggcttgccaacgtggaggggaggagacagccggggtggtgcattatgcattaagccccttattttttcgccagccctcagacgataaatcccccactcttttttttcctcggcgcgggaaggacgaaatccccgactcctcgttatcctcggtgtgggaagggcgaagtgggtgacgcaagcgagaggaggtggtgatcgccggtgatcgccgacaaccaacgccaatcgatcataggattggtagagagggtgggggagcgattctgtctgcacccatcgacggacgcgacggcagagaatggtggcaagattgcgtcgactaggtggagacgcgcctgtgtacggtgagtaaaatcaagccctaatccttgtatgctagcaggtttagatcgataataggcagtaatgtaccttgctgttggtagaaaatttggaatttgctggctcggttcgatgcatgttttgccgtacggcaaagctagggttttttgtttgcacaagtttacatgctgtatcgtggattgaaggatttgtttcttccttactaggtgatgggtcagatgagttcacagtgaaggttcaccatgggggttttttcgttgggcatggtaatctccgttcttatttgaatggaaaagtgagttggtttgataatgtcgagatagacacttggtctccactatggctggaccagttcgttgaggatcttggataccttaggactcccaccttgaagatttattggctgttacctggtaaggacatttcagatgggttaagagtggtggttagtgatacttatacaaatgtgatggcatcaatggttgaaaagttcaggaccttagttgtatatattgaccatgatgacaaagttgcagggattgactgggatgatatcatagacaatccaggtacacctttaccaaaggtaatcagccccaataaggtgaattgtgtagagaagataataggtgagagcagcaaacagcaagagggtaatcttaaggagcagagtagcaggcaacaacaaggaagcaggcagcaacagagcaatctaaaagagcataacaacagggagcaacaagaagatgattgtgatgaagaagacagtgggacaaagagtgatgacagtgatgaggaattctatgatagtgactatgaattagatgatggtgatgatgacttgtttgttgattatgttgatgaaaatgtgatagatgagggggtggccaaaggaaagaaaatattgaagggaaagaaagccagaggaagcaggttgaagggaaatcttgcaattgtgcctagaggagatgaaagtgaagatactgatgaggaagagcttaatgcagcagattctgatgatgagggtgtcaggctcaagttcaagtcatttgcagaagaggacttgaacaatcctaatttcaaggttggtcttgttttcccatctgttaagaagttgagacaagcaattactgagtacagtgtaaggaatagggttgagatcaagatgcctagaaatgataggaggaggataagagctcattgtgaagaaggttgcccatggaatctttatacttcagaagacagtagagctaaagcttttgtggtgaagacttatgatgagagacatacctgtcaaaaagagtggattctcaaaaggtgcacatccaaatggttggctggaaagtatatagaagcatttagggctgatgagaaaatgagcctaactagttttgcaaagacagtgcaactgcagtggaacttgacaccatctaggagcaaattagctagagctagaaggattgcaatgaagaccatacatggagatgaggttgagcagtacaagcttttgtgggattatggcaaaaaattgaggagaagcaatcctgggacttctttcttcctaagcttgatggtagccttttcagccaatgtacatgtcaatggatgcttgcaagagagggtttctgaatggttgcagaccattgatttgtttggatggttgccacattaagacaaagtatggtggacaattgctaactgcagttggtatggatccaaatgactgtatatatccaattgcctttgctgtagtggaggttgaatctctggctacatggaaatggttcttggagacactgaaaaatgatctaggcatcgaaaacacatatccttggactataatgactgataagcagaaggggttaataccagctgtccaacaggtcttcccagagtctgaacataggttctgtgttaggcatctgtactcaaactttcagcttcagtttaagggagaagtaccgaagaatcaattgtgggcatgtgctaggtcatcttctgtccaagaatggaacaaaaatatggatgtgatgagaaatttgaacaagagtgcttatgaatggcttgaaaagttgcctccaaacacatgggtcagagctttcttctcagaattccctaagtgtgatatattactaaataataattgcgaggtttttaacaaatacattctagaagctagagaattacctattttgactatgctagagaagataaaaggacaactcatgactaggcatttcaataaacaaaaagagttggctgatcagttccaaggcttaatctgccccaaaattaggaagaaggtgctgaaaaatgcagatgcagctaatacatgttatgcattaccagctgggcagggaatatttcaagtgcatgaaagggaatatcagtacatagtggatatcaatgctatgcattgtgattgcaggaggtgggacttgacagggattccatgtaatcatgccatatcctgtcttaggcatgagaggataaatgctgaaagtattctccctaattgctacactacagatgcattcagtaaagcctatggtttcaacatttggccctgcaatgacaagagcaaatgggaaaatatcaatggtcctgagattaagccacctgtgtatgagaagaaggctggcaggcccaaaaagtctaggagaaaggcaccatatgaagtaattggcaaaaatggtccaaagctgacaaaacatggagtgatgatgcactgcaagtattgtggagaagaaaatcacaactcagggggttgtaaactaaagaagcagggcatcagttctgaggaggcaaagaggatggttgccacagcaaaagaatcacttgcaatggagattcaacaaaatatcactgaacaagaaccaaatgttatcaaccaggtaaaatatcactgaacataactcctctgttgcacatgttttttttgcatgtcttatgaactacatgacctatggtatatataggatgtcatagatgaacatattgctgcttctcagacttcatctcaactactatcacagctaggaagcactgtttttagtcagatggctgatcaggtaatgttgttttcaatcatttcaatctcacattgcaaactacttgtcattgcaaactatttatcatgtatatatgttctgaattttgcagccaaatcaaagttctgtgctatctcaacaactaggcccattgccagatcctgcctttatcatgtctaacattccatcagcaaggccagctcctcttacaaccaacaccaaattagggaagtcagtggcactgaagaaaagaaagaccacaactggaaacaagaagtctgcaagtgccgcatcaaaaaagaagcctgcacctgggattggaacaaattaatgcctattagttagctgggaatatattttgtttagtgacaatctgacaaaaaatggtgttttggttgtcaacacactgtgatgtatataatggattaaaaatatgctatatcagctgcatgctgtagtgcaagtgcatggctacttgctgattgccagaattatagttgcattttgtgatacttaagtgctgaaagtatctgaaatggatgttctgcctttttactgaatgtgtgcctcattttgcctttgcaatattgtgcctcaaatattctatgaattgaacaagcattccttcaaaatttgtatagacccaacattcacaaagatgcagattaaagaaactggctattttattcatcacacaccatgcatttttagtgcatttcacacattacacatttcaaccactcctaaagaaagcatacatatttgtcaccgcaacaaccacacaggcagctactacacatctcaataaggcaacaatatccctaccaatgtctatcaacaagttcatcctcctaacaagcactttaatctgctcagcaatttgctctgcatcattttcaacatatggttgtgcaccctgttgaaccattgcatttgtctgaacacgcacagcagaacatggactctgaatatgcacagcacgagatgcaagatgcccagtattaatcaagtactcctcatattgttcctcccagtaccaaaagcgacatccaattccatctcgctgcgcaaaaaatgtacaaaattaacctcagcaaaccgatgcgaattgaaaattttccaccacaacacagattatagaagagaagaactaacctgatggcaagggcaagtgtaaaatatgcgccctttattctcaggcgtattagccgcacgcctaatgattgtctcacaatcgcaacaagggcacttaatcagagggaaacgcccctttcccttccgccgattcgtcgacgatgaactcgagcccccttccatggcgccaatcaaattgaagggcttcactctagatacgccaaatggaaccaattggatgccccgcatccgagcttgaagaagagggcgacgaactgaagatggaggcgacgaatcgagcctccctagggtttcacggcttagctcgatggggaaaaaaaagcgaaacagtgggggatttatcgtctgagggctggcgaaaaaataaggggcttaatgcataatgcaccaccctggctgtctcctcccctccacgttggcaagccatgtcagcgagcagaccgagtcaaatgggtttggacaggcaatgtacggctaagcaagtttagggacctgtaaatgcgatttgagagtttggggatctagatgacacacccttataagtttgaggaccgctggttcactttactctattttgaaactaaacacggcgattgaatcggagtaaaaagtaggaccgtcacgtcacgtcggatgttagcgcacggacggttggggaagtgatgtactgtaggagtatctagctagctggcattcattcttgcattcatggtacaggcatgatcaccgtcccctttctctctgtgctactgttactgtggctctgctgcgtgcagctgtcacggtttcatttttcgggtgtctctgggttggttaacccaatacacaaggcaacgaacatgtttaccggcttggtttcatgtgggaaaagaaagcaacggaattgtagccatctcagctcagctctcaggtgtacaatggccactcgaccgcttgcttgcctgccggtctctttcgtttgctccgttgaacatgacgggtacaaaaactttgggatgccaccaaaatattcgttcgtccaggactccacataggcacatcgtagccgcctggatatattgctccgaccgacactagagatggtaatgggactccgatttccctgggtgtgaatatatgttgcattgcttatataatttgacacgtatatattattttaaatagggacaaagaccccataggaatttattccccgtgcggactgggatgggagcaaaatttccccttcgtatttcacgaggacgggaacggaaaagttttgttttgcggggatgggggtgggggtgggggtggggaattcaccatccgacacaaacttagattctgtttaagagtagagaaaagaaaacgtttgaaaagataggtaaacgagataagttattagtgtataattaatatttaattaattattaattaattattttaaatttaaaaatgaattaatattgtattttgaaacagtttttatatactacctccatcccatattacttgtcggtttgagttgttgtttgtactccctccgtttcaaaatataagcatttttagctatgaatctagacaactgtgtatccagattcatagctaaaagtggctatattttaggacggaggtagtaatatttaatcattcgtcttattcaaattttttttgaaattattatttattttgtctatgacttgttttattatcaaatttattttaagtatgtcttgtttttttatatttgcactaattttttaaataaaacgaatgatcaaacgttggaagaaaaagtcaaagcgacaagtaatatgggacggagatagtagaatttatttttaaaaaaacatacctttaatttgggaaatgtgcgcgaaagtattcgtccaaatgtttgtgctgccaatcacagccttacgcctcctttgaaatttgatatgaccaaacggatttcattgagatcaaaacccattcctgtaaaattcttatgttccaagaaacccttacagcccacaggaaatgatcggtttgcaattttcaggctgacgttacaacgcgcttacttcaatataaacatacggaaagctactgaaaaggaatgaagtgccatccaagaagaaaggcagcagaatgctggccaggaaggcaacgggggataaactggtaaggatattgggggtggctgcacagaacaggattacgtaacaatacgctatgcccaagacaagtcaatactacaacatctgtggcgagtacagaggtacaaaagtcaggcaccgtaagcctttcgattaaaaaccaaactgaaacacgcacgattttttaacaccccacgaaaaacaatctgatagctagctcctttggtggtggaacctaaagagctttatcttcccaaaacatccacatcattatctgtcatgactatatagtttcgatacgtaaaaaggcagcgttcactcagggatatccgccatgtcttcctttcatttaagcccggccaagatgcttcaagcctgtttttaggatataaaaggcaggtggttagttgcctacaaacattttaggtaagatatgataacgcgcggttaaagcgctactgtggatgttctatagcagcaaatatgccattgtcgtaccttgttggcaatgttgttggaaagccagtcaagcccctcatacaacccctcaccagaggtagcacatgtgctctggatgtacctatgagaacataagacgaataattcagattgcatagaaagtttaactttaaaacactaatattgggtattgtcaacacagttggataatgcacactgaatgctattacttggttcacaatttgctaatgcatgaatggttttacttggtttaggacaaggatttagtacttaagtagaatacaggagcaccattatgcgagcagcacatagtatgctgaaagcatataaatacacactattgctgatcaatctaaaaagccctgtgtgagcaggccataaacttttaagaggaaaggaaaccataccagtgccgctggcgcaaggagtgcagaccaagcttgtcggtgatctcagcagcgttcatggcattaggaagatcttgtttgtttgcaaacaccagcagcacagcatcacgtagctcatcctgtagccacaacatgccaacattaaaactatagcttctagaacatcacatgataagcatgatagcatgtataagttgtttcatccatgttgggctctttagaaatttcaaatagctttggaaccacatcttatgcgtatattaccaatggcagatcttcctgatggctagaggaaaaaagggaaagagggaatcatgggcaaagaatcttacaaatcacacgtatttatgaattatgattctcaacaacagaatatagcaaaccacatgcaatttatgaattgtttcccaacaagagtctaaaggtagactaatactttgaactctgatattgatagtacctcattcagcatacggtggagctcatccctggcctcaacaacacgctctctgtcattgctgtccacaacaaaaatgaggccctgggtgttctggaaatagtgcctccacaggggcctgatctgtattaataaaacacacagaaaatatcagatcacaagaacatgccaagacaaaatagatgagagaatgaagctataaacaattgaaatgataaattgatatgtttgacaaaggaagttaaccaaatctaaattcttttttttttcataaaattcaataaaacagatccatcagagcttagtgtaaggtaatatatactgcagtttgcatgcgtggtttctgattatgcaagcatgttaataacaggtaattgacaatgttaaactatataatatgcaccaaaaaaataattcagaaataatagctgatcgaaggcaatttcttaccttgtcctgaccaccaacatcccaaacggtgaagctaatgttcttgtactcaacagtttcgacattaaaacctgcagttatagacagcaagtttggatcaatgtaaatgctagcagattgtttttccagtgttttaacttcctaaaaccatataattctaccatcctacaacattggctgaactctgaaagagagtattcaggttttaaatccagtaagatgaaacacattgaaggagacatctcagtaatttatttaagtccacctagcatataggagtaaacattatacgtgaagtggagtgtaaacacacttgagccaaataatcaatttgagatcagctaaaactaatcccattgctaaacagttcttatcattaagccagcccaaaaaattattgtctgactaaaaaggacctaattctgacctttgatctattgctgagcaacgcaagctggaatgttaattatgcgcacacagcctaacttaatgcgatgggacaaatggagaccgtgcatctaccataccactataagctgaattactgaacacatcgtaacaatacgtgcacagcataggatgtggattggaaacgcaccgatggtggggatagtggtgacgatctcgccgagcttgagcttgtagaggatggtggttttaccggccgcatcgagaccgaccatgaggatcctcatctccttcttggcgaagaggcggctgaacagcttcgtgaacgtgagccccatctccgctcccgctctgaaaacgaaatgaagacaaaaaaagtcagtcccgtagatccacagggtctcgatagaaaaacgagcggaatcaaagcaaccgcagctagatccgcgagatctgaagcccgcagcccgcagatctgcgagcaagggcacgcagaaagcgcggcatcggatcggattcgcggccaaccgaagcgattccccgcgcccacccagattcctcccaacaccaagcgtgggaacgaagctagatcgagcggagccggtcaaaccgggtcaaacttccccccgaatcaattcaaatccccccccccccccaaacctatcgaatctagcgagaaaacctaaccaatcaaatctccttcagatcaccccaacccatacaaacccacccccaaaaatcgcacaaaacaagcacacacacacacacacccaaatctaccgatcaaatcaaaatcaaaccaaaccagctgctgccgaaccgatcggatcggaagcagacgcagaattccactcaaaaccagcgagatcgaacacgaccagcgggggaatttcgcgggggcggtggttaccgagatcggcgacggcgacggcgacggcgacggcgatctcctcctctccttctctcccctgctctccccgcggcggcgtccggctccctcctcctcgcgggcgcggatggatcgcaggtggagaggagaaatgggcggagagggagaggagatagatggggagagagaggtcgttgaaatcgcgcaagggaggaggttatataggagggggagggggaggggctgggtcaccggcaggtggggcccacgtgggtttgtggtgagggcgtggaggggcaggttggagggccctgctggtaggtgggccccggaaatgtgcggtacgcgtcggtggtcactaggaattttgcgattatatataccctcccggagtgcagggttcgacctgtgggtttactgatttgtatggggtcaccgaaattctaaaatttcagaaattttagaaatattgtggaaattttggacgaatttttttgaaaaaatttgaatacaaatttgaaaattgcgggcgaaatttctgaaaaatgaaaaaaaaacagatagcaacaaaatccgttcggcaagcatacaagttgcaactactgcatcacaaattcacaaaatacagccaaacaaaacccactcacagatgataaaatgtaggttcaaagtctgaacagcagcacatcaacacatcaggcgaacaatatagtgagaacaaacaaatgtgaaaagagggataataacgaaccttggtcatgcctgagtccgtgcctaccttagtttgccattcttctttgcactctaagcctgaccttaaaaatggacctttgagctccacctcttctcttgttccttgcctttctgggattacctcgagggcaacctcaataagggattcaaatgggatgagactgtcaattttgttgctctatgcgagctccagagccgcccatattgctgccacctcccgcttctatcaccgtagcagctcagcctcctcctcctttcgtgctacaacgataaggtagagatgacgcataactaggatgatgacaactaggtaacgtggcataaagatgatgatggtgaagcttcgaggacagctgatgaggttaccggtagtgcaccgagacatggcgaaggggacataaaagagtggctcttcatgtagctcggtgagactgagatagaggcatgaaagaaaactgcagtatataactctattttataatgcatgctaagctatggtatttttgttcccaacaataatttacataaggtaagattcgggatcatgcactattttaccacataaaatttatatatagtattaaatggatttcaattatcaacttatactacgggtagttatgaaaacaattcaaataacataattgcccttcatttacgatgcattgaaacatacaaaccatttatccatgagaacagtagtagcatttatttagtttctttatatatctatttagtttttttttgacgcgtagcattcgttcattaagggaaatagaaaaacaaacagttgcaagaagttctaacaggaactacatttataataagtgagagactattcaaataagagatttaatatttcaaaaatgtactccatccattcctaaatataaggcacaactactctcaacccaaagaccaagaaataattattatcaccttatagattgggttatcctaataaatagaatgcatgcacccaataaaattagattgggctatcctaataaatagaatgcacgcgcccaataaaattagagatcttgatggtgtaggatttaaataatacttccttcgtttcacaatgtaagtcattctagcatttttcacgttcatattgatattaatgaatctagatacatcaatatgaatgtgggaaatgctagaatgacttacattgtaaaacggaggaagtaatattccagtgaaaagagtgctagttaataacatgcatgcatgtctgccttatattatgaaataactttaaataaaagaacgttgtgccttgtattattgaatggagtattgaagttctacggtgacatggaattaaggaagagactattcaattattgtttttcatatcccaaacagtttttttctctatcatgattttgaacagtgccaagattttttttaatttcaaacaaaaacaagctggagtactagtaaaataaataaaatggcccaatgaccaagtgacatgccccatttccacccctcctatttcctctctttcacgcatctcgactccatctcactctcccccctccctcctctctcgctcgctgcgatctgcactgctactccggtaggtctcctcccccccccccttcctcgcgcggccgcggccaccgccggcgagaagcccgccgcggcggcgctgaccccctccgcctcttcccgcgcgcggccccgccagccggccaccgtctcgggtcaaatcgaatcgaatcgaatccaaaggtattctcttcgctcttctcctccgcgggccgcttggattgatggctcggggtcgcgtaggtaggggaatctgttcgcgggttggattgggttgggttggattttcttctccttcccaattagccccccgtccagtttgttctagatttctgtgatgcgtctggtactgatggatgttagtttttgcagaggaaaatctggggttcagttgaaccctaatgcccccaggttaggtcagcctcgctgggtatcgcggctgctgaggttacttggagaggggtagggtggaatcctcgggggctgatttggtgtaattgagagcgccgattcatgattcaggcaatggcttcgcatgctggaggtagtggcggcggcggcggtggaagtggccgggatgctggctcggcgcagcgcgggccgatgcaggggttggcgaggcaagggtcgctgtatgggcttacactcaatgaggttcagagccagttgggggagccgttgcttagtatgaaccttgatgagctgcttaaaagcgtgtttcctgatggcgcggaccttgacggtggcggtggcggtggcggcatcgcgggccagtctcagccggccctggggctgcagcgccaggggagcatcacgatgcctccggagctgagcaagaagacggtggatgaggtgtggaagggcatccaggatgtgccgaagaggggtgctgaggagggtggccggtggaggcgggagaggcagccgaccctgggggagatgacgcttgaggatttcctggtcaaagctggggttgtcacggatccgaacgatttgccaggaaacatggatgtggtagggggcgctgctgcggctgcagctggtacgtctgatttgaatgccggagcacagtggctacagcagtatcaccagcaggctttggagccccagcatccaagcataggtgctccttacatggcaactcacctggcacctcagccattagctgttgctacaggtgctgttttggatccaatttactccgatggccagatcacttcgccaatgctcggggctctttctgatcctcagacacctgggcgcaaacgctgtgccacaggggagattgcagataagctagtagaaagaaggcagaagaggatgataaaaaacagggaatcagctgccaggtcaagagcgaggaagcaggtatgattaatccttcctacttagaattttctatatattgtatgctcttactttgcttattataatttactgctttcaaacataaaggcctcatggattctttttttttaatctctggatgtattaagttggcatttctcttactcatacagtatttagtctaatatatcaatatatatgttatatctttccaaagctgtaagaacataccagttgcagtagcattggaatgccattttccccttcttttatggatcatgtatatttatttcaccgctgtgtgcattctaactggcaggcttacactaatgagcttgaaaacaaagttcttcgtctagaagaggagaatgagaggctaaagaagcagaaggtactttctctgctgttaccattgtactgtttctattttgtcattcctttagacaaatgatattccactaaggactactccctgtgttattatgttgatatggctttgaaatactgttgttgcacagtcgacaattcctgttttattttagctagttatttttttctctcgctatccacttgccacagttgttacaccaacaggtccaaagtggtaacagataactagataagtgctatatacttttgtaattgtgttagtaatttctatttgatctgtttacttaaggattatgctatgttctccttataaatggcaaatgtaccagatgtagttactactatatttgaactatgaaacaatcaaatgaggctttgattttgacttgctatatatgcaagtgcctttgactttctaaggagacctatatgaagttcttgaggattttaatcaacttatcatgctacattatactcctatatatcagcattaaatatgtgaaacactagtattgtcatcaccaattttgcgcatcattgcaatcttttaaagtgtaaattttaaatgttgcaatgttgcatacattaaatcactgaacacttaggtgggcctcctttttttggttgccttttatttatcaatcatggtaatgatttatcaaccaaacatgccttttctaagatttttgcatatgaaactactctgtatatctgtagagctttacgggttatacatgtgctgcaattccatagtaattcaccaagatgcttgattcccatgcccttaactttgggccttttccccttgaacagagacttgatgctgaacaaagtcacaaacatctctctgtactattagcataatagaattgatggcccgttgatatttgacaaacggttttatgacattccattatagtatttcttacagtttagaaacgaagtgaatcatgctgcccttgttcttgagattgggtaagcaagaccggcaatgccatttagcttatagcatcttgttactgttcattcatgttgatgtcccttatgagatgattttgtcccccgctgtttccaggagttggatgagatactgaactccgcgcctcccccggaacccaagtatcaactcaggcgaacaagctcggccgccttctgatggtgacgatgtccatagtaaattttgtagattatatggggtctgcccacatatttcgcatcctttggcggtaggaacaatcgatatagcttgagattccatcttccccctccagccggtggtggtttagagcttgtaaacaccagcaccagcagagccctagccatgtcgccccagctgctgatctcttcggaggctttgtcacttgtcagtatgtaaattctccaaggcacgtgtcgctgttaagttctcagagctccttggttatacatgattgggccctttgcctgtttcttgtggttggttgatacttagtacttggttgtgatcagtgtactgtggagacttttgttatggcctgatcaacatcagttcccctgtttcggctaagataacgatgggtgataagttgacggctcacccatgcaacacatatcgtatgcctgtctgggggagcagagttttagattgtgagaagtagctgatgggaatctagagctttttgggtttaatttattttctgaattttgtaactacagtttcttagaatggaagttggattgatcgagaaagctggagactttatgaatagctgtagttgttagaagctcctccaaacaaactctcgcgtggtagtctgtttctcgtaatctggatggaaagttagaatgtttgagagtgttggagattccagaaatagctgcagcagacagaagctcctccgatcattggagctccaaatctcgtggtttgtgtcgaatttcgaatgaatttcacgagataattccgtgtttctggggctcgcatctcatcatttccccgtgctttcctgcacgtgcaatcattcggacagtttggcccggaatcatgcatccatccatgcgtcatgactcatgagtcctatagactactcgtgctagtacaaggaggaaggagagccgaaagcagcagcaggctaggctgggttaggctgctctgcttcgcgtcgcatgtgccgtgcatggctcagggcacgctctgaatctgatctgacgaacggaatgcaattagccatggcatggcaagcgcatgcaggctggctgtcaaatggactaatccaactcgcagcctctcaccacatgcccatcatcacgcccatccactcctaatcacctccacttcattactcacatggaagccgtgtgagcttaattaagctcatataagctgaacacttcactgcaacagcctacattcatactgtccagcaaagtgagccgcaagcaggtcaccaaagccatgagatctgccaccatttgtgtcctctgcatttgcattctcatgatcctgcaatgctttgccagcatcagtgcagtggatcttggcgatgctgcagcttcagcgtcagggggagaaggcctgatccggccgaggaagctgctgcagaatgcgccggcggcgaggtcaccgccgtcgcgctccgccgccgccgtggaggtcgaggtcaatgcgagcctggggaagcagaagccgtcgagcaagtcgaatcccaggcagaattagaagctaagctactatcagtagacgacacacgctcacatggagctcttccgagatgtggctgtagaaatgtacataggaattttgatgtggaattttagtttcttcctcgttttccctttgcaagtagagtgttcaccatcaacatcatcaacagttcatcaccagtgatagtgtagttgcttacaaaatcagaggatctgaataggcgagttcccttcttttatgttgctgtcttgattgcttctgcctcctttggacacccttgaattttgatgatagcttctagttcctgatgattagtttggttttgctcattgttcctgtaatttggcttccgtgtagatcctgccattttttccatcttgccacttgtttccatctagatccagtaactttgtaacattgtctgaataacaaatcatgagtgcaatatatggggttggaggaaatatttcaaggtcctctgcactcaacaactgcctgtgttccttgagcacagggttcttgaaaacagctgttcaaatatctgatggaagaagcaggtgagaggaacccattattgcaatcaacacaacaattcctggttcacatttcacaatcgactgtttgatgaaatcctgaattcgaccaatccaaatggagcaaaaggtaaatactaacatcaactgaattagaatgggaacgaagggtaagttgatccctatgtgaagatacatctacactactttctaaaatgttaatcaacgacacatgttgctccttgtccatcatgctgcatggctcgcaaacaaattttcaccatggcctccgcccaccgatacgcctggcaagttgcatgtccttttgcactgcagaacaaacgtttatttgttaaaccacacaatgacaacgctgataagctttacagggaatagcaagcagcatatttcacacctcaaaactcacaaaccaactaattctccctatgtttaatcaataatcatgataaatttaagagtatgaaaactagatatgacattaaatataaacacatgtattaagaatcatcctgcaattagaatgttattcctataaaaaaatagaatgcttttgaagtggatgcgtatatgatatcatgtaggctgtggcatatatgatatccatttagcataataatataaagggagaaaaagaaagagaaaagttcattcagaatgacaacttactgatggtaacacgcttagcatggatggcgcagagatttgacacttcaaatatgtccactaagtggtattctgctgcctgcaggagagggaaaaccactggaaatttgcaggacagcaagtaaataacataatttattttgtgagaattaagtcagctctttgttccttttcctggttatgcagaaacagacatggctggaaagaaggaactgaaattggtatactctatgatagcaatcttgaacagacacaacaaaatagggaggttgcatatttgtagtatataggtgttctactgaaaaaggataataatttagcaatctgactcataaatcaacacacagagatattcattttattgatcatggaagatttgtacatttttcagttacactcttgagccgtgacttgagtcttgaagcagaatggaatttaaacagtataattcagtctgacccttccctaactaagccatcagttgtaaacttataataaacaggtttgaccactgacctcttgcaatgcaaggagagcttcaagggtccaccgtgacacatcctttgaatagaaatcagtgatctccctgacctgcaaattttatcggcacaaaaagcttccatcacacaagtttgcactacgaaatatttgatatagagagaaggcaggttcaggatgtacccaccagccgagaaaatggtgcaaacgggatcagcagttcggtggttttctgaaatttcctgatctcccgcagtgccactgtgcctggacggaagcggtgtggcttcctctgcttcgtttgctgcctaggcgtccctgcttcacacacatgttaaagttatttaatcacaggagaacaaaaggagagcaattccaaagccaagacttccatatggatacctatcatctaggtagaacagacgctatttgaaccatgacactaaagaaagtttactaaatcagttcccacgatgcaaagactaataatggatgagcataaaaatcacctatcaacatcgtgtctaaaaaccacacatttcttggctagcaatgcttaataccatgttttatggtcataatgtttcagataacccctccatggaccaaactggatttgctattatttcagaatgaaaacaagaaaagctttgactgatgagcaattgaagatctttctgcaactactgttcttataatatattcagaaaacaacgatgaggaaagtacagcacacggtaaaacagagcaagaaaagggacacattgagcccctcaggtcccccggaatccaagagacagaaaggaaaagctccaacgagcccatgaataaccctagaaacccccccaagagaacgcacctgaagccgatgttccagccgcgctcctctgcattccatcaaacaggtggtgagcaagccatccatccagccaagatacaaaacaaaaacatatccccccacaaaatcaaaaaatcaccaaacgaaagacccgctcccgcacgcaccgtggtcgccgaggtacccgtgccgcctgcaaaggggacaagcaagaggcgggaaggggggggggggggcataagcttcaccatccaccgccattgaaagaaaaaggaaaaaaaaaaagaaacgcagagggggagagagcgcgcgctcaccaccagcgcgctgcgccttcgacggccgaggggagcgttcgaactggagcttcttcttgggctccgccttcgacttcctcaccgccgggtgcttcgtgcgagccatctcggcgtcggcggcggcggcggcggcggcggcgacgtggcggtgggttttcaaactgaagcggcgtggaggcaaacgggagagggtttcttttggttttgggttggggatccctttttgcggttaggcccttggttttgttgttatttatgggtcagtctgtgtcagttgcgtttttcacatcccacaaggccacaacgccacgcgcgcgtatgtgtccaacggtcgagtgatcgagttatgtttcttgtttttttttccttttttgcgaaatggagttacgtttcttgaattctatcccagaatagtcatttcttgacattatttgacactgacaggactgaaactaacactatgcaaaatttaccaaaaagaaaaggatgtcaatgcaacggtcgaatgaaagattgaagaggaatgtttttttttccttcaaaacaggcactttcccctttgttttgcaggaataattaaacatgaatgcatggcaagctcggtgtagggatggacatggcctgacccacatttaatacctggaccactcaagttcaattaaatgaacaaaaattcacacgacatggtggatcaaggattatccactggttagttcatgccatcgaaataatactcgaccgacggaggaaagaccgcccacatgactttttattaagaagcaacctcaaccagatcggccaacgcgaaccttgacctccacatacggaactcacccctatggatcactaaaggtgagtttgacgataaggtgattgaggagattaggaagatacgcaaaaacgaggtgagccattggctcatgattaattgagcattaactattttaaagttcaaaaatgaattaatatgattttttaaagttcaccgtttagtagtttgggaagcatgcatgtgaaaaacgagatgtttttctctctcaatctcccagatctcccaggaacgaacaaagcctaactccttaaccgtgcttcgagatccctacccctacacaattatccaaaatccatgcaacatatttggcagtagctatccattttttctctttttttggaaatcaggtaaatatgttacccggcttgctattcaatttcacccagaatatagtgaaaatgtgaaatccgcaccgctcataattttttcggacgaggtgacaacagaacagctacagttttgctaccatttcagcagccgacacagatgaaaatttcagataaggcagccagccattcgctgcagaagtattagcagtacagatactagtatttttcctgaagaaatcgatcaatctgagaagcttctgctgctgctgctgctgctactgtgggcggagggaggagaggaggacgtcctggagggcgctgtccttgttcatggcggccttgaactcgtcgaaggtgaccttgccgtcgctgtcggcgtccatctggtcgaacacctcgtccagcttccccggctccgttatgtcgcctggcaggcactcctccggcaacgccttgtgaggatcaccaaagttcagatgaacagcagctcgtcagattttcaactcaaaacttgaaaagagacatgaacaagccatctcaagaagagcaaagatttggttttccttttttaggagttcttactcggagcattgatgccagctcttccttgctgatgcagcctgaccgatcagcgtcgtacatctgaaaagaaaaatgcagtttttttttgtgtgctcatgatcagatgctgaaatacctctcttgttatgaattttaattgaatttgaagttatgtatgatatgatatcatgcaatgtttctgatattcctgtacataaattggaagggctgccacttcagtttgagtcgagtgcatttggaaatttttacctggaagcacaagcgaagagcatcatcgcctcgtgagttcctgaggctggagaacccacacaggatctctctcatgtcgacggttccatcacggttgttgtcgaacagatcgaatacgcggggagctaggggaatcagtgagtccattttcattgctctcagcacctgctcaaactctgacagagtggcgttttctccatctgcacatctgcataaagagcacttgcttagtgttatacttttcgattggaacatcatatgtgtcatgtttaaatcctaaaactatgaaggttttacgagaaatctgaacttctgaagcttctctggcaaaggaaaaaaaggctaccgctttctgcttataaatcttttcggtgttaatttcacagttcatcatagcacatatcttctactcctaaaatcctaataaaatgggctgcacatgatatatgatatgtgcaaatatactcctgcaaaattgggacttcttcagtgttggaaaaaaaaacatttgttttcagagaagacaaggatatatgactcccccttaaagcaactgtagtgttcctcaaattactaactgagaaatgctagtcccaaaattctagtaattacacaagaggttttaggctgatcaagtcatgatactcacattcgtccaaaatgaagccgcagattatccagctcctctgaggtaaggtcatgggttcctaaaagatttctcagccttttagtcctcaatgccactttgcagctcaaaacgctggctatcgcagctgcccgcaatttccttctagcattgaacttttgcagttttgagacgacctctgcatccatgagatcttgcttggcgcagtctccaatcacccaaggatgcctcagaagctggtttcaaatgacacatgatattcaaattaagaacagttatagtatcttagctaacatggtaatatgctgaaaagggagcatatgagacagacatcacttgctgttggccttttgtaaggttgaacagaaagaaggcgcgaaatcaaatctttcgcggatgaagatattgttttccatgtgtggtcctgaaaactgaattcaccctgaagaagcacacaaattatatgccattagagcaagttcctgattaatacaggcattttcgaataattggtgcctaacacaaggactacaaatcctcctcttatagtcatgttattcaaaggcactattgataatggaacccataattcttcagaaacaaacggcacagtttatttattttttcagtggtttactgaacaacatttgactagcccagtagccccatatccatactgactcagttcgtgtttttcattggaaaatgtacaatccaatccatgtgtcttttgtggaagagaacattcttttacaccttttcagtaaaatgtaaggtctagttagctactggccaactgctattgatttgacatctcagggcaactttttctactagaactggacaaaatataggacaatgcaggtataaactgaagtgctaacaactaccaaaagacgacatttcagcaatgattggcaggcagatctccaaactatgcaatgtcatttgctgcaaacccactgataaaaggctaacaacttcacactcatgctgaaattttagagtgaatcaaatgcccaacacataatttgggactggaaaaccgtatggccgactcacactcgaggtcagctacatgtaactctcaccaaaattccattttttgcaagaaaaacaccctcacattcacgggccagaattataataattctgcttcattagaaaatgcaaagatacttataaatcatcttgatcagaatacttataatgattctgcttccactaaaattgcccgaagtgtttaataggtatcgtcaaatgcgaaccagaatattccaaaccattttgaacaccattgaagcaacaatttgaccagagttagctcaggaaacttacttgcaggatcctttgctgcttttctcgattggttgcagcatgaaatggtgggcatctgaaatacacaaactaccaggcttaaaactacgaaaataatcctaatcaagggaactataacaagaaaatggccaacatacccagataaaagaatgtacagaattaccccaacagaccacatatcactagcagctgaaacctcctgcctggatagagcctccggtgaaacataatctattgacccaaacagcgcgacgattgggtcactgaaatcttcgacagaactcaaaccaaaatccatgatcttcagtgtggacttctcatctttgtcagagaacagacaattctccggcttcaggtccctgtgtacaatgcttgccttatgaagagcctccagcccgctagcaatctgacgaatgacgcaggccgcatcgaactccgagtaccggtcacgccccacaatccgatcaaaaagctcaccacccgagcacagctcaaggacgaggtgcacaccatgcacatcttcatacacatcatgcaggttgatgacattaggatgtggcgcaacgctctccactatcctcctcatgacgagtatctcgttcgtcagcagcgcgtcggagatcgatacctgtttccacatcggcaggccggagccgggcacgggctttgtcccctgcttcatacccgccatcgccgggccgagcctcctcagagtcttgatggcaacctgggtcttctcttcagacttgctcactcccctccttactattgagaacccgccccggccaagaacatccacaacttcatagtcatcggacaactttctgctctcagtcttggacattatggacttcgactgcctgctctgaagaacttgataaattgaggaaccgaataacaagactcaattggcagtaatccagtagcaaagctgtgtcctgaaagaagtaatcagtagcgcaggaagaacaaatgaatcatatgggtatctgcaggaagtaggagaaagagaatttggggaacagcagagcacaaactggaaggagcagttaggagtacaaagcaagctccttctcctgaagacctgatcagtaaacaaaacaatatgagagagcattatatagagtaatgtgagtactgaaggttgtgacgatggaagaaagggacatgtgcaacaaccaacacaagggaataaaccctatcaaggatttctttttgtgcagagaacaaggtgacaagaagagagaaatgagatgattggaagaagatgacaggccaaaatagtttttgttgacctggttgccactgcttggagctgctctgaattggtcttcactcggtgaggcctaactgtagtttactgctttgtcttagacagttgtaagcacaattccactgtagctgacaacatcataaacatggaaggtaagctctcctcatgcaaattaacacaagatgtaaattggccaggtatggtctggtcaaacggctggagaggaacaaatgaatcattttgatagacatttgtgccatacaaattgacaaatcttcactctggcatgagtttcctctttccaacttaaccattcatcatagaaatcgataaggaaaccaaaattgcagaggcaaatgtaaaaacaaaaagattatatggctcatgaaattacaatatgtaagcaaaacttccatagaaccatatgttaccactgtgacaataacgggttcacagctccagatatatcatgaatgccctaaacagatgcttccacaaggacaacgcccagacaaaaatgcatcacataaacaaaaaaataataattttctagatgaactatgccgaatctccaaagctcaatggctcttgtgacgcttagggtttatctttccataggctgcttgcctttcggtggtcatcttcaactccctcctcctacgcttccttcgttcacttctggttgattttgccttgccatctgcatccccctgttcattcggcagctccttctctggttctgatgaagcagggccttcctcagacttagacttcttctttttgaccttcttgccttctttatcctgtcctccaaggatcgaatccttgatcagtttcttatgatgcgtcaccttccattctgcctccctgtaaggagctatcttcttcatggatacatactggttcaaatccttgtcatctgatgccaatatctcataggtgctcaggccgaaactgttcggcttaacttgcttatacttgaacctagtcttcagatctccaatagtgtcctcatagtctaacttgtagtactcttccatctccttctcaagctccaccttgtccttcaaagaaatttttcctttcattttctgatttgtcccctcaccatttgcaatatcttttccacctttctttttctgagaagccccctcagctgctgcagacgatccatcttgcccatcaagagcccagtccttgggtagcccaagcagttcatcttctttgtcaaagtctggtttttccaaatcaatttcctcaccactcccaaattcaggatcaacatcatctgcttcatagtaattgtcattgaatgtctccttcattttcctgtcatactcctcaggatcaaaatcctcctccaagtcatcggctccgagcttgcaagctgcatcgctatcaattccggcaatcatccggatcctctcaagcttctcggcgatctctttcttcttcaagttcttcaaatgcttcaactcctctgcctgctcctgcttggcccgtgctatccgctcctccttgttcttgcgctgctgcttcctgctgctctccttcttcctcacagacccctcgacaaaccgcgaatgccccatcaccctgtccattacatccgcaccagtcgcggctgcttcctcatgccggaagttatacctggtctcataatcctcctgctctatgagatgctcctcttcgtccgatacctcctggatatcatccggagagtatttcttctcgctgcccgtctcgagatacggcctctcgagaagaatttcttcaggaacttgctgttctcgtccagctcctcgtctttgccgaaaatatcaatcagtatctgctcagtctccttcttctcctcgtcatcatcctccttgttaccaccatctccacccttcggcttcacttggaacaaatcgtcatcatcctcgccgccatcgccatcgccattgcctaatgccgccttctccgccgcaaggaaagcctccagccccttcctctgctgctcgtcgtaggcgatcttgtcgtacttgctgctgctgtggccgccatggctagcctgcgccgcgaactcggggccctcctcgagcaggtggcgagcgttcacgtccttgaggtacaggggccgctccttcttcgtcttcttgggcttctccccctcctcgtcgccgggttcactctccgacgaggaggaatacatcttggccttcgcgtcgaggatggcggcgtcgccgcgccggatgcggcggatgacctcgaacatctggcggtcgacgcggcgggacgcgatggcggcgtcatcgtcgtccgacaaggactcgtcgtcgtcgtcgtcctcctcctcctcctcctccggcgggacgaggcccttcttcttgcgctcctccaggcgctgcagcgcctcccgccgcttgttgtgctcgaagcggcgggcgtactcctcgttgatctggatcttggagagatcctcctcgccgccgcctccatcggactcattgtcggagcccgcgaggatgtccttcttcttcttctcctcctccctcctctgcttcatggctgccgctgcagtggcgacggcgacgacggcggcggcgaagctgggggtaattagggttttcgcgaatcgagaggagcaaaccaatattaaaggaggcaaatgacatatgggtcccacctttactgaaggcccatctgtgaattttacggcccaagaggacggaggcccaggggcaaacgcgtaatttcggcagcgaggcggcacctatatacaccgcgtcgagctaaaccctaaccagccgcccattcgcgccgccgccgcagaagccaccgcgccccgcagctctcgtcgtcgtcgccgcggccgctcgatcacgatggctcccaccaagaaggcggtaaggttcctgatcgattgcgcctccctccccctcctcgtcgcgctctcccgctgcgcatctcaccatttcgttgcgatgtttttgctggtttctgattggtgggttgtggcgatgatgcagaagaagagcacggacaacatcaacaacaagctgcagctggtgatgaagagcggcaagtacacgctcggctacaagaccgtcctcaagacgctgcgcaactccaagggtatcgatcccgaccgattttttgttgttttgttcgatctggtagtgttagtggatgttgattgattagtttgctcgcttaatccgaattgtagggtaggtgggagtgttatgattgattgatgcgttgctagctaatcatagtctgcctatagatctgcgtgttagttcgtgcgataattttcgggtagattggactgtcttatgtttatttatgggtggaattgttgtaaatcctttggaagttgatcggctgtaaatttaagtttagatggattgtggttgcaattatttgggatgcgttgtgaattgagttgcattgcggttgtcttgaatgaatgggactgaagtttacctctttggcttgcttttgcggtgtcttagagatgaatacagtaccctataacaataccaacctcttagttaatagttctccatgatctccattagtctggggacaactggaggttgaaacatttgttgtttatggagcatagatcatgttatatagtgtgatgtctgaaatggttttatcgattttatatgttctcagttacctgcttacacatgacatattctttttttctgttgtacatatgtgcaaaatacggtgcatttaactcaggctgtatttgtattttgatgtgtggtccttgttattgtgtttgttgcttgttgatattagttaagaaagttaaatgcaaacttcccttgaacttaaatttctcgagttgaatgaatttgcagttataacatgtaggaaatttcagataggttgtgttgtggtttctgattgtgacatcaatcacatcttttttatgtttagggaagctgattatccttgcaaacaactgccctccactcaggaagtctgagattgagtattacgccatgttgggaaaagttagcgttcaccatttccatggaagtaagtttgtttcatccttccgaaccatttatgttttgtgtgatagcatctgtattcatctacatgtcacggtttttccgtgatatagtttggtactgtatgtcttactgtgccttcgctttcagacaatgttgatcttggaactgcctgcggcaagtactaccgggtgtgctgcctcagcatcatcgaccctggttcgtcgctaccgacatcacttacatatattttcctctatggcaccctcagaagtactgaatatatttgcctctttccctgtttcaggtgactcggacatcatcaacacaacccctgcctcccagtgaagaagtttttacctatttagttgagatgtagggttcagacgtgcttacatggccaatggctgtttcttggttatctttagttgtgtaattttgctatgctgagttgggatctgccatacagataatactccatattgttgttaaggcatttctatggttttgtttgatgagatctctatttatatattgagcaagtttattctcctgctgttctgtgagcatcagcaaagagagcatcatccaagatgtttgcttccttgcttatgtggttcaaaagctagactatggttgttaactatctcgaagcttcgaatcacttgctttgttttttatccatggtgtgattcgctgattgccgttttggtttctgctcctggagaatctggaaacgtagtgtggcttccacgtttgcttgtcgatttgattatcgccgtttagcagctgctgttttgtttatgcttttctatattccgtgacgtaataatgcctatctcccagattgtaaggttcatccgtttgtgatacgagcgtacttaatgctaggagtacgtgtgtatttattaggttaatttaagtgagtttctatatattgttgtagtgttagaagtgcatctaacaaaactaattttgtgaaacattttttgtttgaacaaggcacgtgtttactgataagttgatgtgagcaggtcaacaccatctaattgggcacacagattagctatcacgggattagtaattttgtactactagtgtgccgtagttggtagtatcatgggctcatagtggtcttccctattaactaagggtctattcactttgctaccattttcaaccttaccaaattatagtattgtcaaattttagcaaggttgccaaaattttggcaaggttgtcaaattttgacaagattttatatgtgcttagtaaaatttaggaacaaactaaatgtagcaactttttttttaactttgccaaaacttgataagattgaaaatggtagcaaactgaacaagccataatcgtggaccaaagaaaggaaacaaatgttgaccatcacg

SEQ ID NO: 5302 - DNA, 1507 bp, Oryza sativa
aaggacatggggaaggcgctcctccacttcccggcgtccctccgatcccggcgtcggacatgccgcacaacgtgctcgactgcgcggacgtgatcggtgcttcgctggtctatcactaccgccgcatgccggagccggggcatgctgatcaacacctacgaatggctggaggcgaaggccgtgacggcgctcggggacggcgcgtgcgtgcccgaccgccccacgccgccggtgtactgcatcgggccactgatcgtgaagggcgaggacgcggcgaaaggagagcgccacgcatgcctcgcgtggcttgacgcgcagccggagcggagcgtcgtgttcgtcagcttcggcagcatgggcgccgtctcggcggagcagctgaaggagattgctcgtgggctagagaattccggccaccgtttcctctgggtggtacggagcccaccaccggaggacccggccaagttctccctgccgcgttctgaaccagactgggtgctctgctcccggaggggttcttggagaggacgcgggacaggggaatggtggtgatgtcgtgggcgccgcaggtggaggtgctccggcacgccgcgaccgccgcgttcgtgacgcactgcgggtggaactccgtcctggaggcggcgtcggccggagtgccgatgctgtgctggccgcagtacgccgagcagaggatgaacaaggtgctcttggtggatggcatgcagctcggagtggtgatggacggctacgatgaggagctggtcaaggccgaggaggtggagaagaaggtgaggttggtcatggagttcgaggaagggaaaaaactcagggatagactgacaatggcgaaggaaatggccgcgaaggcgctggcagacggcgggtcgtcgtcgttggcgttcaccgaatttctgaaggatttgaactttggaaacactacaaaggaaaaagcgtagaagacgaacattgagcagtgcaaacgatcaagcacaaaagatgaacattgagttggaatgatttatattgctgctggaatgtgacaaaatcacatatctgcattatttacccgctgtgaactgtgctatttttctgtatttctgatgtgagcagaaggtgtgagagtttcttcaggctgattagctgcttcagcagtcagcacttgtagattacactctggagccgtgcttacatgatggaatagtattatgctctatcacaatatgcaagatcaatgttcctcttctactttcggtttgttaatatctggcaattaagctgagcgtgtagagaataccacatggtgcaaaagctctgtctcagtaggctggagacttccacacttcagtagactcgtgtgtacaacggaaactattttcaccctcgaggggatatctactcgttgtttacatgtcactcaaatggttataaaaaaattaagaagatgtattaacatgtgatatatcactctacaaatatgcaagttcaaattcaacttctacaactcgta

SEQ ID NO: 5303 - DNA, 6145 bp, Oryza sativa
tgctgttcttggcttcgccatgggggatgattgcaacgtgtccattggtgctcttggtgtgcaagtagatcaaggacctgcggtgggccaatcgtcctcagatctctaggcggagagcgatctcgctagccgttaggtcctacccaccactacctagcgagtcgacatgagggttggcgaggagaggggtgttggccgacacatgctgggggctcatggcattgtcaaggctacctaccccgctatcgtcccctgcgctgaaacgttggccctcatgagacgaggctccgtcgccagccctaggagggttcacttgtgacatcaccccccccccccaacaatgatctccagtccaatgcctagaaggttgacctccttgcacccttctcctctctccacgacatgctctgctaccgtgaagattgtcgtcctcttcggctcccataccgccgacaacacccactactccttcttccctgagctctcgcgtcctcctgcaccaccacaacctcccaagctctcgtcccgacctcgtcgagcgcctcgccggactgccttcctcaccggctgctactaccgccttatcgctgccttgctaccatcgggagagatggaaaatagagtagtccctgacacgtgggtcttacactcttatcttacttgcttactcaccgagtcaatcatgaccaacctgtcacattagaaaaaaaaacgtttcctaaaccatcgaagaagtcgatttgcaccagtttttgtcttggagaggcgttatacccggttttgcgcttgagccttgagagatgcgattcaatcataagcaagataagaagggagttaaaatagacttagtcaaccagcaaatgtatgtccctttgtcagacttggatattcccagcccattaatctctagtctggtctcctcggtccgcgcgctgagaatcgccaaaacctatgtggcccatcatccgccggtccgtgtggccttccaaggagagcgacgcggcgaaagcctcacgcgtttcgttccccccttggccccctccccgctcactcacccagccgctccctcggctcggcagcgagcggcagaggaaaccggcaaaccgcggtgcgcggcacggcgcgcgtcctgcactccagctccgcgccataactgcgatcccctcctcctcggcctccccctcctcaccggcaattaatgccgccaactaccagatccacccctccggaaacctaaaacaaaatacccctcttcccgttttgcccctcctcggctcttctcccaccccagccgcgcccccccgcacgccatgccattccgccccacggtctcgccgccgccaccgccgccgccgtcatggcgtcgttcctcgactcgttctcctcgctcggcgtcgggtacgcggtcgccatcgcgctcggcttcctcgtcctcctcgcgtcgctgctcctcgccttctacttctgctcccgccgcggcggggccggggtcgtccgccgcggcggcggccagggggtccactccgcgcgccacgccgtgtcctccgcgtccagctccgggcacatctccatcaccgtcccgcgggtcatcttcgtcgcggacgactccgactccccgggctcctcgtcccgcggcggcgccgggggcggcgcggcgtcgtcgcccgtcgggctcgaccccgcggtgatcgcctcgtaccccaaggtgcccttctctagggcggcgacgggggcggacgccgaggccgcgtgctcgatctgcctctgcgagtacaaggaaggggagatgcagcgcatgatgcccgagtgcaggcacaggttccacctcatgtgcctggacgcgtggctgcggcggagcgcgtcgtgcccggtctgccggtcctcgcccatccccactccagtctccactccgctcgccaccccgctgtcggagctcgtcccgctatcacagtacgccgccgaccgccggcgccacaggtgacggaattgggtgcatcatgtcttctcttctatattcgttttttggcaccattttctactggttatcaacgatgggatggtgtatccattgttttattgttcagatgaggtttggctgatccatggcaatattagtatatttagccatttaggtgagattgtggactaggacagccttgactttgaggaagttttgcttagtagcagtagatcgttgcactgaagcagacatgcagtgtatatacattgttttttccattcggatatagtagcttttaccaagtaaggttacttgccctacagttgtatgtgcaagatcaatatctgaattgcttcattccagttatatatatatatgattattgcacttacattacttgtatgttggttaccattctttggcggcaaggacatgaaaggaaaaaaaaagttatttatcacaggatatagcattttatcatcataatgattttcatgctgtaacggaaggggaatatcctaactaacggtctttgtcgggactcgacatatttcttggttttaaatacagttggctactggattatcgataattttgcgcattgatgtatgtagcgtggacttttttgaattaatgtttggttcctgagtcataaattaagtagcagagaacatttattcgcttttgtagatcacttgccttgttaggcaattgtgttttcctcaacaggatcagttattttgaacttttcagggaggtataagtaataacatttgagataactgttatgccggttgcttctccagatcagttcatcctgttttttaagttagcttgaattctgaactgttatccttattgggtgaaatggtcatacttccccactttggtcatttgatttgtgtttactagtttagttcatgttcggtgttaatgttctttgtttctatggaggtatatataccgctgttttccatgaattaagctagtaacagctgtaatgaacttgtatgtccctaaatgtgagaatgtgtgctatgtcattcaggattctttaattgcagagtaagaaggttttttcatgttaactggaaagttgtgactacccactagtttcatatttagacaactacctattgaataataacccttatactgttatgaatagtcgatgtcagagttattttgttttagtctgaatttcccatctagcactgtgctgttctcatggtgacattctgtttgggtgcactattttaacttgtcatttccttgttattctatttgcactgtgaggttagacagcttgcagattttgacgccatctgaagatggttatgtgagttggaacttggagggactctattatgaccccactttcattcatggaatcttgagggggtgtgtatgtgttcataacttcatatggggttgaacaacaagagctaatgtggaacatgttatcatgctctgcacatgccttggtatctgttggctagttatgcctgaactttgagcagcaaaaacttggaaatttttttttcattttacttgatgtagttacgaatacctcactgattagaatgttttgtgtgctaaactcaatgcacttgtatgagtacctgccagctacacctctaaattccaattcactgactgtgatagtctaggttgatctttttctttcatgtttgatacatgcagtttgtgtgctgtgctgttattattttctaattactgtatggttgtacctaacaattttctttggcacgggaccttacccaagtcaatagctaaaatcgttagggacaatcggtagttcaagttctgaattatttttttagccacattaccttttgttttgcttttcccccctaatgtaatgtatgtgattcttgaaacttttgtgataatttttgttttatgtaaattgataagttttatgtattgtccagtttcattagttacattcccttggtcgttcatttctaggcttctagcacagtagcacggccatctgtgctggtaagaagctagttttttttttctatagctggtatctacagaggaaacctggaatgctatcagaatgctatctactgtatatcacctttaattggttattttcctgtctgttttatacatactctgaggctgttgtggttgacaatgcactcctatcttgctggcagaggtatatggtgtttcattttcatgcagtctattcaaatcaccattttactggcgttgcaaaggtttctttacatccttttagctaattaatccttatgcatcgtcagtaaacatggtagtgcgtctgcatctataaagttcatgtaactcagggctgtgagactgctacccaaatcgggtctacccaatccatcaaacacaggcatataataatgctattgggtattatttcctagagagaattcgatctgtgaacacacgaaagtagcataatatatatccagaaaaacatacatacgagagtagcagaatatacatccagaaaaatacatattcatatgtaatgaggtgctgtaatgacaatgcagtactcacacaagaaaaccgctgatcagctcacgattgcaacgcaatccacgctcctagtctgcacgcccgacttggccccgtccccgggcagcagcacgccggcgatgccggcgacgtccaagatgaccgagcagttcatccgaacgtcgaggctcttcttgatgatccccagcacgctgaccctcgccctcatcgccgtgtaggtggtcaggtcgtactcctgcccgagtatcagccccgtgccgttgagcaccgacgcgaggcggtcggcgagcaggtcgagcgtgatgttcatccgcaccgtccggtcggcgccgacgctgccggcggggacgtacgccacgctcaccgtcttccccttgtagtacacgtccgtctcgctccgggagaaccggagcgacgcggcgttggggttcttgaccgagacgtcggcggtgagcgtcgcgttggtcgccacggtgctcccgatgccggcgccggtgccggggccggtgctgatggccgtcacccacacgccgttcatggtgatgcgggggtccttcaccctgaacacggtgagcgcgaggacgaggatgacgaggccgacgacgaccagggtggtcacgcagcagccgcagcagcagagcgcgcgccgccgcttccggaggtactgcatggaccgccaccccgtcgccgcctgcgcctcctcctcctcccccacgccggtcgccgccgggtggaccgacggggatggcaccgcgaatggccgcgccggctcgttcttgttctccgccgccgtcgccatgggagctggagctagctagctatagcaaatgtcacgaacggacacgaccgtttttgttagttacttgtctgaatggatcacaccacctagctcgaacctgctccgctgttcctggtcttggtcttcgatttatacatgtggccgagcaagtccactgtcgtggctgcgacactgtcatgcgccggatttgacacgtacgcttgactcgtggaagcttgagatgatgactacgtttgctgctgagtccatagccgtgtaattttcacggactgtgattggtccgggggtctttgtgagttctgacttctgaataattatttcttccttctagatgggaaagattgtatgtatcatctttccaaactgcgtgaaaagaaaaaccgggtcgtcctgactgaatgattcttgatatcgtttaacgcatgattcttctagatatactgatatttcttttctcaatggaatccgattatctggtgcatataatcagagcaccgattgatgatggttcacttcgagactaaacaaatgacatgagaaacacgtggagacggcaaaaaaacatggggttgacaataagctggcgattactcgtttccgaggagtaatcagagttgatattgagcgcatgaattggaatgtggccacttggcacatgacactaattcactggcattcttcccacttttttttggggggggggggggggggggcaaggataacttgaattcttcctgaatgaaatggagaaaaaaaagtattattcgtattgtaaaatattgtttcattggaaaaagataatgcttcctctcaggcgttcaatgagggagaaatatcat
